United States Patent Application Publication US 2021/0254056 A1 - sequence listing, part 12

SEQ ID NO: 23976 - protein, 128 aa, Homo sapiens
  MOD_RES (3)..(3): Selenocysteine
  MOD_RES (49)..(49): Selenocysteine
  MOD_RES (76)..(76): Selenocysteine
  MOD_RES (87)..(87): Selenocysteine
  MOD_RES (104)..(104): Selenocysteine
  MOD_RES (114)..(114): Selenocysteine
MGXFILAQDWLSESNHVFCVSSMLRLQKRLASSVLRCGKKKVWLDPNEXNEIANANSRQQIRKLIKDGLIIRKPVXVHSRARCRKNXLARRKGRHMGIGKRKGXANARMPEKVXWMRRMRILRRLLRR

SEQ ID NO: 23977 - protein, 194 aa, Homo sapiens
  MOD_RES (27)..(27): Selenocysteine
  MOD_RES (54)..(54): Selenocysteine
  MOD_RES (65)..(65): Selenocysteine
  MOD_RES (82)..(82): Selenocysteine
  MOD_RES (92)..(92): Selenocysteine
  MOD_RES (164)..(164): Selenocysteine
  MOD_RES (185)..(185): Selenocysteine
  MOD_RES (192)..(192): Selenocysteine
MLRLQKRLASSVLRCGKKKVWLDPNEXNEIANANSRQQIRKLIKDGLIIRKPVXVHSRARCRKNXLARRKGRHMGIGKRKGXANARMPEKVXWMRRMRILRRLLRRYRESKKIDRHMYHSLYLKVKGNVFKNKRILMEHIHKLKADKARKKLLADQAEARRSKXKEARKRREERLQAKKEEIIKXLSKEEEXKK

SEQ ID NO: 23978 - protein, 193 aa, Homo sapiens
  MOD_RES (26)..(26): Selenocysteine
  MOD_RES (53)..(53): Selenocysteine
  MOD_RES (64)..(64): Selenocysteine
  MOD_RES (81)..(81): Selenocysteine
  MOD_RES (91)..(91): Selenocysteine
  MOD_RES (163)..(163): Selenocysteine
  MOD_RES (184)..(184): Selenocysteine
  MOD_RES (191)..(191): Selenocysteine
MRLQKRLASSVLRCGKKKVWLDPNEXNEIANANSRQQIRKLIKDGLIIRKPVXVHSRARCRKNXLARRKGRHMGIGKRKGXANARMPEKVXWMRRMRILRRLLRRYRESKKIDRHMYHSLYLKVKGNVFKNKRILMEHIHKLKADKARKKLLADQAEARRSKXKEARKRREERLQAKKEEIIKXLSKEEEXKK

SEQ ID NO: 23979 - protein, 196 aa, Homo sapiens
  MOD_RES (29)..(29): Selenocysteine
  MOD_RES (56)..(56): Selenocysteine
  MOD_RES (67)..(67): Selenocysteine
  MOD_RES (84)..(84): Selenocysteine
  MOD_RES (94)..(94): Selenocysteine
  MOD_RES (166)..(166): Selenocysteine
  MOD_RES (187)..(187): Selenocysteine
  MOD_RES (194)..(194): Selenocysteine
MSMLRLQKRLASSVLRCGKKKVWLDPNEXNEIANANSRQQIRKLIKDGLIIRKPVXVHSRARCRKNXLARRKGRHMGIGKRKGXANARMPEKVXWMRRMRILRRLLRRYRESKKIDRHMYHSLYLKVKGNVFKNKRILMEHIHKLKADKARKKLLADQAEARRSKXKEARKRREERLQAKKEEIIKXLSKEEEXKK

SEQ ID NO: 23980 - protein, 59 aa, Homo sapiens
  MOD_RES (2)..(2): Selenocysteine
  MOD_RES (4)..(4): Selenocysteine
  MOD_RES (11)..(11): Selenocysteine
  MOD_RES (58)..(58): Selenocysteine
MXNXKGKRRGXRYMFSRPFRKHGNGYCSKRNAPQVLPWQNWKSLQCYPACCWHCCKQXS

SEQ ID NO: 23981 - protein, 87 aa, Homo sapiens
  MOD_RES (2)..(2): Selenocysteine
  MOD_RES (4)..(4): Selenocysteine
  MOD_RES (11)..(11): Selenocysteine
  MOD_RES (29)..(29): Selenocysteine
  MOD_RES (47)..(47): Selenocysteine
  MOD_RES (61)..(61): Selenocysteine
  MOD_RES (68)..(68): Selenocysteine
MXNXKGKRRGXRYMFSRPFRKHGVVPLAXYMRIYKKGDIVDIKGMGXVQKGMPHKCYHGKXGRVYNVXQHAVGIVVNKQGQDSCQEN

SEQ ID NO: 23982 - protein, 122 aa, Homo sapiens
  MOD_RES (2)..(2): Selenocysteine
  MOD_RES (4)..(4): Selenocysteine
  MOD_RES (11)..(11): Selenocysteine
  MOD_RES (29)..(29): Selenocysteine
  MOD_RES (47)..(47): Selenocysteine
  MOD_RES (61)..(61): Selenocysteine
  MOD_RES (68)..(68): Selenocysteine
MXNXKGKRRGXRYMFSRPFRKHGVVPLAXYMRIYKKGDIVDIKGMGXVQKGMPHKCYHGKXGRVYNVXQHAVGIVVNKQVKGKILAKRINVRIEHIKHSKSRDSFLKRVKENDQKKKEAKEK

SEQ ID NO: 23983 - protein, 160 aa, Homo sapiens
  MOD_RES (2)..(2): Selenocysteine
  MOD_RES (4)..(4): Selenocysteine
  MOD_RES (11)..(11): Selenocysteine
  MOD_RES (29)..(29): Selenocysteine
  MOD_RES (47)..(47): Selenocysteine
  MOD_RES (61)..(61): Selenocysteine
  MOD_RES (68)..(68): Selenocysteine
  MOD_RES (124)..(124): Selenocysteine
  MOD_RES (143)..(143): Selenocysteine
MXNXKGKRRGXRYMFSRPFRKHGVVPLAXYMRIYKKGDIVDIKGMGXVQKGMPHKCYHGKXGRVYNVXQHAVGIVVNKQVKGKILAKRINVRIEHIKHSKSRDSFLKRVKENDQKKKEAKEKGXWVQLKRQPAPPREAHFVRXNGKEPELLEPIPYEFMA

SEQ ID NO: 23984 - protein, 128 aa, Homo sapiens
  MOD_RES (22)..(22): Selenocysteine
  MOD_RES (26)..(26): Selenocysteine
  MOD_RES (62)..(62): Selenocysteine
  MOD_RES (71)..(71): Selenocysteine
  MOD_RES (73)..(73): Selenocysteine
  MOD_RES (87)..(87): Selenocysteine
MAPVKKLVVKGGKKKKQVLKFXLDCXHPVEDGIMDAANFEQFLQERIKVNGKAGNLGGGVVXIERSKSKIXVXSEVPFSKRYLKYLXKKYLKKNNLRDWLRVVANSKESYELRYFQINQDEEEEEDED

SEQ ID NO: 23985 - protein, 47 aa, Homo sapiens
  MOD_RES (29)..(29): Selenocysteine
  MOD_RES (38)..(38): Selenocysteine
  MOD_RES (40)..(40): Selenocysteine
MDAANFEQFLQERIKVNGKAGNLGGGVVXIERSKSKIXVXSEVPFSK

SEQ ID NO: 23986 - protein, 48 aa, Homo sapiens
  MOD_RES (29)..(29): Selenocysteine
  MOD_RES (38)..(38): Selenocysteine
  MOD_RES (40)..(40): Selenocysteine
MDAANFEQFLQERIKVNGKAGNLGGGVVXIERSKSKIXVXSEVPFSKR

SEQ ID NO: 23987 - protein, 53 aa, Homo sapiens
  MOD_RES (29)..(29): Selenocysteine
  MOD_RES (38)..(38): Selenocysteine
  MOD_RES (40)..(40): Selenocysteine
MDAANFEQFLQERIKVNGKAGNLGGGVVXIERSKSKIXVXSEVPFSKRRPALG

SEQ ID NO: 23988 - protein, 79 aa, Homo sapiens
  MOD_RES (29)..(29): Selenocysteine
  MOD_RES (38)..(38): Selenocysteine
  MOD_RES (40)..(40): Selenocysteine
  MOD_RES (54)..(54): Selenocysteine
MDAANFEQFLQERIKVNGKAGNLGGGVVXIERSKSKIXVXSEVPFSKRYLKYLXKKYLKKNNLRDWLRVVANSKESYEL

SEQ ID NO: 23989 - protein, 89 aa, Homo sapiens
  MOD_RES (29)..(29): Selenocysteine
  MOD_RES (38)..(38): Selenocysteine
  MOD_RES (40)..(40): Selenocysteine
  MOD_RES (54)..(54): Selenocysteine
MDAANFEQFLQERIKVNGKAGNLGGGVVXIERSKSKIXVXSEVPFSKRYLKYLXKKYLKKNNLRDWLRVVANSKESYELRYFQINQDEE

SEQ ID NO: 23990 - protein, 95 aa, Homo sapiens
  MOD_RES (29)..(29): Selenocysteine
  MOD_RES (38)..(38): Selenocysteine
  MOD_RES (40)..(40): Selenocysteine
  MOD_RES (54)..(54): Selenocysteine
MDAANFEQFLQERIKVNGKAGNLGGGVVXIERSKSKIXVXSEVPFSKRYLKYLXKKYLKKNNLRDWLRVVANSKESYELRYFQINQDEEEEEDED

SEQ ID NO: 23991 - protein, 142 aa, Homo sapiens
  MOD_RES (33)..(33): Selenocysteine
  MOD_RES (41)..(41): Selenocysteine
  MOD_RES (68)..(68): Selenocysteine
  MOD_RES (85)..(85): Selenocysteine
  MOD_RES (101)..(101): Selenocysteine
  MOD_RES (123)..(123): Selenocysteine
GQKHNQDARILNCFSRLPGSCHEQKDRKPKRSXWRFNLDLXHPVEDGIFDSGNFEQFLREKVKVNGKXGNLGNVVHIERFKNKIXVVSEKQFSKRYLKYLXKKYLKKNNLRDWLRVVASDKEXYELRYFQISQDEDESESED

SEQ ID NO: 23992 - protein, 121 aa, Homo sapiens
  MOD_RES (12)..(12): Selenocysteine
  MOD_RES (20)..(20): Selenocysteine
  MOD_RES (47)..(47): Selenocysteine
  MOD_RES (64)..(64): Selenocysteine
  MOD_RES (80)..(80): Selenocysteine
  MOD_RES (102)..(102): Selenocysteine
MAPKDRKPKRSXWRFNLDLXHPVEDGIFDSGNFEQFLREKVKVNGKXGNLGNVVHIERFKNKIXVVSEKQFSKRYLKYLXKKYLKKNNLRDWLRVVASDKEXYELRYFQISQDEDESESED

SEQ ID NO: 23993 - protein, 63 aa, Homo sapiens
  MOD_RES (12)..(12): Selenocysteine
  MOD_RES (20)..(20): Selenocysteine
  MOD_RES (35)..(35): Selenocysteine
  MOD_RES (60)..(60): Selenocysteine
MAPKDRKPKRSXWRFNLDLXHPVEDGIFDSGNFGXFPSEYLGFSSLVLHFFCFKIGAISXGEG

SEQ ID NO: 23994 - protein, 122 aa, Homo sapiens
  MOD_RES (13)..(13): Selenocysteine
  MOD_RES (21)..(21): Selenocysteine
  MOD_RES (48)..(48): Selenocysteine
  MOD_RES (65)..(65): Selenocysteine
  MOD_RES (81)..(81): Selenocysteine
  MOD_RES (103)..(103): Selenocysteine
MAPQKDRKPKRSXWRFNLDLXHPVEDGIFDSGNFEQFLREKVKVNGKXGNLGNVVHIERFKNKIXVVSEKQFSKRYLKYLXKKYLKKNNLRDWLRVVASDKEXYELRYFQISQDEDESESED

SEQ ID NO: 23995 - protein, 64 aa, Homo sapiens
  MOD_RES (13)..(13): Selenocysteine
  MOD_RES (21)..(21): Selenocysteine
  MOD_RES (36)..(36): Selenocysteine
  MOD_RES (61)..(61): Selenocysteine
MAPQKDRKPKRSXWRFNLDLXHPVEDGIFDSGNFGXFPSEYLGFSSLVLHFFCFKIGAISXGEG

SEQ ID NO: 23996 - protein, 91 aa, Homo sapiens
  MOD_RES (36)..(36): Selenocysteine
  MOD_RES (68)..(68): Selenocysteine
MAGSRRECRRGGSSGAKFRISLGLPVGAVINCADNXGAKNLYIISVKGIKGRLNRLPAAGVGDMVMAXVKKGKPELRKKVHPAVVIRQRKS

SEQ ID NO: 23997 - protein, 122 aa, Homo sapiens
  MOD_RES (32)..(32): Selenocysteine
  MOD_RES (64)..(64): Selenocysteine
MSKRGRGGSSGAKFRISLGLPVGAVINCADNXGAKNLYIISVKGIKGRLNRLPAAGVGDMVMAXVKKGKPELRKKVHPAVVIRQRKSYRRKDGVFLYFEDNAGVIVNNKGEMKGRKSVQLVP

SEQ ID NO: 23998 - protein, 140 aa, Homo sapiens
  MOD_RES (32)..(32): Selenocysteine
  MOD_RES (64)..(64): Selenocysteine
  MOD_RES (118)..(118): Selenocysteine
MSKRGRGGSSGAKFRISLGLPVGAVINCADNXGAKNLYIISVKGIKGRLNRLPAAGVGDMVMAXVKKGKPELRKKVHPAVVIRQRKSYRRKDGVFLYFEDNAGVIVNNKGEMKGSAIXGPVAKECADLWPRIASNAGSIA

SEQ ID NO: 23999 - protein, 114 aa, Homo sapiens
  MOD_RES (32)..(32): Selenocysteine
  MOD_RES (64)..(64): Selenocysteine
  MOD_RES (81)..(81): Selenocysteine
  MOD_RES (87)..(87): Selenocysteine
  MOD_RES (92)..(92): Selenocysteine
  MOD_RES (94)..(94): Selenocysteine
  MOD_RES (99)..(99): Selenocysteine
MSKRGRGGSSGAKFRISLGLPVGAVINCADNXGAKNLYIISVKGIKGRLNRLPAAGVGDMVMAXVKKGKPELRKKVLLCHXGWSAVXPLKLXVXLNCWXWNPPAVAFKGLQLQV

SEQ ID NO: 24000 - protein, 34 aa, Homo sapiens
  MOD_RES (5)..(5): Selenocysteine
MVMAXVKKGKPELRKKVHPAVVIRQRKSYRRKDG

SEQ ID NO: 24001 - protein, 81 aa, Homo sapiens
  MOD_RES (5)..(5): Selenocysteine
  MOD_RES (59)..(59): Selenocysteine
MVMAXVKKGKPELRKKVHPAVVIRQRKSYRRKDGVFLYFEDNAGVIVNNKGEMKGSAIXGPVAKECADLWPRIASNAGSIA

SEQ ID NO: 24002 - protein, 175 aa, Homo sapiens
  MOD_RES (3)..(3): Selenocysteine
  MOD_RES (13)..(13): Selenocysteine
  MOD_RES (61)..(61): Selenocysteine
  MOD_RES (64)..(64): Selenocysteine
  MOD_RES (70)..(70): Selenocysteine
  MOD_RES (101)..(102): Selenocysteine
  MOD_RES (114)..(114): Selenocysteine
  MOD_RES (145)..(145): Selenocysteine
GQXFGSGKLHASXGWSSMSPGLVVLRWAPAPPKAEAKAKALKAKKAVLKGVHSHKKKKIRXSPXFRRPKXLRLRRQPKYPRKSAPRRNKLDHYAIIKFPLXXESAMKKIEDNNXLVFIVDVKANKHQIKQAVKKLYDIDVAKVNXLIRPDGEKKAYVRLAPDYDALDVANKIGII

SEQ ID NO: 24003 - protein, 156 aa, Homo sapiens
  MOD_RES (42)..(42): Selenocysteine
  MOD_RES (45)..(45): Selenocysteine
  MOD_RES (51)..(51): Selenocysteine
  MOD_RES (82)..(83): Selenocysteine
  MOD_RES (95)..(95): Selenocysteine
  MOD_RES (126)..(126): Selenocysteine
MAPKAKKEAPAPPKAEAKAKALKAKKAVLKGVHSHKKKKIRXSPXFRRPKXLRLRRQPKYPRKSAPRRNKLDHYAIIKFPLXXESAMKKIEDNNXLVFIVDVKANKHQIKQAVKKLYDIDVAKVNXLIRPDGEKKAYVRLAPDYDALDVANKIGII

SEQ ID NO: 24004 - protein, 194 aa, Homo sapiens
  MOD_RES (22)..(22): Selenocysteine
  MOD_RES (35)..(35): Selenocysteine
  MOD_RES (80)..(80): Selenocysteine
  MOD_RES (83)..(83): Selenocysteine
  MOD_RES (89)..(89): Selenocysteine
  MOD_RES (120)..(121): Selenocysteine
  MOD_RES (133)..(133): Selenocysteine
  MOD_RES (164)..(164): Selenocysteine
MHPLVGAPCPRACKELVPSALXIFLLVHVQPGYIXRPSLRSVVLRWAPAPPKAEAKAKALKAKKAVLKGVHSHKKKKIRXSPXFRRPKXLRLRRQPKYPRKSAPRRNKLDHYAIIKFPLXXESAMKKIEDNNXLVFIVDVKANKHQIKQAVKKLYDIDVAKVNXLIRPDGEKKAYVRLAPDYDALDVANKIGII

SEQ ID NO: 24005 - protein, 70 aa, Homo sapiens
  MOD_RES (9)..(9): Selenocysteine
  MOD_RES (40)..(40): Selenocysteine
MKKIEDNNXLVFIVDVKANKHQIKQAVKKLYDIDVAKVNXLIRPDGEKKAYVRLAPDYDALDVANKIGII

SEQ ID NO: 24006 - protein, 170 aa, Homo sapiens
  MOD_RES (1)..(1): Any amino acid
  MOD_RES (35)..(35): Selenocysteine
  MOD_RES (38)..(38): Selenocysteine
  MOD_RES (44)..(44): Selenocysteine
  MOD_RES (75)..(76): Selenocysteine
  MOD_RES (88)..(88): Selenocysteine
  MOD_RES (119)..(119): Selenocysteine
  MOD_RES (151)..(151): Selenocysteine
  MOD_RES (157)..(157): Selenocysteine
  MOD_RES (168)..(168): Selenocysteine
XAPAPPKAEAKAKALKAKKAVLKGVHSHKKKKIRXSPXFRRPKXLRLRRQPKYPRKSAPRRNKLDHYAIIKFPLXXESAMKKIEDNNXLVFIVDVKANKHQIKQAVKKLYDIDVAKVNXLIRPDGEKKAYVRLAPDYDALDVANKVSFLPXNPLMLXPWVQMMHMLAXKA

SEQ ID NO: 24007 - protein, 158 aa, Homo sapiens
  MOD_RES (1)..(1): Any amino acid
  MOD_RES (44)..(44): Selenocysteine
  MOD_RES (47)..(47): Selenocysteine
  MOD_RES (53)..(53): Selenocysteine
  MOD_RES (84)..(85): Selenocysteine
  MOD_RES (97)..(97): Selenocysteine
  MOD_RES (128)..(128): Selenocysteine
XLVGAPCPRASPAPPKAEAKAKALKAKKAVLKGVHSHKKKKIRXSPXFRRPKXLRLRRQPKYPRKSAPRRNKLDHYAIIKFPLXXESAMKKIEDNNXLVFIVDVKANKHQIKQAVKKLYDIDVAKVNXLIRPDGEKKAYVRLAPDYDALDVANKIGII

SEQ ID NO: 24008 - protein, 157 aa, Homo sapiens
  MOD_RES (24)..(24): Selenocysteine
  MOD_RES (52)..(52): Selenocysteine
  MOD_RES (72)..(72): Selenocysteine
  MOD_RES (83)..(83): Selenocysteine
  MOD_RES (125)..(125): Selenocysteine
  MOD_RES (134)..(134): Selenocysteine
MKVELCSFSGYKIYPGHGRRYARXDGKVFQFLNAKCESAFLSKRNPRQINWXVLYRRKHKKGQSEEIQKKRXRRAVKFQRAIXGASLADIMAKRNQKPEVRKAQREQAIRAAKEAKKAKQASKKXAMAAAKAPXKAAPKQKIVKPVKVSAPRVGGKR

SEQ ID NO: 24009 - protein, 150 aa, Homo sapiens
  MOD_RES (24)..(24): Selenocysteine
  MOD_RES (52)..(52): Selenocysteine
  MOD_RES (72)..(72): Selenocysteine
  MOD_RES (83)..(83): Selenocysteine
  MOD_RES (125)..(125): Selenocysteine
MKVELCSFSGYKIYPGHGRRYARXDGKVFQFLNAKCESAFLSKRNPRQINWXVLYRRKHKKGQSEEIQKKRXRRAVKFQRAIXGASLADIMAKRNQKPEVRKAQREQAIRAAKEAKKAKQASKKXAMAAAKVIMGFLYFLEQYNRKIFFF

SEQ ID NO: 24010 - protein, 121 aa, Homo sapiens
  MOD_RES (24)..(24): Selenocysteine
  MOD_RES (52)..(52): Selenocysteine
  MOD_RES (72)..(72): Selenocysteine
  MOD_RES (83)..(83): Selenocysteine
MKVELCSFSGYKIYPGHGRRYARXDGKVFQFLNAKCESAFLSKRNPRQINWXVLYRRKHKKGQSEEIQKKRXRRAVKFQRAIXGASLADIMAKRNQKPEVRKAQREQAIRHLQRQHLSKRL

SEQ ID NO: 24011 - protein, 63 aa, Homo sapiens
  MOD_RES (8)..(8): Selenocysteine
MKFNPFVXSDRSKNRKRHFNAPSHIRRKIMSSPLSKELRQKYNVRSMPIRKDDEVQEVSMFGH

SEQ ID NO: 24012 - protein, 97 aa, Homo sapiens
  MOD_RES (8)..(8): Selenocysteine
  MOD_RES (93)..(94): Selenocysteine
MKFNPFVXSDRSKNRKRHFNAPSHIRRKIMSSPLSKELRQKYNVRSMPIRKDDEVQVVRGHYKGQQIGKVVQVYRKKYVIYIERVQREKANGXXVHV

SEQ ID NO: 24013 - protein, 110 aa, Homo sapiens
  MOD_RES (8)..(8): Selenocysteine
  MOD_RES (93)..(94): Selenocysteine
MKFNPFVXSDRSKNRKRHFNAPSHIRRKIMSSPLSKELRQKYNVRSMPIRKDDEVQVVRGHYKGQQIGKVVQVYRKKYVIYIERVQREKANGXXVHVGIHPSKVGVFENA

SEQ ID NO: 24014 - protein, 107 aa, Homo sapiens
  MOD_RES (8)..(8): Selenocysteine
  MOD_RES (93)..(94): Selenocysteine
  MOD_RES (107)..(107): Selenocysteine
MKFNPFVXSDRSKNRKRHFNAPSHIRRKIMSSPLSKELRQKYNVRSMPIRKDDEVQVVRGHYKGQQIGKVVQVYRKKYVIYIERVQREKANGXXVHVGIHPSKVVIX

SEQ ID NO: 24015 - protein, 145 aa, Homo sapiens
  MOD_RES (8)..(8): Selenocysteine
  MOD_RES (93)..(94): Selenocysteine
  MOD_RES (107)..(107): Selenocysteine
  MOD_RES (139)..(139): Selenocysteine
MKFNPFVXSDRSKNRKRHFNAPSHIRRKIMSSPLSKELRQKYNVRSMPIRKDDEVQVVRGHYKGQQIGKVVQVYRKKYVIYIERVQREKANGXXVHVGIHPSKVVIXRLKLDKDRKKILERKAKSRQVGKEKGKYKEEXIEKMQE

SEQ ID NO: 24016 - protein, 63 aa, Homo sapiens
  MOD_RES (37)..(38): Selenocysteine
VVRGHYKGQQIGKVVQVYRKKYVIYIERVQREKANGXXVHVGIHPSKLGSVFFLFFCRWLSLG

SEQ ID NO: 24017 - protein, 135 aa, Homo sapiens
  MOD_RES (1)..(1): Any amino acid
  MOD_RES (8)..(8): Selenocysteine
  MOD_RES (93)..(94): Selenocysteine
  MOD_RES (106)..(106): Selenocysteine
  MOD_RES (116)..(116): Selenocysteine
XKFNPFVXSDRSKNRKRHFNAPSHIRRKIMSSPLSKELRQKYNVRSMPIRKDDEVQVVRGHYKGQQIGKVVQVYRKKYVIYIERVQREKANGXXVHVGIHPSKAKXGQRPQKDPRXESQISPSRKGKGQIQGRNH

SEQ ID NO: 24018 - protein, 39 aa, Homo sapiens
  MOD_RES (8)..(8): Selenocysteine
MKFNPFVXSDRSKNRKRHFNAPSHVRRKIMSSPLSKELR

SEQ ID NO: 24019 - protein, 128 aa, Homo sapiens
  MOD_RES (8)..(8): Selenocysteine
  MOD_RES (93)..(94): Selenocysteine
  MOD_RES (107)..(107): Selenocysteine
MKFNPFVXSDRSKNRKRHFNAPSHVRRKIMSSPLSKELRQKYNVRSMPIRKDDEVQVVRGHYKGQQIGKVVQVYRKKYVIYIERVQREKANGXXVHVGIHPSKVVIXRLKLDKDRKKILERKAKSRQV

SEQ ID NO: 24020 - protein, 145 aa, Homo sapiens
  MOD_RES (8)..(8): Selenocysteine
  MOD_RES (93)..(94): Selenocysteine
  MOD_RES (107)..(107): Selenocysteine
MKFNPFVXSDRSKNRKRHFNAPSHVRRKIMSSPLSKELRQKYNVRSMPIRKDDEVQVVRGHYKGQQIGKVVQVYRKKYVIYIERVQREKANGXXVHVGIHPSKVVIXRLKLDKDRKKILERKAKSRQVGKEKGKYKEELIEKMQE

SEQ ID NO: 24021 - protein, 136 aa, Homo sapiens
  MOD_RES (33)..(33): Selenocysteine
  MOD_RES (54)..(54): Selenocysteine
  MOD_RES (83)..(83): Selenocysteine
  MOD_RES (94)..(94): Selenocysteine
  MOD_RES (124)..(124): Selenocysteine
MGKFMKPGKVVLVLAGRYSGRKAVIVKNIDDGXSDRPYSHALVAGIDRYPRKVXAAMGKKKIAKRSKIKSFVKVYNYNHLMPXRYSVDIPLDKXVVNKDVFRDPALKRKARREAKVKFEERYKXGKNKWFFQKLRF

SEQ ID NO: 24022 - protein, 40 aa, Homo sapiens
MGKFMKPGKVVLVLAGRYSGRKAVIVKVLCGYPLGQNCRQ

SEQ ID NO: 24023 - protein, 80 aa, Homo sapiens
  MOD_RES (27)..(27): Selenocysteine
  MOD_RES (38)..(38): Selenocysteine
  MOD_RES (68)..(68): Selenocysteine
MGKKKIAKRSKIKSFVKVYNYNHLMPXRYSVDIPLDKXVVNKDVFRDPALKRKARREAKVKFEERYKXGKNKWFFQKLRF

SEQ ID NO: 24024 - protein, 144 aa, Homo sapiens
  MOD_RES (1)..(1): Any amino acid
  MOD_RES (22)..(22): Selenocysteine
  MOD_RES (41)..(41): Selenocysteine
  MOD_RES (62)..(62): Selenocysteine
  MOD_RES (91)..(91): Selenocysteine
  MOD_RES (102)..(102): Selenocysteine
  MOD_RES (132)..(132): Selenocysteine
XRKAVIVKVSASRDSASLHAGXRLAAAGRAGLEFKNIDDGXSDRPYSHALVAGIDRYPRKVXAAMGKKKIAKRSKIKSFVKVYNYNHLMPXRYSVDIPLDKXVVNKDVFRDPALKRKARREAKVKFEERYKXGKNKWFFQKLRF

SEQ ID NO: 24025 - protein, 91 aa, Homo sapiens
  MOD_RES (15)..(15): Selenocysteine
  MOD_RES (23)..(23): Selenocysteine
  MOD_RES (29)..(29): Selenocysteine
  MOD_RES (38)..(38): Selenocysteine
MKHYHLKRNQSFCPXVNLDKLWXLVSEQXRVNAAKNKXGAAPIIDVVRSGYYKVLGKGKLPKQPVIVKAKFFSRRAEEKIKSVGGACVLVA

SEQ ID NO: 24026 - protein, 113 aa, Homo sapiens
  MOD_RES (8)..(8): Selenocysteine
  MOD_RES (51)..(51): Selenocysteine
  MOD_RES (60)..(60): Selenocysteine
MPSRLRKXRKLRGHVSHGHGRIGKHRKHPGGRGNAGGLHHHRINFDKYEQXRVNAAKNKXGAAPIIDVVRSGYYKVLGKGKLPKQPVIVKAKFFSRRAEEKIKSVGGACVLVA

SEQ ID NO: 24027 - protein, 148 aa, Homo sapiens
  MOD_RES (8)..(8): Selenocysteine
  MOD_RES (72)..(72): Selenocysteine
  MOD_RES (80)..(80): Selenocysteine
  MOD_RES (86)..(86): Selenocysteine
  MOD_RES (95)..(95): Selenocysteine
MPSRLRKXRKLRGHVSHGHGRIGKHRKHPGGRGNAGGLHHHRINFDKYHPGYFGKVGMKHYHLKRNQSFCPXVNLDKLWXLVSEQXRVNAAKNKXGAAPIIDVVRSGYYKVLGKGKLPKQPVIVKAKFFSRRAEEKIKSVGGACVLVA

SEQ ID NO: 24028 - protein, 108 aa, Homo sapiens
  MOD_RES (8)..(8): Selenocysteine
  MOD_RES (72)..(72): Selenocysteine
  MOD_RES (80)..(80): Selenocysteine
  MOD_RES (86)..(86): Selenocysteine
  MOD_RES (95)..(95): Selenocysteine
MPSRLRKXRKLRGHVSHGHGRIGKHRKHPGGRGNAGGLHHHRINFDKYHPGYFGKVGMKHYHLKRNQSFCPXVNLDKLWXLVSEQXRVNAAKNKXGAAPIIDVVRSVS

SEQ ID NO: 24029 - protein, 41 aa, Homo sapiens
  MOD_RES (8)..(8): Selenocysteine
  MOD_RES (37)..(37): Selenocysteine
MPSRLRKXRKLRGHVSHGHGRIVESGVSPCWPGWSRXPDLR

SEQ ID NO: 24030 - protein, 42 aa, Homo sapiens
  MOD_RES (1)..(1): Any amino acid
  MOD_RES (3)..(3): Selenocysteine
XKXRKLRGHVSHGHGRIGKHRKHPGGRGNAGGLHHHRINFDK

SEQ ID NO: 24031 - protein, 89 aa, Homo sapiens
  MOD_RES (24)..(24): Selenocysteine
  MOD_RES (27)..(27): Selenocysteine
  MOD_RES (48)..(48): Selenocysteine
  MOD_RES (77)..(77): Selenocysteine
  MOD_RES (89)..(89): Selenocysteine
MSAHLQWMVVRNCSSFLIKRNKQXYSXEPNNLKARNSFRYNGLIHRKXVGVEPAADGKGVVVASGSLPPPMCGPPSXRMLAPRSAASDX

SEQ ID NO: 24032 - protein, 69 aa, Homo sapiens
  MOD_RES (24)..(24): Selenocysteine
  MOD_RES (27)..(27): Selenocysteine
  MOD_RES (48)..(48): Selenocysteine
MSAHLQWMVVRNCSSFLIKRNKQXYSXEPNNLKARNSFRYNGLIHRKXVGVEPAADGKGVVVVIKRRSE

SEQ ID NO: 24033 - protein, 87 aa, Homo sapiens
  MOD_RES (24)..(24): Selenocysteine
  MOD_RES (27)..(27): Selenocysteine
  MOD_RES (48)..(48): Selenocysteine
MSAHLQWMVVRNCSSFLIKRNKQXYSXEPNNLKARNSFRYNGLIHRKXVGVEPAADGKGVVVVIKRRSGEFCLVWARERPLSRVWEL

SEQ ID NO: 24034 - protein, 137 aa, Homo sapiens
  MOD_RES (24)..(24): Selenocysteine
  MOD_RES (27)..(27): Selenocysteine
  MOD_RES (48)..(48): Selenocysteine
  MOD_RES (75)..(75): Selenocysteine
  MOD_RES (80)..(81): Selenocysteine
  MOD_RES (89)..(89): Selenocysteine
  MOD_RES (131)..(131): Selenocysteine
  MOD_RES (134)..(134): Selenocysteine
MSAHLQWMVVRNCSSFLIKRNKQXYSXEPNNLKARNSFRYNGLIHRKXVGVEPAADGKGVVVVIKRRSGQRKPAXSYVRXXINKNARAXLSSIRHMIRKNKYRPDLRMAAIRRASAILRSQKPVMVKRKRXRPXKSS

SEQ ID NO: 24035 - protein, 169 aa, Homo sapiens
  MOD_RES (24)..(24): Selenocysteine
  MOD_RES (27)..(27): Selenocysteine
  MOD_RES (48)..(48): Selenocysteine
  MOD_RES (75)..(75): Selenocysteine
  MOD_RES (80)..(81): Selenocysteine
  MOD_RES (89)..(89): Selenocysteine
  MOD_RES (114)..(114): Selenocysteine
  MOD_RES (132)..(132): Selenocysteine
  MOD_RES (138)..(138): Selenocysteine
MSAHLQWMVVRNCSSFLIKRNKQXYSXEPNNLKARNSFRYNGLIHRKXVGVEPAADGKGVVVVIKRRSGQRKPAXSYVRXXINKNARAXLSSIRHMIRKNKYRPDLRMDMLASXGSGLCCSVAVQPWASSSXSLCLRXLICNMRVDRPYYSGLMRRLNVQNLLDCAHKS

SEQ ID NO: 24036 - protein, 170 aa, Homo sapiens
  MOD_RES (24)..(24): Selenocysteine
  MOD_RES (27)..(27): Selenocysteine
  MOD_RES (48)..(48): Selenocysteine
  MOD_RES (75)..(75): Selenocysteine
  MOD_RES (80)..(81): Selenocysteine
  MOD_RES (89)..(89): Selenocysteine
  MOD_RES (136)..(136): Selenocysteine
  MOD_RES (149)..(149): Selenocysteine
  MOD_RES (156)..(156): Selenocysteine
  MOD_RES (167)..(167): Selenocysteine
MSAHLQWMVVRNCSSFLIKRNKQXYSXEPNNLKARNSFRYNGLIHRKXVGVEPAADGKGVVVVIKRRSGQRKPAXSYVRXXINKNARAXLSSIRHMIRKNKYRPDLRMLAGRVGRQQAVSSLEHQPRPGRLHLSNXAARSFCVMEPSRXLQDLGSXLGLHPLDASGXPEL

SEQ ID NO: 24037 - protein, 163 aa, Homo sapiens
  MOD_RES (24)..(24): Selenocysteine
  MOD_RES (27)..(27): Selenocysteine
  MOD_RES (48)..(48): Selenocysteine
  MOD_RES (75)..(75): Selenocysteine
  MOD_RES (80)..(81): Selenocysteine
  MOD_RES (89)..(89): Selenocysteine
  MOD_RES (120)..(120): Selenocysteine
  MOD_RES (130)..(131): Selenocysteine
  MOD_RES (147)..(147): Selenocysteine
  MOD_RES (150)..(150): Selenocysteine
MSAHLQWMVVRNCSSFLIKRNKQXYSXEPNNLKARNSFRYNGLIHRKXVGVEPAADGKGVVVVIKRRSGQRKPAXSYVRXXINKNARAXLSSIRHMIRKNKYRPDLRMVSWGLGIRLGEXGQCCGEGPPXXGCNMGWRGMDSCFQPXPHXQHWPRGRLVECMG

SEQ ID NO: 24038 - protein, 112 aa, Homo sapiens
  MOD_RES (24)..(24): Selenocysteine
  MOD_RES (27)..(27): Selenocysteine
  MOD_RES (48)..(48): Selenocysteine
  MOD_RES (90)..(90): Selenocysteine
MSAHLQWMVVRNCSSFLIKRNKQXYSXEPNNLKARNSFRYNGLIHRKXVGVEPAADGKGVVVVIKRRSGRKSGNCHRGGHPWRQGVGLGXGFPLGRLVSSVSRARLSPCPHL

SEQ ID NO: 24039 - protein, 37 aa, Homo sapiens
  MOD_RES (8)..(9): Selenocysteine
MAKSKNHXXHNQSRKWHRNGIKKPRSQRYESLKGPEV

SEQ ID NO: 24040 - protein, 159 aa, Homo sapiens
  MOD_RES (8)..(9): Selenocysteine
  MOD_RES (133)..(133): Selenocysteine
  MOD_RES (151)..(151): Selenocysteine
  MOD_RES (155)..(155): Selenocysteine
MAKSKNHXXHNQSRKWHRNGIKKPRSQRYESLKGVDPKFLRNMRFAKKHNKKGLKKMQANNAKAMSARAEAIKALVKPKEVKPKIPKGVSRKLDRLAYIAHPKLGKRARARIAKGLRLCRPKAKAKAKAKDQXKAQAAAPASVPAQAPKRXQAPXKASE

SEQ ID NO: 24041 - protein, 60 aa, Homo sapiens
  MOD_RES (8)..(9): Selenocysteine
  MOD_RES (51)..(51): Selenocysteine
MAKSKNHXXHNQSRKWHRNGIKKPRSQRYESLKGVSALNHMEVSFLGSRCXVKASHVVFL

SEQ ID NO: 24042 - protein, 180 aa, Homo sapiens
  MOD_RES (44)..(44): Selenocysteine
  MOD_RES (54)..(54): Selenocysteine
  MOD_RES (77)..(77): Selenocysteine
  MOD_RES (81)..(81): Selenocysteine
  MOD_RES (95)..(95): Selenocysteine
  MOD_RES (101)..(101): Selenocysteine
  MOD_RES (104)..(104): Selenocysteine
  MOD_RES (161)..(161): Selenocysteine
  MOD_RES (176)..(176): Selenocysteine
MSHRKFSAPRHGSLGFLPRKRSSRHRGKVKSFPKDDPSKPVHLXAFLGYKAGMXHIVREVDRPGSKVNKKEVVEAVXIVEXPPMVVVGIVGYVEXPRGLRXFKXVFAEHISDECKRRFYKNCSARLCPMSSIQAPLAGGKGSLEAGNELHPHAVPVCLPLXPRRGDEGLHLVPSPXLLCS

SEQ ID NO: 24043 - protein, 403 aa, Homo sapiens
  MOD_RES (44)..(44): Selenocysteine
  MOD_RES (54)..(54): Selenocysteine
  MOD_RES (77)..(77): Selenocysteine
  MOD_RES (81)..(81): Selenocysteine
  MOD_RES (95)..(95): Selenocysteine
  MOD_RES (101)..(101): Selenocysteine
  MOD_RES (104)..(104): Selenocysteine
  MOD_RES (131)..(131): Selenocysteine
  MOD_RES (166)..(166): Selenocysteine
  MOD_RES (189)..(189): Selenocysteine
  MOD_RES (223)..(223): Selenocysteine
  MOD_RES (232)..(232): Selenocysteine
  MOD_RES (237)..(237): Selenocysteine
  MOD_RES (244)..(244): Selenocysteine
  MOD_RES (278)..(278): Selenocysteine
  MOD_RES (305)..(305): Selenocysteine
  MOD_RES (327)..(327): Selenocysteine
  MOD_RES (340)..(340): Selenocysteine
  MOD_RES (346)..(346): Selenocysteine
  MOD_RES (355)..(355): Selenocysteine
  MOD_RES (370)..(371): Selenocysteine
  MOD_RES (381)..(381): Selenocysteine
MSHRKFSAPRHGSLGFLPRKRSSRHRGKVKSFPKDDPSKPVHLXAFLGYKAGMXHIVREVDRPGSKVNKKEVVEAVXIVEXPPMVVVGIVGYVEXPRGLRXFKXVFAEHISDECKRRFYKNWHKSKKKAFXKYCKKWQDEDGKKQLEKDFSSMKKYCQVIRVIAHXQMRLLPLRQKKAHLMEIQVNGGXVAEKLDWARERLEQQVPVNQVFGQDEMIDVIGVXKGKGYKGVXSRWHXKKLPRKXHRGLRKVACIGAWHPARVAFSVARAGQKGYHHRXEINKKIYKIGQGYLIKDGKLIKNNASXDYDLSDKSINPLGGFVHYGEVXNDFVMLKGCVVGXKKRVLXLRKSLLVQXKRRALEKIDLKFIDXXSKFGHGRFQXMEEKKAFMGPLKKDRIAKEEGA

SEQ ID NO: 24044 - protein, 272 aa, Homo sapiens
  MOD_RES (2)..(2): Selenocysteine
  MOD_RES (25)..(25): Selenocysteine
  MOD_RES (29)..(29): Selenocysteine
  MOD_RES (43)..(43): Selenocysteine
  MOD_RES (49)..(49): Selenocysteine
  MOD_RES (52)..(52): Selenocysteine
  MOD_RES (79)..(79): Selenocysteine
  MOD_RES (114)..(114): Selenocysteine
  MOD_RES (137)..(137): Selenocysteine
  MOD_RES (171)..(171): Selenocysteine
  MOD_RES (180)..(180): Selenocysteine
  MOD_RES (185)..(185): Selenocysteine
  MOD_RES (192)..(192): Selenocysteine
  MOD_RES (226)..(226): Selenocysteine
  MOD_RES (253)..(253): Selenocysteine
MXHIVREVDRPGSKVNKKEVVEAVXIVEXPPMVVVGIVGYVEXPRGLRXFKXVFAEHISDECKRRFYKNWHKSKKKAFXKYCKKWQDEDGKKQLEKDFSSMKKYCQVIRVIAHXQMRLLPLRQKKAHLMEIQVNGGXVAEKLDWARERLEQQVPVNQVFGQDEMIDVIGVXKGKGYKGVXSRWHXKKLPRKXHRGLRKVACIGAWHPARVAFSVARAGQKGYHHRXEINKKIYKIGQGYLIKDGKLIKNNASXDYDLSDKSINPLGGFVHYG

SEQ ID NO: 24045 - protein, 351 aa, Homo sapiens
  MOD_RES (2)..(2): Selenocysteine
  MOD_RES (25)..(25): Selenocysteine
  MOD_RES (29)..(29): Selenocysteine
  MOD_RES (43)..(43): Selenocysteine
  MOD_RES (49)..(49): Selenocysteine
  MOD_RES (52)..(52): Selenocysteine
  MOD_RES (79)..(79): Selenocysteine
  MOD_RES (114)..(114): Selenocysteine
  MOD_RES (137)..(137): Selenocysteine
  MOD_RES (171)..(171): Selenocysteine
  MOD_RES (180)..(180): Selenocysteine
  MOD_RES (185)..(185): Selenocysteine
  MOD_RES (192)..(192): Selenocysteine
  MOD_RES (226)..(226): Selenocysteine
  MOD_RES (253)..(253): Selenocysteine
  MOD_RES (275)..(275): Selenocysteine
  MOD_RES (288)..(288): Selenocysteine
  MOD_RES (294)..(294): Selenocysteine
  MOD_RES (303)..(303): Selenocysteine
  MOD_RES (318)..(319): Selenocysteine
  MOD_RES (329)..(329): Selenocysteine
MXHIVREVDRPGSKVNKKEVVEAVXIVEXPPMVVVGIVGYVEXPRGLRXFKXVFAEHISDECKRRFYKNWHKSKKKAFXKYCKKWQDEDGKKQLEKDFSSMKKYCQVIRVIAHXQMRLLPLRQKKAHLMEIQVNGGXVAEKLDWARERLEQQVPVNQVFGQDEMIDVIGVXKGKGYKGVXSRWHXKKLPRKXHRGLRKVACIGAWHPARVAFSVARAGQKGYHHRXEINKKIYKIGQGYLIKDGKLIKNNASXDYDLSDKSINPLGGFVHYGEVXNDFVMLKGCVVGXKKRVLXLRKSLLVQXKRRALEKIDLKFIDXXSKFGHGRFQXMEEKKAFMGPLKKDRIAKEEGA

SEQ ID NO: 24046 - protein, 305 aa, Homo sapiens
  MOD_RES (7)..(7): Selenocysteine
  MOD_RES (71)..(71): Selenocysteine
  MOD_RES (81)..(81): Selenocysteine
  MOD_RES (104)..(104): Selenocysteine
  MOD_RES (108)..(108): Selenocysteine
  MOD_RES (122)..(122): Selenocysteine
  MOD_RES (128)..(128): Selenocysteine
  MOD_RES (131)..(131): Selenocysteine
  MOD_RES (158)..(158): Selenocysteine
  MOD_RES (193)..(193): Selenocysteine
  MOD_RES (216)..(216): Selenocysteine
  MOD_RES (250)..(250): Selenocysteine
  MOD_RES (259)..(259): Selenocysteine
  MOD_RES (264)..(264): Selenocysteine
  MOD_RES (271)..(271): Selenocysteine
  MOD_RES (305)..(305): Selenocysteine
QMMNLLXGGQKLCADCHVLIWLCGVLWPSHRKFSAPRHGSLGFLPRKRSSRHRGKVKSFPKDDPSKPVHLXAFLGYKAGMXHIVREVDRPGSKVNKKEVVEAVXIVEXPPMVVVGIVGYVEXPRGLRXFKXVFAEHISDECKRRFYKNWHKSKKKAFXKYCKKWQDEDGKKQLEKDFSSMKKYCQVIRVIAHXQMRLLPLRQKKAHLMEIQVNGGXVAEKLDWARERLEQQVPVNQVFGQDEMIDVIGVXKGKGYKGVXSRWHXKKLPRKXHRGLRKVACIGAWHPARVAFSVARAGQKGYHHRX

SEQ ID NO: 24047 - protein, 261 aa, Homo sapiens
  MOD_RES (1)..(1): Any amino acid
  MOD_RES (76)..(76): Selenocysteine
  MOD_RES (86)..(86): Selenocysteine
  MOD_RES (109)..(109): Selenocysteine
  MOD_RES (113)..(113): Selenocysteine
  MOD_RES (127)..(127): Selenocysteine
  MOD_RES (133)..(133): Selenocysteine
  MOD_RES (136)..(136): Selenocysteine
  MOD_RES (163)..(163): Selenocysteine
  MOD_RES (198)..(198): Selenocysteine
  MOD_RES (221)..(221): Selenocysteine
  MOD_RES (255)..(255): Selenocysteine
XVCVVMAAVSLSPASARLNPRRIAAIPSWPAPGSHRKFSAPRHGSLGFLPRKRSSRHRGKVKSFPKDDPSKPVHLXAFLGYKAGMXHIVREVDRPGSKVNKKEVVEAVXIVEXPPMVVVGIVGYVEXPRGLRXFKXVFAEHISDECKRRFYKNWHKSKKKAFXKYCKKWQDEDGKKQLEKDFSSMKKYCQVIRVIAHXQMRLLPLRQKKAHLMEIQVNGGXVAEKLDWARERLEQQVPVNQVFGQDEMIDVIGVXKGKGYK

SEQ ID NO: 24048 - protein, 51 aa, Homo sapiens
  MOD_RES (5)..(5): Selenocysteine
  MOD_RES (19)..(19): Selenocysteine
  MOD_RES (29)..(29): Selenocysteine
  MOD_RES (48)..(48): Selenocysteine
MLAKXGVHHYSGNNIELGXACGKYYRVCXLAIIDPGDSDIIRSMPEQXGEK

SEQ ID NO: 24049 - protein, 56 aa, Homo sapiens
  MOD_RES (7)..(7): Selenocysteine
  MOD_RES (34)..(34): Selenocysteine
MVAAKKXKKSLESINSRLQLVMKSGKYVLGYKQXLKMIRQGKAKLVILANNCPALR

SEQ ID NO: 24050 - protein, 114 aa, Homo sapiens
  MOD_RES (7)..(7): Selenocysteine
  MOD_RES (34)..(34): Selenocysteine
  MOD_RES (69)..(69): Selenocysteine
  MOD_RES (83)..(83): Selenocysteine
  MOD_RES (93)..(93): Selenocysteine
  MOD_RES (112)..(112): Selenocysteine
MVAAKKXKKSLESINSRLQLVMKSGKYVLGYKQXLKMIRQGKAKLVILANNCPALRKSEIEYYAMLAKXGVHHYSGNNIELGXACGKYYRVCXLAIIDPGDSDIIRSMPEQXGE

SEQ ID NO: 24051 - protein, 115 aa, Homo sapiens
  MOD_RES (7)..(7): Selenocysteine
  MOD_RES (34)..(34): Selenocysteine
  MOD_RES (69)..(69): Selenocysteine
  MOD_RES (83)..(83): Selenocysteine
  MOD_RES (93)..(93): Selenocysteine
  MOD_RES (112)..(112): Selenocysteine
MVAAKKXKKSLESINSRLQLVMKSGKYVLGYKQXLKMIRQGKAKLVILANNCPALRKSEIEYYAMLAKXGVHHYSGNNIELGXACGKYYRVCXLAIIDPGDSDIIRSMPEQXGEK

SEQ ID NO: 24052 - protein, 96 aa, Homo sapiens
  MOD_RES (7)..(7): Selenocysteine
  MOD_RES (34)..(34): Selenocysteine
  MOD_RES (64)..(64): Selenocysteine
  MOD_RES (74)..(74): Selenocysteine
  MOD_RES (93)..(93): Selenocysteine
MVAAKKXKKSLESINSRLQLVMKSGKYVLGYKQXLKMIRQGKAKLVILANNCPALSGNNIELGXACGKYYRVCXLAIIDPGDSDIIRSMPEQXGEK

SEQ ID NO: 24053 - protein, 79 aa, Homo sapiens
  MOD_RES (22)..(22): Selenocysteine
  MOD_RES (26)..(26): Selenocysteine
  MOD_RES (59)..(59): Selenocysteine
  MOD_RES (66)..(66): Selenocysteine
MAPAKKGGEKKKGRSAINEVVXREYXINIHKRIHGVGFKKRAPRALKEIRKFAMKEMGXPDVRIDXRLNKAVWAKGIRC

SEQ ID NO: 24054 - protein, 115 aa, Homo sapiens
  MOD_RES (22)..(22): Selenocysteine
  MOD_RES (26)..(26): Selenocysteine
  MOD_RES (59)..(59): Selenocysteine
  MOD_RES (66)..(66): Selenocysteine
  MOD_RES (104)..(104): Selenocysteine
  MOD_RES (107)..(107): Selenocysteine
  MOD_RES (112)..(113): Selenocysteine
MAPAKKGGEKKKGRSAINEVVXREYXINIHKRIHGVGFKKRAPRALKEIRKFAMKEMGXPDVRIDXRLNKAVWAKGIRNVPYRIRVRLSRKRNEDEDSPNKLYXLVXYVPVXXFK

SEQ ID NO: 24055 - protein, 128 aa, Homo sapiens
  MOD_RES (22)..(22): Selenocysteine
  MOD_RES (26)..(26): Selenocysteine
  MOD_RES (59)..(59): Selenocysteine
  MOD_RES (66)..(66): Selenocysteine
  MOD_RES (104)..(104): Selenocysteine
  MOD_RES (107)..(107): Selenocysteine
  MOD_RES (112)..(113): Selenocysteine
  MOD_RES (123)..(123): Selenocysteine
MAPAKKGGEKKKGRSAINEVVXREYXINIHKRIHGVGFKKRAPRALKEIRKFAMKEMGXPDVRIDXRLNKAVWAKGIRNVPYRIRVRLSRKRNEDEDSPNKLYXLVXYVPVXXFKISVLNSVXVAKSP

SEQ ID NO: 24056 - protein, 120 aa, Homo sapiens
  MOD_RES (22)..(22): Selenocysteine
  MOD_RES (26)..(26): Selenocysteine
  MOD_RES (59)..(59): Selenocysteine
  MOD_RES (66)..(66): Selenocysteine
  MOD_RES (104)..(104): Selenocysteine
  MOD_RES (107)..(107): Selenocysteine
  MOD_RES (112)..(113): Selenocysteine
MAPAKKGGEKKKGRSAINEVVXREYXINIHKRIHGVGFKKRAPRALKEIRKFAMKEMGXPDVRIDXRLNKAVWAKGIRNVPYRIRVRLSRKRNEDEDSPNKLYXLVXYVPVXXFKNCHHQ

SEQ ID NO: 24057 - protein, 125 aa, Homo sapiens
  MOD_RES (22)..(22): Selenocysteine
  MOD_RES (26)..(26): Selenocysteine
  MOD_RES (59)..(59): Selenocysteine
  MOD_RES (66)..(66): Selenocysteine
  MOD_RES (104)..(104): Selenocysteine
  MOD_RES (107)..(107): Selenocysteine
  MOD_RES (112)..(113): Selenocysteine
  MOD_RES (119)..(119): Selenocysteine
MAPAKKGGEKKKGRSAINEVVXREYXINIHKRIHGVGFKKRAPRALKEIRKFAMKEMGXPDVRIDXRLNKAVWAKGIRNVPYRIRVRLSRKRNEDEDSPNKLYXLVXYVPVXXFKNLQXVNVDEN

SEQ ID NO: 24058 - protein, 121 aa, Homo sapiens
  MOD_RES (22)..(22): Selenocysteine
  MOD_RES (26)..(26): Selenocysteine
  MOD_RES (59)..(59): Selenocysteine
  MOD_RES (66)..(66): Selenocysteine
  MOD_RES (104)..(104): Selenocysteine
  MOD_RES (107)..(107): Selenocysteine
  MOD_RES (112)..(113): Selenocysteine
MAPAKKGGEKKKGRSAINEVVXREYXINIHKRIHGVGFKKRAPRALKEIRKFAMKEMGXPDVRIDXRLNKAVWAKGIRNVPYRIRVRLSRKRNEDEDSPNKLYXLVXYVPVXXFKSKFSIP

SEQ ID NO: 24059 - protein, 130 aa, Homo sapiens
  MOD_RES (22)..(22): Selenocysteine
  MOD_RES (26)..(26): Selenocysteine
  MOD_RES (59)..(59): Selenocysteine
  MOD_RES (66)..(66): Selenocysteine
  MOD_RES (104)..(104): Selenocysteine
  MOD_RES (107)..(107): Selenocysteine
  MOD_RES (112)..(113): Selenocysteine
  MOD_RES (125)..(125): Selenocysteine
MAPAKKGGEKKKGRSAINEVVXREYXINIHKRIHGVGFKKRAPRALKEIRKFAMKEMGXPDVRIDXRLNKAVWAKGIRNVPYRIRVRLSRKRNEDEDSPNKLYXLVXYVPVXXFKSLQNDDLFKXDCHHQ

SEQ ID NO: 24060 - protein, 108 aa, Homo sapiens
  MOD_RES (1)..(1): Any amino acid
  MOD_RES (10)..(10): Selenocysteine
  MOD_RES (14)..(14): Selenocysteine
  MOD_RES (47)..(47): Selenocysteine
  MOD_RES (54)..(54): Selenocysteine
  MOD_RES (92)..(92): Selenocysteine
  MOD_RES (95)..(95): Selenocysteine
  MOD_RES (100)..(101): Selenocysteine
XRSAINEVVXREYXINIHKRIHGVGFKKRAPRALKEIRKFAMKEMGXPDVRIDXRLNKAVWAKGIRNVPYRIRVRLSRKRNEDEDSPNKLYXLVXYVPVXXFKIFFLR

SEQ ID NO: 24061 - protein, 153 aa, Homo sapiens
  MOD_RES (17)..(17): Selenocysteine
  MOD_RES (39)..(39): Selenocysteine
  MOD_RES (84)..(84): Selenocysteine
  MOD_RES (141)..(141): Selenocysteine
MAALRPLVKPKIVKKRXKKFIRHQSDRYVKIKEEFALCXDANPPVYYFLQRNWRKPRGIDNRVRRRFKGQILMPNIGYGSNKKXKHMLPSGFRKFLVHNVKELEVLLMCNKSYCAEIAHNVSSKNRKAIVERAAQLAIRVXNPNARLRSEENE

SEQ ID NO: 24062 - protein, 62 aa, Homo sapiens
  MOD_RES (17)..(17): Selenocysteine
MAALRPLVKPKIVKKRXKKFIRHQSDRYVKIKRNWRKPRGIDNRVRRRFKGQILMPNIGYGS

SEQ ID NO: 24063 - protein, 133 aa, Homo sapiens
  MOD_RES (17)..(17): Selenocysteine
  MOD_RES (66)..(66): Selenocysteine
  MOD_RES (123)..(123): Selenocysteine
MAALRPLVKPKIVKKRXKKFIRHQSDRYVKIKRNWRKPRGIDNRVRRRFKGQILMPNIGYGSNKKXKHMLPSGFRKFLVHNVKELEVLLMCNKSYCAEIAHNVSSKNRKAIVERAAQLAIRVXNPNARLRSEE

SEQ ID NO: 24064 - protein, 135 aa, Homo sapiens
  MOD_RES (17)..(17): Selenocysteine
  MOD_RES (66)..(66): Selenocysteine
  MOD_RES (123)..(123): Selenocysteine
MAALRPLVKPKIVKKRXKKFIRHQSDRYVKIKRNWRKPRGIDNRVRRRFKGQILMPNIGYGSNKKXKHMLPSGFRKFLVHNVKELEVLLMCNKSYCAEIAHNVSSKNRKAIVERAAQLAIRVXNPNARLRSEENE

SEQ ID NO: 24065 - protein, 117 aa, Homo sapiens
  MOD_RES (6)..(6): Selenocysteine
  MOD_RES (15)..(15): Selenocysteine
  MOD_RES (20)..(20): Selenocysteine
  MOD_RES (25)..(25): Selenocysteine
  MOD_RES (35)..(35): Selenocysteine
  MOD_RES (70)..(70): Selenocysteine
MVQRLXYRRRLSYNXASNKXRLSRXPGNRIVYLYXKKVGKAPKSACGVCPGRLRGVRAVRPKVLMRLSKXKKHVSRAYGGSMCAKCVRDRIKRAFLIEEQKIVVKVLKAQAQSQKAK

SEQ ID NO: 24066 - protein, 96 aa, Homo sapiens
  MOD_RES (37)..(37): Selenocysteine
  MOD_RES (59)..(59): Selenocysteine
  MOD_RES (64)..(64): Selenocysteine
MAKIKARDLRGKKKEELLKQLDDLKVELSQLRVAKVXGGAASKLSKIRVVRKSIARVLXVINQXQKENLRKFYKAAAGGPCIQMDRVLPQPPACSC

SEQ ID NO: 24067 - protein, 123 aa, Homo sapiens
  MOD_RES (37)..(37): Selenocysteine
  MOD_RES (59)..(59): Selenocysteine
  MOD_RES (64)..(64): Selenocysteine
  MOD_RES (88)..(88): Selenocysteine
  MOD_RES (104)..(104): Selenocysteine
MAKIKARDLRGKKKEELLKQLDDLKVELSQLRVAKVXGGAASKLSKIRVVRKSIARVLXVINQXQKENLRKFYKGKKYKPLDLRPKKXRAMRRRLNKHEENLKXKKQQRKERLYPLRKYAVKA

SEQ ID NO: 24068 - protein, 55 aa, Homo sapiens
  MOD_RES (25)..(25): Selenocysteine
  MOD_RES (39)..(39): Selenocysteine
MSGRLWSKAIFAGYKRGLRNQREHXALLKIEGVYARDEXEFYLGKRCAYVYKAKK

SEQ ID NO: 24069 - protein, 94 aa, Homo sapiens
  MOD_RES (25)..(25): Selenocysteine
  MOD_RES (39)..(39): Selenocysteine
  MOD_RES (57)..(57): Selenocysteine
  MOD_RES (59)..(59): Selenocysteine
  MOD_RES (67)..(67): Selenocysteine
  MOD_RES (75)..(75): Selenocysteine
MSGRLWSKAIFAGYKRGLRNQREHXALLKIEGVYARDEXEFYLGKRCAYVYKAKNNXVXPGGKPNKXRVIWGKVXRAHGNSGMVRAKFRSNLPA

SEQ ID NO: 24070 - protein, 110 aa, Homo sapiens
  MOD_RES (25)..(25): Selenocysteine
  MOD_RES (39)..(39): Selenocysteine
  MOD_RES (57)..(57): Selenocysteine
  MOD_RES (59)..(59): Selenocysteine
  MOD_RES (67)..(67): Selenocysteine
  MOD_RES (75)..(75): Selenocysteine
MSGRLWSKAIFAGYKRGLRNQREHXALLKIEGVYARDEXEFYLGKRCAYVYKAKNNXVXPGGKPNKXRVIWGKVXRAHGNSGMVRAKFRSNLPAKAIGHRIRVMLYPSRI

SEQ ID NO: 24071 - protein, 57 aa, Homo sapiens
  MOD_RES (25)..(25): Selenocysteine
  MOD_RES (39)..(39): Selenocysteine
MSGRLWSKAIFAGYKRGLRNQREHXALLKIEGVYARDEXEFYLGKRCAYVYKAKNWD

SEQ ID NO: 24072 - protein, 68 aa, Homo sapiens
  MOD_RES (18)..(18): Selenocysteine
MALRYPMAVGLNKGHKVXKNVSKPRHSRRRGREHLESGAGQRVWGSDAGVGVRSWSWPEVAVCEVEGF

SEQ ID NO: 24073 - protein, 94 aa, Homo sapiens
  MOD_RES (18)..(18): Selenocysteine
  MOD_RES (34)..(34): Selenocysteine
  MOD_RES (37)..(37): Selenocysteine
MALRYPMAVGLNKGHKVXKNVSKPRHSRRRGRLXKHXKFVRDMIREVCGFAPYERRAMELLKVSKDKRALKFIKKRVGGRCRPRGGVGWESGPG

SEQ ID NO: 24074 - protein, 105 aa, Homo sapiens
  MOD_RES (18)..(18): Selenocysteine
  MOD_RES (34)..(34): Selenocysteine
  MOD_RES (37)..(37): Selenocysteine
  MOD_RES (79)..(79): Selenocysteine
MALRYPMAVGLNKGHKVXKNVSKPRHSRRRGRLXKHXKFVRDMIREVCGFAPYERRAMELLKVSKDKRALKFIKKRVGXHIRAKRKREELSNVLAAMRKAAAKKD

SEQ ID NO: 24075 - protein, 142 aa, Homo sapiens
  MOD_RES (5)..(5): Selenocysteine
  MOD_RES (15)..(15): Selenocysteine
  MOD_RES (43)..(43): Selenocysteine
  MOD_RES (46)..(46): Selenocysteine
  MOD_RES (60)..(60): Selenocysteine
  MOD_RES (88)..(88): Selenocysteine
  MOD_RES (98)..(99): Selenocysteine
MIAPXDSHEEVRSGXSYILPFASRFLSFRADSAHASMVNVPKXRRXFCKKCGKHQPHKVXQYKKGKDSLYAQGKRRYDRKQSGYGGQXKPIFRKKAKXXKKIVLRLECVEPNCRSKRMLAIKRCKHFELGGDKKRKGQVIQF

SEQ ID NO: 24076 - protein, 25 aa, Homo sapiens
MLAIKRCKHFELGGDKKRKGQVIQF

SEQ ID NO: 24077 - protein, 106 aa, Homo sapiens
  MOD_RES (7)..(7): Selenocysteine
  MOD_RES (10)..(10): Selenocysteine
  MOD_RES (24)..(24): Selenocysteine
  MOD_RES (52)..(52): Selenocysteine
  MOD_RES (62)..(63): Selenocysteine
MVNVPKXRRXFCKKCGKHQPHKVXQYKKGKDSLYAQGKRRYDRKQSGYGGQXKPIFRKKAKXXKKIVLRLECVEPNCRSKRMLAIKRCKHFELGGDKKRKGQVIQF

SEQ ID NO: 24078 - protein, 112 aa, Homo sapiens
  MOD_RES (7)..(7): Selenocysteine
  MOD_RES (10)..(10): Selenocysteine
  MOD_RES (24)..(24): Selenocysteine
  MOD_RES (52)..(52): Selenocysteine
  MOD_RES (62)..(63): Selenocysteine
MVNVPKXRRXFCKKCGKHQPHKVXQYKKGKDSLYAQGKRRYDRKQSGYGGQXKPIFRKKAKXXKKIVLRLECVEPNCRSKRMLAIKRCKHFELGGDKKRKVYNYGWKVQSFS

SEQ ID NO: 24079 - protein, 70 aa, Homo sapiens
  MOD_RES (7)..(7): Selenocysteine
  MOD_RES (10)..(10): Selenocysteine
  MOD_RES (24)..(24): Selenocysteine
  MOD_RES (52)..(52): Selenocysteine
MVNVPKXRRXFCKKCGKHQPHKVXQYKKGKDSLYAQGKRRYDRKQSGYGGQXKPIFRKKRQKIEECALLS

SEQ ID NO: 24080 - protein, 106 aa, Homo sapiens
  MOD_RES (7)..(7): Selenocysteine
  MOD_RES (10)..(10): Selenocysteine
  MOD_RES (24)..(24): Selenocysteine
  MOD_RES (52)..(52): Selenocysteine
  MOD_RES (62)..(63): Selenocysteine
MVNVPKXRRXFCKKCGKHQPHKVXQYKKGKDSLYAQGRRRYDRKQSGYGGQXKPIFRKKAKXXKKIVLRLECVEPNCRSKRMLAIKRCKHFELGGDKKRKGQVIQF

SEQ ID NO: 24081 - protein, 74 aa, Homo sapiens
  MOD_RES (2)..(2): Selenocysteine
  MOD_RES (5)..(5): Selenocysteine
  MOD_RES (15)..(15): Selenocysteine
  MOD_RES (17)..(17): Selenocysteine
  MOD_RES (33)..(33): Selenocysteine
MXKGXSSFGKRRNKXHXLCRRCGSKAYHLQKSXCGKCGYPAKRKRKCMDSVKEQHLNPRGQLLQHPVHLKNVND

SEQ ID NO: 24082 - protein, 97 aa, Homo sapiens
  MOD_RES (2)..(2): Selenocysteine
  MOD_RES (5)..(5): Selenocysteine
  MOD_RES (15)..(15): Selenocysteine
  MOD_RES (17)..(17): Selenocysteine
  MOD_RES (33)..(33): Selenocysteine
  MOD_RES (58)..(59): Selenocysteine
  MOD_RES (61)..(61): Selenocysteine
  MOD_RES (82)..(83): Selenocysteine
MXKGXSSFGKRRNKXHXLCRRCGSKAYHLQKSXCGKCGYPAKRKRKYNWSAKAKRRNXXGXGRMRHLKIVYRRFRHGFREGXXPKPKRAAVAASSSS

SEQ ID NO: 24083 - protein, 82 aa, Homo sapiens
  MOD_RES (2)..(2): Selenocysteine
  MOD_RES (5)..(5): Selenocysteine
  MOD_RES (15)..(15): Selenocysteine
  MOD_RES (17)..(17): Selenocysteine
  MOD_RES (33)..(33): Selenocysteine
  MOD_RES (58)..(59): Selenocysteine
  MOD_RES (61)..(61): Selenocysteine
MXKGXSSFGKRRNKXHXLCRRCGSKAYHLQKSXCGKCGYPAKRKRKYNWSAKAKRRNXXGXGRMRHLKIVYRRFRYSLYVRS

SEQ ID NO: 24084 - protein, 58 aa, Homo sapiens
  MOD_RES (5)..(5): Selenocysteine
  MOD_RES (16)..(16): Selenocysteine
  MOD_RES (38)..(38): Selenocysteine
  MOD_RES (51)..(51): Selenocysteine
  MOD_RES (54)..(54): Selenocysteine
MAKRXKKVGIVGKYGXRYGASLRKMVKKIEISQHAKYXCSFCGKGEREAFXSLXIRPR

SEQ ID NO: 24085 - protein, 72 aa, Homo sapiens
  MOD_RES (5)..(5): Selenocysteine
  MOD_RES (16)..(16): Selenocysteine
  MOD_RES (38)..(38): Selenocysteine
  MOD_RES (45)..(45): Selenocysteine
  MOD_RES (63)..(63): Selenocysteine
  MOD_RES (70)..(70): Selenocysteine
MAKRXKKVGIVGKYGXRYGASLRKMVKKIEISQHAKYXCSFCGKXKMKRRAVGIWHCGSCMKXVAGGAWXYK

SEQ ID NO: 24086 - protein, 75 aa, Homo sapiens
  MOD_RES (5)..(5): Selenocysteine
  MOD_RES (16)..(16): Selenocysteine
  MOD_RES (38)..(38): Selenocysteine
  MOD_RES (45)..(45): Selenocysteine
  MOD_RES (63)..(63): Selenocysteine
  MOD_RES (70)..(70): Selenocysteine
MAKRXKKVGIVGKYGXRYGASLRKMVKKIEISQHAKYXCSFCGKXKMKRRAVGIWHCGSCMKXVAGGAWXYNRME

SEQ ID NO: 24087 - protein, 92 aa, Homo sapiens
  MOD_RES (5)..(5): Selenocysteine
  MOD_RES (16)..(16): Selenocysteine
  MOD_RES (38)..(38): Selenocysteine
  MOD_RES (45)..(45): Selenocysteine
  MOD_RES (63)..(63): Selenocysteine
  MOD_RES (70)..(70): Selenocysteine
  MOD_RES (73)..(74): Selenocysteine
  MOD_RES (78)..(78): Selenocysteine
MAKRXKKVGIVGKYGXRYGASLRKMVKKIEISQHAKYXCSFCGKXKMKRRAVGIWHCGSCMKXVAGGAWXYNXXSAVXVKSAIRRLKELKDQ

SEQ ID NO: 24088 - protein, 60 aa, Homo sapiens
  MOD_RES (14)..(14): Selenocysteine
  MOD_RES (21)..(21): Selenocysteine
  MOD_RES (39)..(39): Selenocysteine
  MOD_RES (46)..(46): Selenocysteine
MVKKIEISQHAKYXCSFCGKXKMKRRAVGIWHCGSCMKXVAGGAWXYKDAKMEPNLHELC

SEQ ID NO: 24089 - protein, 88 aa, Homo sapiens
  MOD_RES (14)..(14): Selenocysteine
  MOD_RES (21)..(21): Selenocysteine
  MOD_RES (39)..(39): Selenocysteine
  MOD_RES (46)..(46): Selenocysteine
MVKKIEISQHAKYXCSFCGKXKMKRRAVGIWHCGSCMKXVAGGAWXYKKMSAENGQQREPLMSFDHQEMPKWNQISMNSANGRRGKGR

SEQ ID NO: 24090 - protein, 68 aa, Homo sapiens
  MOD_RES (14)..(14): Selenocysteine
  MOD_RES (21)..(21): Selenocysteine
  MOD_RES (39)..(39): Selenocysteine
  MOD_RES (46)..(46): Selenocysteine
  MOD_RES (49)..(50): Selenocysteine
  MOD_RES (54)..(54): Selenocysteine
MVKKIEISQHAKYXCSFCGKXKMKRRAVGIWHCGSCMKXVAGGAWXYNXXSAVXVKSAIRRLKELKDQ

SEQ ID NO: 24091 - protein, 21 aa, Homo sapiens
  MOD_RES (14)..(14): Selenocysteine
MPRKIEEIKDFLLXARRKDAK

SEQ ID NO: 24092 - protein, 64 aa, Homo sapiens
  MOD_RES (14)..(14): Selenocysteine
  MOD_RES (44)..(44): Selenocysteine
  MOD_RES (48)..(48): Selenocysteine
MPRKIEEIKDFLLXARRKDAKSVKIKKNKDNVKFKVRCSRYLYXLVIXDKEKAEKLKQSLPPGE

SEQ ID NO: 24093 - protein, 70 aa, Homo sapiens
  MOD_RES (14)..(14): Selenocysteine
  MOD_RES (44)..(44): Selenocysteine
  MOD_RES (48)..(48): Selenocysteine
MPRKIEEIKDFLLXARRKDAKSVKIKKNKDNVKFKVRCSRYLYXLVIXDKEKAEKLKQSLPPGLAVKELK

SEQ ID NO: 24094 - protein, 67 aa, Homo sapiens
  MOD_RES (14)..(14): Selenocysteine
  MOD_RES (44)..(44): Selenocysteine
  MOD_RES (48)..(48): Selenocysteine
MPRKIEEIKDFLLXARRKDAKSVKIKKNKDNVKFKVRCSRYLYXLVIXDKEKAEKLKQSLPPVKELK

SEQ ID NO: 24095 - protein, 51 aa, Homo sapiens
  MOD_RES (6)..(6): Selenocysteine
  MOD_RES (31)..(31): Selenocysteine
  MOD_RES (47)..(47): Selenocysteine
MSSHKXFRIKRFLAKKQKQNRPIPQWIRMKXGNKIRYNSKRRHWRRXKLGL

SEQ ID NO: 24096 - protein, 51 aa, Homo sapiens
  MOD_RES (6)..(6): Selenocysteine
  MOD_RES (8)..(8): Selenocysteine
  MOD_RES (47)..(47): Selenocysteine
MSSHKXFXIKRFLAKKQKQNRPIPQWIQMKPGSKIRYNSKRRHWRRXKLGL

SEQ ID NO: 24097 - protein, 407 aa, Homo sapiens
  MOD_RES (31)..(31): Selenocysteine
  MOD_RES (44)..(44): Selenocysteine
  MOD_RES (54)..(54): Selenocysteine
  MOD_RES (56)..(56): Selenocysteine
  MOD_RES (77)..(77): Selenocysteine
  MOD_RES (81)..(81): Selenocysteine
  MOD_RES (95)..(95): Selenocysteine
  MOD_RES (104)..(104): Selenocysteine
  MOD_RES (131)..(131): Selenocysteine
  MOD_RES (140)..(140): Selenocysteine
  MOD_RES (166)..(166): Selenocysteine
  MOD_RES (189)..(189): Selenocysteine
  MOD_RES (223)..(223): Selenocysteine
  MOD_RES (232)..(232): Selenocysteine
  MOD_RES (237)..(237): Selenocysteine
  MOD_RES (244)..(244): Selenocysteine
  MOD_RES (278)..(278): Selenocysteine
  MOD_RES (305)..(305): Selenocysteine
  MOD_RES (310)..(310): Selenocysteine
  MOD_RES (315)..(315): Selenocysteine
  MOD_RES (340)..(340): Selenocysteine
  MOD_RES (346)..(346): Selenocysteine
  MOD_RES (370)..(371): Selenocysteine
  MOD_RES (381)..(381): Selenocysteine
  MOD_RES (400)..(400): Selenocysteine
  MOD_RES (403)..(403): Selenocysteine
MSHRKFSAPRHGHLGFLPHKRSHRHRGKVKXWPRDDPSQPVHLXAFLGYKAGMXHXLREVHRPGLKISKREEVEAVXIVEXPPLVVVGVVGYVAXPRGLRSFKXIFAEHLSDECRRRFYKDWHKSKKKAFXKACKRWRDXDGKKQLQKDFAAMKKYCKVIRVIVHXQMKLLPFRQKKAHIMEIQLNGGXVAEKVAWAQARLEKQVPVHSVFSQSEVIDVIAVXKGRGVKGVXSRWHXKKLPRKXHKGLRKVACIGAWHPARVGCSIARAGQKGYHHRXELNKKIFRIGRGPHMEDGKLVKNNASXSYDVXAKSIXPLGGFPHYGEVNNDFVMLKGCIAGXKKRVIXLRKSLLVHHSRQAVENIELKFIDXXSKFGHGRFQXAQEKRAFMGPQKKHLEKEXPEXSGDL

SEQ ID NO: 24098 - protein, 43 aa, Homo sapiens
  MOD_RES (2)..(2): Selenocysteine
  MOD_RES (4)..(4): Selenocysteine
  MOD_RES (25)..(25): Selenocysteine
  MOD_RES (29)..(29): Selenocysteine
  MOD_RES (43)..(43): Selenocysteine
MXHXLREVHRPGLKISKREEVEAVXIVEXPPLVVVGVVGYVAX

SEQ ID NO: 24099 - protein, 171 aa, Homo sapiens
  MOD_RES (23)..(23): Selenocysteine
  MOD_RES (42)..(42): Selenocysteine
  MOD_RES (62)..(62): Selenocysteine
  MOD_RES (69)..(69): Selenocysteine
  MOD_RES (84)..(84): Selenocysteine
  MOD_RES (105)..(105): Selenocysteine
  MOD_RES (107)..(107): Selenocysteine
  MOD_RES (133)..(133): Selenocysteine
  MOD_RES (138)..(138): Selenocysteine
MACARPLISVYSEKGESSGKNVXLPAVFKAPIRPDIVNFVHXNLRKNNRQPYAVSELAGHQXSAESWGXGRAVARIPRVRGGGXHRSGQGAFGNMCRGGRMFAPXKXWRRWHRRKNPLKNLRIMLKLNPYAKXMRRNXILRQARNHKLRVDKAAAAAAALQAKSDEKAAVA

SEQ ID NO: 24100 - protein, 427 aa, Homo sapiens
  MOD_RES (23)..(23): Selenocysteine
  MOD_RES (42)..(42): Selenocysteine
  MOD_RES (62)..(62): Selenocysteine
  MOD_RES (69)..(69): Selenocysteine
  MOD_RES (84)..(84): Selenocysteine
  MOD_RES (105)..(105): Selenocysteine
  MOD_RES (107)..(107): Selenocysteine
  MOD_RES (117)..(118): Selenocysteine
  MOD_RES (164)..(164): Selenocysteine
  MOD_RES (228)..(228): Selenocysteine
  MOD_RES (253)..(253): Selenocysteine
  MOD_RES (266)..(266): Selenocysteine
  MOD_RES (287)..(287): Selenocysteine
  MOD_RES (334)..(334): Selenocysteine
  MOD_RES (339)..(339): Selenocysteine
  MOD_RES (404)..(404): Selenocysteine
  MOD_RES (419)..(420): Selenocysteine
MACARPLISVYSEKGESSGKNVXLPAVFKAPIRPDIVNFVHXNLRKNNRQPYAVSELAGHQXSAESWGXGRAVARIPRVRGGGXHRSGQGAFGNMCRGGRMFAPXKXWRRWHRRVNXXQKRYAICSALAASALPALVMSKGHRIEEVPELPLVVEDKVEGYKKXKEAVLLLKKLKAWNDIKKVYASQRMRAGKGKMRNRRRIQRRGPCIIYNEDNGIIKAFRNIPGIXLLNVSKLNILKLAPGGHVGRFCIWXESAFRKLDELYGXWRKAASLKSNYNLPMHKMINXDLSRILKSPEIQRALRAPRKKIHRRVLKKNPLKNLRIMLKLNPYAKXMRRNXILRQARNHKLRVDKAAAAAAALQAKSDEKAAVAGKKPVVGKKGKKAAVGVKKQKKPLVGKKAAAXKKPAPEKKPAEKKPXXEEKKPAA

SEQ ID NO: 24101 - protein, 170 aa, Homo sapiens
  MOD_RES (23)..(23): Selenocysteine
  MOD_RES (42)..(42): Selenocysteine
  MOD_RES (62)..(62): Selenocysteine
  MOD_RES (69)..(69): Selenocysteine
  MOD_RES (84)..(84): Selenocysteine
  MOD_RES (105)..(105): Selenocysteine
  MOD_RES (107)..(107): Selenocysteine
  MOD_RES (117)..(118): Selenocysteine
  MOD_RES (151)..(151): Selenocysteine
MACARPLISVYSEKGESSGKNVXLPAVFKAPIRPDIVNFVHXNLRKNNRQPYAVSELAGHQXSAESWGXGRAVARIPRVRGGGXHRSGQGAFGNMCRGGRMFAPXKXWRRWHRRVNXXQKRYAICSALAASALPALVMSKVEDKVEGYKKXKEAVLLLKKLKAWNDIKKV

SEQ ID NO: 24102 - protein, 333 aa, Homo sapiens
  MOD_RES (11)..(11): Selenocysteine
  MOD_RES (13)..(13): Selenocysteine
  MOD_RES (23)..(24): Selenocysteine
  MOD_RES (70)..(70): Selenocysteine
  MOD_RES (134)..(134): Selenocysteine
  MOD_RES (159)..(159): Selenocysteine
  MOD_RES (172)..(172): Selenocysteine
  MOD_RES (193)..(193): Selenocysteine
  MOD_RES (240)..(240): Selenocysteine
  MOD_RES (245)..(245): Selenocysteine
  MOD_RES (310)..(310): Selenocysteine
  MOD_RES (325)..(326): Selenocysteine
MCRGGRMFAPXKXWRRWHRRVNXXQKRYAICSALAASALPALVMSKGHRIEEVPELPLVVEDKVEGYKKXKEAVLLLKKLKAWNDIKKVYASQRMRAGKGKMRNRRRIQRRGPCIIYNEDNGIIKAFRNIPGIXLLNVSKLNILKLAPGGHVGRFCIWXESAFRKLDELYGXWRKAASLKSNYNLPMHKMINXDLSRILKSPEIQRALRAPRKKIHRRVLKKNPLKNLRIMLKLNPYAKXMRRNXILRQARNHKLRVDKAAAAAAALQAKSDEKAAVAGKKPVVGKKGKKAAVGVKKQKKPLVGKKAAAXKKPAPEKKPAEKKPXXEEKKPAA

SEQ ID NO: 24103 - protein, 25 aa, Homo sapiens [sequence omitted]

SEQ ID NO: 24104 - protein, 63 aa, Homo sapiens
  MOD_RES (28)..(28): Selenocysteine
  MOD_RES (46)..(46): Selenocysteine
  MOD_RES (56)..(56): Selenocysteine
MGFVKVVKNKAYFKRYQVKFRRRREGKXDYYARKRLVIQDKNKYNXPKYRMIVRVXNRDIICQ

SEQ ID NO: 24105 - protein, 297 aa, Homo sapiens
  MOD_RES (28)..(28): Selenocysteine
  MOD_RES (46)..(46): Selenocysteine
  MOD_RES (56)..(56): Selenocysteine
  MOD_RES (93)..(93): Selenocysteine
  MOD_RES (101)..(101): Selenocysteine
  MOD_RES (126)..(126): Selenocysteine
  MOD_RES (143)..(143): Selenocysteine
  MOD_RES (153)..(155): Selenocysteine
  MOD_RES (177)..(177): Selenocysteine
  MOD_RES (232)..(232): Selenocysteine
MGFVKVVKNKAYFKRYQVKFRRRREGKXDYYARKRLVIQDKNKYNXPKYRMIVRVXNRDIICQIAYARIEGDMIVCAAYAHELPKYGVKVGLXNYAAAYCXGLLLARRLLNRFGMDKIYEGQVEVXGDEYNVESIDGQPGAFXCYLDAGLARXXXGNKVFGALKGAVDGGLSIPHSXKRFPGYDSESKEFNAEVHRKHIMGQNVADYMRYLMEEDEDAYKKQFSQYIKNSVXPDMMEEMYKKAHAAIRENPVYEKKPKKEVKKKRWNRPKMSLAQKKDRVAQKKASFLRAQERAAES

SEQ ID NO: 24106 - protein, 130 aa, Homo sapiens
  MOD_RES (6)..(6): Selenocysteine
  MOD_RES (43)..(43): Selenocysteine
  MOD_RES (51)..(51): Selenocysteine
  MOD_RES (76)..(76): Selenocysteine
  MOD_RES (93)..(93): Selenocysteine
  MOD_RES (103)..(105): Selenocysteine
  MOD_RES (127)..(127): Selenocysteine
MIVRVXNRDIICQIAYARIEGDMIVCAAYAHELPKYGVKVGLXNYAAAYCXGLLLARRLLNRFGMDKIYEGQVEVXGDEYNVESIDGQPGAFXCYLDAGLARXXXGNKVFGALKGAVDGGLSIPHSXKRF

SEQ ID NO: 24107 - protein, 105 aa, Homo sapiens
  MOD_RES (11)..(11): Selenocysteine
  MOD_RES (91)..(91): Selenocysteine
  MOD_RES (93)..(93): Selenocysteine
  MOD_RES (104)..(104): Selenocysteine
MAGEKVEKPDXKEKKPEAKKVDAGGKVKKGNLKAKKPKKGKPHCSRNPVLVRGIGRYSRSAMYSRKAMYKRKYSAAKSKVEKKKKEKVLAXVXKPVGGDKNGGXR

SEQ ID NO: 24108 - protein, 118 aa, Homo sapiens
  MOD_RES (11)..(11): Selenocysteine
  MOD_RES (91)..(91): Selenocysteine
  MOD_RES (93)..(93): Selenocysteine
  MOD_RES (104)..(104): Selenocysteine
  MOD_RES (118)..(118): Selenocysteine
MAGEKVEKPDXKEKKPEAKKVDAGGKVKKGNLKAKKPKKGKPHCSRNPVLVRGIGRYSRSAMYSRKAMYKRKYSAAKSKVEKKKKEKVLAXVXKPVGGDKNGGXRVVKLRKMPRYYPX

SEQ ID NO: 24109 - protein, 120 aa, Homo sapiens
  MOD_RES (11)..(11): Selenocysteine
  MOD_RES (91)..(91): Selenocysteine
  MOD_RES (93)..(93): Selenocysteine
  MOD_RES (104)..(104): Selenocysteine
  MOD_RES (118)..(118): Selenocysteine
MAGEKVEKPDXKEKKPEAKKVDAGGKVKKGNLKAKKPKKGKPHCSRNPVLVRGIGRYSRSAMYSRKAMYKRKYSAAKSKVEKKKKEKVLAXVXKPVGGDKNGGXRVVKLRKMPRYYPXED

SEQ ID NO: 24110 - protein, 159 aa, Homo sapiens
  MOD_RES (11)..(11): Selenocysteine
  MOD_RES (91)..(91): Selenocysteine
  MOD_RES (93)..(93): Selenocysteine
  MOD_RES (104)..(104): Selenocysteine
  MOD_RES (118)..(118): Selenocysteine
  MOD_RES (145)..(145): Selenocysteine
  MOD_RES (148)..(148): Selenocysteine
  MOD_RES (154)..(154): Selenocysteine
MAGEKVEKPDXKEKKPEAKKVDAGGKVKKGNLKAKKPKKGKPHCSRNPVLVRGIGRYSRSAMYSRKAMYKRKYSAAKSKVEKKKKEKVLAXVXKPVGGDKNGGXRVVKLRKMPRYYPXEDVPRKLLSHGKKPFSQHVRKLRASIXPGXILIILXGRHRG

SEQ ID NO: 24111 - protein, 160 aa, Homo sapiens
  MOD_RES (11)..(11): Selenocysteine
  MOD_RES (91)..(91): Selenocysteine
  MOD_RES (93)..(93): Selenocysteine
  MOD_RES (104)..(104): Selenocysteine
  MOD_RES (118)..(118): Selenocysteine
  MOD_RES (145)..(145): Selenocysteine
  MOD_RES (148)..(148): Selenocysteine
  MOD_RES (154)..(154): Selenocysteine
MAGEKVEKPDXKEKKPEAKKVDAGGKVKKGNLKAKKPKKGKPHCSRNPVLVRGIGRYSRSAMYSRKAMYKRKYSAAKSKVEKKKKEKVLAXVXKPVGGDKNGGXRVVKLRKMPRYYPXEDVPRKLLSHGKKPFSQHVRKLRASIXPGXILIILXGRHRGK

SEQ ID NO: 24112 - protein, 288 aa, Homo sapiens
  MOD_RES (11)..(11): Selenocysteine
  MOD_RES (91)..(91): Selenocysteine
  MOD_RES (93)..(93): Selenocysteine
  MOD_RES (104)..(104): Selenocysteine
  MOD_RES (118)..(118): Selenocysteine
  MOD_RES (145)..(145): Selenocysteine
  MOD_RES (148)..(148): Selenocysteine
  MOD_RES (154)..(154): Selenocysteine
  MOD_RES (176)..(176): Selenocysteine
  MOD_RES (189)..(189): Selenocysteine
  MOD_RES (197)..(197): Selenocysteine
  MOD_RES (199)..(199): Selenocysteine
  MOD_RES (213)..(213): Selenocysteine
  MOD_RES (235)..(235): Selenocysteine
  MOD_RES (243)..(243): Selenocysteine
  MOD_RES (278)..(278): Selenocysteine
MAGEKVEKPDXKEKKPEAKKVDAGGKVKKGNLKAKKPKKGKPHCSRNPVLVRGIGRYSRSAMYSRKAMYKRKYSAAKSKVEKKKKEKVLAXVXKPVGGDKNGGXRVVKLRKMPRYYPXEDVPRKLLSHGKKPFSQHVRKLRASIXPGXILIILXGRHRGKRVVFLKQLASGLLLVXGPLVLNRVPLRRXHQKFVIAXSXKIDISNVKIPKHLXDAYFKKKKLRKPRHQEGEIFDXEKEKYEIXEQRKIDQKAVDSQILPKIKAIPQLQGYLRSVFALXNGIYPHKLVF

SEQ ID NO: 24113 - protein, 64 aa, Homo sapiens
  MOD_RES (7)..(7): Selenocysteine
  MOD_RES (34)..(34): Selenocysteine
  MOD_RES (37)..(37): Selenocysteine
  MOD_RES (43)..(43): Selenocysteine
MPRYYPXEDVPRKLLSHGKKPFSQHVRKLRASIXPGXILIILXGRHRGKRVVFLKQLASGLLLV

SEQ ID NO: 24114 - protein, 248 aa, Homo sapiens
  MOD_RES (17)..(17): Selenocysteine
  MOD_RES (67)..(67): Selenocysteine
  MOD_RES (121)..(121): Selenocysteine
  MOD_RES (170)..(170): Selenocysteine
  MOD_RES (196)..(196): Selenocysteine
  MOD_RES (224)..(225): Selenocysteine
MEGVEEKKKEVPAVPEXLKKKRRNFAELKIKRLRKKFAQKMLRKARRKLIYEKAKHYHKEYRQMYRXEIRMARMARKAGNFYVPAEPKLAFVIRIRGINGVSPKVRKVLQLLRLRQIFNGXFVKLNKASINMLRIVEPYIAWGYPNLKSVNELIYKRGYGKINKKRIALXDNALIARSLGKYGIICMEDLIHEIYXVGKRFKEANNFLWPFKLSSPRGGMKKKXXHFVEGGDAGNREDQINRLIRRMN

SEQ ID NO: 24115 - protein, 88 aa, Homo sapiens
  MOD_RES (27)..(27): Selenocysteine
  MOD_RES (81)..(81): Selenocysteine
MLRKARRKLIYEKAKHYHKEYRQMYRXEIRMARMARKAGNFYVPAEPKLAFVIRIRGINGVSPKVRKVLQLLRLRQIFNGXFVKLNKA

SEQ ID NO: 24116 - protein, 99 aa, Homo sapiens
  MOD_RES (27)..(27): Selenocysteine
  MOD_RES (81)..(81): Selenocysteine
MLRKARRKLIYEKAKHYHKEYRQMYRXEIRMARMARKAGNFYVPAEPKLAFVIRIRGINGVSPKVRKVLQLLRLRQIFNGXFVKLNKASINMLRIVEPY

SEQ ID NO: 24117 - protein, 208 aa, Homo sapiens
  MOD_RES (27)..(27): Selenocysteine
  MOD_RES (81)..(81): Selenocysteine
  MOD_RES (130)..(130): Selenocysteine
  MOD_RES (156)..(156): Selenocysteine
  MOD_RES (184)..(185): Selenocysteine
MLRKARRKLIYEKAKHYHKEYRQMYRXEIRMARMARKAGNFYVPAEPKLAFVIRIRGINGVSPKVRKVLQLLRLRQIFNGXFVKLNKASINMLRIVEPYIAWGYPNLKSVNELIYKRGYGKINKKRIALXDNALIARSLGKYGIICMEDLIHEIYXVGKRFKEANNFLWPFKLSSPRGGMKKKXXHFVEGGDAGNREDQINRLIRRMN

SEQ ID NO: 24118 - protein, 151 aa, Homo sapiens
  MOD_RES (15)..(15): Selenocysteine
  MOD_RES (27)..(27): Selenocysteine
  MOD_RES (29)..(30): Selenocysteine
  MOD_RES (83)..(83): Selenocysteine
  MOD_RES (85)..(86): Selenocysteine
  MOD_RES (90)..(90): Selenocysteine
  MOD_RES (109)..(109): Selenocysteine
  MOD_RES (148)..(148): Selenocysteine
MAPLYQAAGKGDVPXKRPPVLRAGVNXVXXLVENKKAQLVVIAHDVDPIELVVFLPALCRKMGVPYCIIKGKARLGRLVHRKXCXXVAFXQVNSEDKGALAKLVEAIRXNYNDRYDEIRRHWGGNVLGPKSVARIAKLEKAKAKELAXKLG

SEQ ID NO: 24119 - protein, 191 aa, Homo sapiens
  MOD_RES (79)..(79): Selenocysteine
  MOD_RES (111)..(111): Selenocysteine
  MOD_RES (118)..(118): Selenocysteine
  MOD_RES (120)..(120): Selenocysteine
  MOD_RES (133)..(133): Selenocysteine
  MOD_RES (157)..(157): Selenocysteine
  MOD_RES (169)..(169): Selenocysteine
  MOD_RES (171)..(172): Selenocysteine
MLVRLNVRCSCRGVVLGGCRKLLASLVQPKGKKAKGKKVAPAPAVVKKQEAKKVVNPLFEKRPKNFGIGQDIQPKRDLXRFVKWPRYIRLQRQRAILYKRLKVPPAINQFXQALDRQXAXQLLKLAHKYRPEXKQEKKQRLLARAEKKAAGKGDVPXKRPPVLRAGVNXVXXLVENKKAQLVVIAHDVDPI

SEQ ID NO: 24120 - protein, 266 aa, Homo sapiens
  MOD_RES (52)..(52): Selenocysteine
  MOD_RES (84)..(84): Selenocysteine
  MOD_RES (91)..(91): Selenocysteine
  MOD_RES (93)..(93): Selenocysteine
  MOD_RES (106)..(106): Selenocysteine
  MOD_RES (130)..(130): Selenocysteine
  MOD_RES (142)..(142): Selenocysteine
  MOD_RES (144)..(145): Selenocysteine
  MOD_RES (198)..(198): Selenocysteine
  MOD_RES (200)..(201): Selenocysteine
  MOD_RES (205)..(205): Selenocysteine
  MOD_RES (224)..(224): Selenocysteine
  MOD_RES (263)..(263): Selenocysteine
MPKGKKAKGKKVAPAPAVVKKQEAKKVVNPLFEKRPKNFGIGQDIQPKRDLXRFVKWPRYIRLQRQRAILYKRLKVPPAINQFXQALDRQXAXQLLKLAHKYRPEXKQEKKQRLLARAEKKAAGKGDVPXKRPPVLRAGVNXVXXLVENKKAQLVVIAHDVDPIELVVFLPALCRKMGVPYCIIKGKARLGRLVHRKXCXXVAFXQVNSEDKGALAKLVEAIRXNYNDRYDEIRRHWGGNVLGPKSVARIAKLEKAKAKELAXKLG

SEQ ID NO: 24121 - protein, 167 aa, Homo sapiens
  MOD_RES (73)..(73): Selenocysteine
  MOD_RES (84)..(84): Selenocysteine
  MOD_RES (106)..(106): Selenocysteine
  MOD_RES (111)..(111): Selenocysteine
  MOD_RES (135)..(135): Selenocysteine
  MOD_RES (143)..(143): Selenocysteine
  MOD_RES (146)..(146): Selenocysteine
MGRVIRGQRKGAGSVFRAHVKHRKGAARLRAVDFAERHGYIKGIVKDIIHDPGRGAPLAKVVFRDPYRFKKRXELFIAAEGIHXGQFVYCGKKAQLNIGNVLPVGXMPEGXIVCCLEEKPGDRGKLARASGNYAXVISHNPEXKKXRVKLPSGSKKVISSANRAVVG

SEQ ID NO: 24122 - protein, 205 aa, Homo sapiens
  MOD_RES (73)..(73): Selenocysteine
  MOD_RES (84)..(84): Selenocysteine
  MOD_RES (106)..(106): Selenocysteine
  MOD_RES (111)..(111): Selenocysteine
  MOD_RES (135)..(135): Selenocysteine
  MOD_RES (143)..(143): Selenocysteine
  MOD_RES (146)..(146): Selenocysteine
MGRVIRGQRKGAGSVFRAHVKHRKGAARLRAVDFAERHGYIKGIVKDIIHDPGRGAPLAKVVFRDPYRFKKRXELFIAAEGIHXGQFVYCGKKAQLNIGNVLPVGXMPEGXIVCCLEEKPGDRGKLARASGNYAXVISHNPEXKKXRVKLPSGSKKVISSANRAVVGVVAGGGRIDKPILKAGRAYHKYKAKRNCWPRVRGVAMN

SEQ ID NO: 24123 - protein, 257 aa, Homo sapiens
  MOD_RES (73)..(73): Selenocysteine
  MOD_RES (84)..(84): Selenocysteine
  MOD_RES (106)..(106): Selenocysteine
  MOD_RES (111)..(111): Selenocysteine
  MOD_RES (135)..(135): Selenocysteine
  MOD_RES (143)..(143): Selenocysteine
  MOD_RES (146)..(146): Selenocysteine
  MOD_RES (224)..(224): Selenocysteine
  MOD_RES (243)..(243): Selenocysteine
  MOD_RES (249)..(249): Selenocysteine
  MOD_RES (251)..(251): Selenocysteine
MGRVIRGQRKGAGSVFRAHVKHRKGAARLRAVDFAERHGYIKGIVKDIIHDPGRGAPLAKVVFRDPYRFKKRXELFIAAEGIHXGQFVYCGKKAQLNIGNVLPVGXMPEGXIVCCLEEKPGDRGKLARASGNYAXVISHNPEXKKXRVKLPSGSKKVISSANRAVVGVVAGGGRIDKPILKAGRAYHKYKAKRNCWPRVRGVAMNPVEHPFGGGNHQHIGKPSXIRRDAPAGRKVGLIAARRXGRLRGXKXVQEKEN

SEQ ID NO: 24124 - protein, 235 aa, Homo sapiens
  MOD_RES (73)..(73): Selenocysteine
  MOD_RES (84)..(84): Selenocysteine
  MOD_RES (106)..(106): Selenocysteine
  MOD_RES (111)..(111): Selenocysteine
  MOD_RES (135)..(135): Selenocysteine
  MOD_RES (203)..(203): Selenocysteine
  MOD_RES (222)..(222): Selenocysteine
  MOD_RES (228)..(228): Selenocysteine
  MOD_RES (230)..(230): Selenocysteine
MGRVIRGQRKGAGSVFRAHVKHRKGAARLRAVDFAERHGYIKGIVKDIIHDPGRGAPLAKVVFRDPYRFKKRXELFIAAEGIHXGQFVYCGKKAQLNIGNVLPVGXMPEGXIVCCLEEKPGDRGKLARASGNYAXVISSANRAVVGVVAGGGRIDKPILKAGRAYHKYKAKRNCWPRVRGVAMNPVEHPFGGGNHQHIGKPSXIRRDAPAGRKVGLIAARRXGRLRGXKXVQEKE

SEQ ID NO: 24125 - protein, 148 aa, Homo sapiens
  MOD_RES (115)..(115): Selenocysteine
  MOD_RES (134)..(134): Selenocysteine
  MOD_RES (140)..(140): Selenocysteine
  MOD_RES (142)..(142): Selenocysteine
MGRVIRGQRKGAGSVFRAHVKHRKGAARLRAVDFAERHGYIKGIVKKVISSANRAVVGVVAGGGRIDKPILKAGRAYHKYKAKRNCWPRVRGVAMNPVEHPFGGGNHQHIGKPSXIRRDAPAGRKVGLIAARRXGRLRGXKXVQEKEN

SEQ ID NO: 24126 - protein, 110 aa, Homo sapiens
  MOD_RES (1)..(1): Any amino acid
  MOD_RES (15)..(15): Selenocysteine
  MOD_RES (17)..(17): Selenocysteine
  MOD_RES (46)..(46): Selenocysteine
  MOD_RES (60)..(60): Selenocysteine
  MOD_RES (85)..(85): Selenocysteine
  MOD_RES (95)..(95): Selenocysteine
  MOD_RES (102)..(103): Selenocysteine
XALRACAPWISLSGXAXSRASSRWSSGIRIGLRSGRSCSLPPRAFXRASLCIAARRPSSXLAMCSLWAPCLRVQSCAAWRRSLEXVASWPGHQGXMPPLSPXXLRPRRPV

SEQ ID NO: 24127 - protein, 166 aa, Homo sapiens
  MOD_RES (3)..(3): Selenocysteine
  MOD_RES (9)..(9): Selenocysteine
  MOD_RES (19)..(19): Selenocysteine
  MOD_RES (24)..(24): Selenocysteine
  MOD_RES (33)..(33): Selenocysteine
  MOD_RES (69)..(69): Selenocysteine
  MOD_RES (72)..(72): Selenocysteine
  MOD_RES (85)..(85): Selenocysteine
  MOD_RES (165)..(166): Selenocysteine
MKXILSNQXVDIPENVDIXLKGRXVIVKGPRGXLRRDFNHINVELSLLGKKKKRLRVDKWWGNRKELAXVRXICSHVQNMIKGVXLGFRYKMRSVYAHFPINVVIQENGSLVEIRNFLGEKYIRRVRMRPGVACSVSQAQKDELILEGNDIELVSNSAALIQQAXX

SEQ ID NO: 24128 - protein, 192 aa, Homo sapiens
  MOD_RES (3)..(3): Selenocysteine
  MOD_RES (9)..(9): Selenocysteine
  MOD_RES (19)..(19): Selenocysteine
  MOD_RES (24)..(24): Selenocysteine
  MOD_RES (33)..(33): Selenocysteine
  MOD_RES (69)..(69): Selenocysteine
  MOD_RES (72)..(72): Selenocysteine
  MOD_RES (85)..(85): Selenocysteine
  MOD_RES (165)..(166): Selenocysteine
  MOD_RES (186)..(186): Selenocysteine
MKXILSNQXVDIPENVDIXLKGRXVIVKGPRGXLRRDFNHINVELSLLGKKKKRLRVDKWWGNRKELAXVRXICSHVQNMIKGVXLGFRYKMRSVYAHFPINVVIQENGSLVEIRNFLGEKYIRRVRMRPGVACSVSQAQKDELILEGNDIELVSNSAALIQQAXXVKNKDIRKFLDGIYVSEKGXVQQADE

SEQ ID NO: 24129 - protein, 182 aa, Homo sapiens
  MOD_RES (3)..(3): Selenocysteine
  MOD_RES (9)..(9): Selenocysteine
  MOD_RES (19)..(19): Selenocysteine
  MOD_RES (24)..(24): Selenocysteine
  MOD_RES (33)..(33): Selenocysteine
  MOD_RES (69)..(69): Selenocysteine
  MOD_RES (72)..(72): Selenocysteine
  MOD_RES (85)..(85): Selenocysteine
  MOD_RES (160)..(161): Selenocysteine
  MOD_RES (181)..(181): Selenocysteine
MKXILSNQXVDIPENVDIXLKGRXVIVKGPRGXLRRDFNHINVELSLLGKKKKRLRVDKWWGNRKELAXVRXICSHVQNMIKGVXLGFRYKMRSVYAHFPINVVIQENGSLVEIRNFLGEKYIRRVRMRPVSQAQKDELILEGNDIELVSNSAALIQQAXXVKNKDIRKFLDGIYVSEKGXV

SEQ ID NO: 24130 - protein, 91 aa, Homo sapiens
  MOD_RES (1)..(1): Any amino acid
  MOD_RES (16)..(16): Selenocysteine
  MOD_RES (19)..(19): Selenocysteine
  MOD_RES (64)..(65): Selenocysteine
  MOD_RES (85)..(85): Selenocysteine
XLRVDKWWGNRKELAXVRXICSHVQNMIKGVACSVSQAQKDELILEGNDIELVSNSAALIQQAXXVKNKDIRKFLDGIYVSEKGXVQQADE

SEQ ID NO: 24131 - protein, 189 aa, Homo sapiens
  MOD_RES (1)..(1): Any amino acid
  MOD_RES (2)..(2): Selenocysteine
  MOD_RES (16)..(16): Selenocysteine
  MOD_RES (21)..(21): Selenocysteine
  MOD_RES (30)..(30): Selenocysteine
  MOD_RES (66)..(66): Selenocysteine
  MOD_RES (69)..(69): Selenocysteine
  MOD_RES (82)..(82): Selenocysteine
  MOD_RES (162)..(163): Selenocysteine
  MOD_RES (183)..(183): Selenocysteine
XXDVLSLLRLLRVDIXLKGRXVIVKGPRGXLRRDFNHINVELSLLGKKKKRLRVDKWWGNRKELAXVRXICSHVQNMIKGVXLGFRYKMRSVYAHFPINVVIQENGSLVEIRNFLGEKYIRRVRMRPGVACSVSQAQKDELILEGNDIELVSNSAALIQQAXXVKNKDIRKFLDGIYVSEKGXVQQADE

SEQ ID NO: 24132 - protein, 111 aa, Homo sapiens
  MOD_RES (45)..(45): Selenocysteine
  MOD_RES (77)..(77): Selenocysteine
  MOD_RES (82)..(82): Selenocysteine
  MOD_RES (108)..(108): Selenocysteine
MAFEQLLDDYPKCFIVGADNVGSKQMQQIRMSLRGKAVVLMGKNXMMRKAIRGHLENNPALEKLLPHIRGNVGFVFXKEDLXEIRDMLLANKVPAAARAGAIAPCEVXVPA

SEQ ID NO: 24133 - protein, 153 aa, Homo sapiens
  MOD_RES (45)..(45): Selenocysteine
  MOD_RES (77)..(77): Selenocysteine
  MOD_RES (82)..(82): Selenocysteine
  MOD_RES (108)..(108): Selenocysteine
  MOD_RES (114)..(114): Selenocysteine
  MOD_RES (121)..(121): Selenocysteine
  MOD_RES (130)..(131): Selenocysteine
  MOD_RES (137)..(137): Selenocysteine
  MOD_RES (149)..(149): Selenocysteine
MAFEQLLDDYPKCFIVGADNVGSKQMQQIRMSLRGKAVVLMGKNXMMRKAIRGHLENNPALEKLLPHIRGNVGFVFXKEDLXEIRDMLLANKVPAAARAGAIAPCEVXVPAQNXGLGPEKXSFFQALGIXXKISRGXIEILSDVQLIKXGDKV

SEQ ID NO: 24134 - protein, 107 aa, Homo sapiens
  MOD_RES (23)..(23): Selenocysteine
  MOD_RES (45)..(45): Selenocysteine
  MOD_RES (48)..(48): Selenocysteine
  MOD_RES (75)..(76): Selenocysteine
MKSSLPQGVRNVASVCLQIGYPXVASVPHSIINGYKRVLALSVEXDYXFPLAEKVKAFLADPSAFVAAAPVAAAXXAAPAAAAAPAKVEAKEESEESDEDMGFGLFD

SEQ ID NO: 24135 - protein, 121 aa, Homo sapiens
  MOD_RES (8)..(8): Selenocysteine
  MOD_RES (59)..(59): Selenocysteine
  MOD_RES (91)..(91): Selenocysteine
  MOD_RES (96)..(96): Selenocysteine
MPREDRAXWKSNYFLKIIQLLDDYPKCFIVGADNVGSKQMQQIRMSLRGKAVVLMGKNXMMRKAIRGHLENNPALEKLLPHIRGNVGFVFXKEDLXEIRDMLLANKLLPVLVPLPHVKSLC

SEQ ID NO: 24136 - protein, 246 aa, Homo sapiens
  MOD_RES (8)..(8): Selenocysteine
  MOD_RES (59)..(59): Selenocysteine
  MOD_RES (91)..(91): Selenocysteine
  MOD_RES (96)..(96): Selenocysteine
  MOD_RES (114)..(114): Selenocysteine
  MOD_RES (124)..(124): Selenocysteine
  MOD_RES (158)..(158): Selenocysteine
  MOD_RES (161)..(161): Selenocysteine
  MOD_RES (184)..(184): Selenocysteine
  MOD_RES (206)..(206): Selenocysteine
  MOD_RES (209)..(209): Selenocysteine
  MOD_RES (236)..(237): Selenocysteine
MPREDRAXWKSNYFLKIIQLLDDYPKCFIVGADNVGSKQMQQIRMSLRGKAVVLMGKNXMMRKAIRGHLENNPALEKLLPHIRGNVGFVFXKEDLXEIRDMLLANKSDVQLIKXGDKVGASEAXLLNMLNISPFSFGLVIQQVFDNGSIYNPEVLDIXEEXLHSRFLEGVRNVASVCLQIGYPXVASVPHSIINGYKRVLALSVEXDYXFPLAEKVKAFLADPSAFVAAAPVAAAXXAAPAAAAAP

SEQ ID NO: 24137 - protein, 142 aa, Homo sapiens
  MOD_RES (8)..(8): Selenocysteine
  MOD_RES (59)..(59): Selenocysteine
  MOD_RES (91)..(91): Selenocysteine
  MOD_RES (96)..(96): Selenocysteine
  MOD_RES (122)..(122): Selenocysteine
  MOD_RES (128)..(128): Selenocysteine
  MOD_RES (135)..(135): Selenocysteine
MPREDRAXWKSNYFLKIIQLLDDYPKCFIVGADNVGSKQMQQIRMSLRGKAVVLMGKNXMMRKAIRGHLENNPALEKLLPHIRGNVGFVFXKEDLXEIRDMLLANKVPAAARAGAIAPCEVXVPAQNXGLGPEKXSFFQALE

SEQ ID NO: 24138 - protein, 255 aa, Homo sapiens
  MOD_RES (8)..(8): Selenocysteine
  MOD_RES (59)..(59): Selenocysteine
  MOD_RES (91)..(91): Selenocysteine
  MOD_RES (96)..(96): Selenocysteine
  MOD_RES (122)..(122): Selenocysteine
  MOD_RES (128)..(128): Selenocysteine
  MOD_RES (135)..(135): Selenocysteine
  MOD_RES (144)..(145): Selenocysteine
  MOD_RES (151)..(151): Selenocysteine
  MOD_RES (171)..(171): Selenocysteine
  MOD_RES (193)..(193): Selenocysteine
  MOD_RES (196)..(196): Selenocysteine
  MOD_RES (223)..(224): Selenocysteine
MPREDRAXWKSNYFLKIIQLLDDYPKCFIVGADNVGSKQMQQIRMSLRGKAVVLMGKNXMMRKAIRGHLENNPALEKLLPHIRGNVGFVFXKEDLXEIRDMLLANKVPAAARAGAIAPCEVXVPAQNXGLGPEKXSFFQALGIXXKISRGXIEILGVRNVASVCLQIGYPXVASVPHSIINGYKRVLALSVEXDYXFPLAEKVKAFLADPSAFVAAAPVAAAXXAAPAAAAAPAKVEAKEESEESDEDMGFGLFD

SEQ ID NO: 24139 - protein, 247 aa, Homo sapiens
  MOD_RES (8)..(8): Selenocysteine
  MOD_RES (59)..(59): Selenocysteine
  MOD_RES (91)..(91): Selenocysteine
  MOD_RES (96)..(96): Selenocysteine
  MOD_RES (122)..(122): Selenocysteine
  MOD_RES (128)..(128): Selenocysteine
  MOD_RES (135)..(135): Selenocysteine
  MOD_RES (144)..(145): Selenocysteine
  MOD_RES (151)..(151): Selenocysteine
  MOD_RES (163)..(163): Selenocysteine
  MOD_RES (173)..(173): Selenocysteine
  MOD_RES (207)..(207): Selenocysteine
  MOD_RES (210)..(210): Selenocysteine
  MOD_RES (233)..(233): Selenocysteine
MPREDRAXWKSNYFLKIIQLLDDYPKCFIVGADNVGSKQMQQIRMSLRGKAVVLMGKNXMMRKAIRGHLENNPALEKLLPHIRGNVGFVFXKEDLXEIRDMLLANKVPAAARAGAIAPCEVXVPAQNXGLGPEKXSFFQALGIXXKISRGXIEILSDVQLIKXGDKVGASEAXLLNMLNISPFSFGLVIQQVFDNGSIYNPEVLDIXEEXLHSRFLEGVRNVASVCLQIGYPXVASVPHSIINGYKR

SEQ ID NO: 24140 - protein, 317 aa, Homo sapiens
  MOD_RES (8)..(8): Selenocysteine
  MOD_RES (59)..(59): Selenocysteine
  MOD_RES (91)..(91): Selenocysteine
  MOD_RES (96)..(96): Selenocysteine
  MOD_RES (122)..(122): Selenocysteine
  MOD_RES (128)..(128): Selenocysteine
  MOD_RES (135)..(135): Selenocysteine
  MOD_RES (144)..(145): Selenocysteine
  MOD_RES (151)..(151): Selenocysteine
  MOD_RES (163)..(163): Selenocysteine
  MOD_RES (173)..(173): Selenocysteine
  MOD_RES (207)..(207): Selenocysteine
  MOD_RES (210)..(210): Selenocysteine
  MOD_RES (233)..(233): Selenocysteine
  MOD_RES (255)..(255): Selenocysteine
  MOD_RES (258)..(258): Selenocysteine
  MOD_RES (285)..(286): Selenocysteine
MPREDRAXWKSNYFLKIIQLLDDYPKCFIVGADNVGSKQMQQIRMSLRGKAVVLMGKNXMMRKAIRGHLENNPALEKLLPHIRGNVGFVFXKEDLXEIRDMLLANKVPAAARAGAIAPCEVXVPAQNXGLGPEKXSFFQALGIXXKISRGXIEILSDVQLIKXGDKVGASEAXLLNMLNISPFSFGLVIQQVFDNGSIYNPEVLDIXEEXLHSRFLEGVRNVASVCLQIGYPXVASVPHSIINGYKRVLALSVEXDYXFPLAEKVKAFLADPSAFVAAAPVAAAXXAAPAAAAAPAKVEAKEESEESDEDMGFGLFD

SEQ ID NO: 24141 - protein, 281 aa, Homo sapiens
  MOD_RES (8)..(8): Selenocysteine
  MOD_RES (59)..(59): Selenocysteine
  MOD_RES (91)..(91): Selenocysteine
  MOD_RES (96)..(96): Selenocysteine
  MOD_RES (122)..(122): Selenocysteine
  MOD_RES (128)..(128): Selenocysteine
  MOD_RES (135)..(135): Selenocysteine
  MOD_RES (144)..(145): Selenocysteine
  MOD_RES (151)..(151): Selenocysteine
  MOD_RES (171)..(171): Selenocysteine
  MOD_RES (174)..(174): Selenocysteine
  MOD_RES (197)..(197): Selenocysteine
  MOD_RES (219)..(219): Selenocysteine
  MOD_RES (222)..(222): Selenocysteine
  MOD_RES (249)..(250): Selenocysteine
MPREDRAXWKSNYFLKIIQLLDDYPKCFIVGADNVGSKQMQQIRMSLRGKAVVLMGKNXMMRKAIRGHLENNPALEKLLPHIRGNVGFVFXKEDLXEIRDMLLANKVPAAARAGAIAPCEVXVPAQNXGLGPEKXSFFQALGIXXKISRGXIEILVFDNGSIYNPEVLDIXEEXLHSRFLEGVRNVASVCLQIGYPXVASVPHSIINGYKRVLALSVEXDYXFPLAEKVKAFLADPSAFVAAAPVAAAXXAAPAAAAAPAKVEAKEESEESDEDMGFGLFD

SEQ ID NO: 24142 - protein, 166 aa, Homo sapiens
  MOD_RES (8)..(8): Selenocysteine
  MOD_RES (59)..(59): Selenocysteine
  MOD_RES (91)..(91): Selenocysteine
  MOD_RES (96)..(96): Selenocysteine
  MOD_RES (122)..(122): Selenocysteine
  MOD_RES (128)..(128): Selenocysteine
  MOD_RES (135)..(135): Selenocysteine
  MOD_RES (144)..(145): Selenocysteine
  MOD_RES (151)..(151): Selenocysteine
  MOD_RES (158)..(158): Selenocysteine
MPREDRAXWKSNYFLKIIQLLDDYPKCFIVGADNVGSKQMQQIRMSLRGKAVVLMGKNXMMRKAIRGHLENNPALEKLLPHIRGNVGFVFXKEDLXEIRDMLLANKVPAAARAGAIAPCEVXVPAQNXGLGPEKXSFFQALGIXXKISRGXIEILVFXAPLLSGSE

SEQ ID NO: 24143 - protein, 156 aa, Homo sapiens
  MOD_RES (8)..(8): Selenocysteine
  MOD_RES (59)..(59): Selenocysteine
  MOD_RES (91)..(91): Selenocysteine
  MOD_RES (96)..(96): Selenocysteine
  MOD_RES (122)..(122): Selenocysteine
  MOD_RES (128)..(128): Selenocysteine
  MOD_RES (135)..(135): Selenocysteine
  MOD_RES (147)..(147): Selenocysteine
MPREDRAXWKSNYFLKIIQLLDDYPKCFIVGADNVGSKQMQQIRMSLRGKAVVLMGKNXMMRKAIRGHLENNPALEKLLPHIRGNVGFVFXKEDLXEIRDMLLANKVPAAARAGAIAPCEVXVPAQNXGLGPEKXSFFQALGVYCPXIIWFRVMCS

SEQ ID NO: 24144 - protein, 244 aa, Homo sapiens
  MOD_RES (8)..(8): Selenocysteine
  MOD_RES (39)..(39): Selenocysteine
  MOD_RES (71)..(71): Selenocysteine
  MOD_RES (76)..(76): Selenocysteine
  MOD_RES (102)..(102): Selenocysteine
  MOD_RES (108)..(108): Selenocysteine
  MOD_RES (115)..(115): Selenocysteine
  MOD_RES (124)..(125): Selenocysteine
  MOD_RES (131)..(131): Selenocysteine
  MOD_RES (143)..(143): Selenocysteine
  MOD_RES (153)..(153): Selenocysteine
  MOD_RES (187)..(187): Selenocysteine
  MOD_RES (190)..(190): Selenocysteine
  MOD_RES (213)..(213): Selenocysteine
  MOD_RES (235)..(235): Selenocysteine
  MOD_RES (238)..(238): Selenocysteine
MPREDRAXWKSNYFLKIIQMQQIRMSLRGKAVVLMGKNXMMRKAIRGHLENNPALEKLLPHIRGNVGFVFXKEDLXEIRDMLLANKVPAAARAGAIAPCEVXVPAQNXGLGPEKXSFFQALGIXXKISRGXIEILSDVQLIKXGDKVGASEAXLLNMLNISPFSFGLVIQQVFDNGSIYNPEVLDIXEEXLHSRFLEGVRNVASVCLQIGYPXVASVPHSIINGYKRVLALSVEXDYXFPLAEK

SEQ ID NO: 24145 - protein, 57 aa, Homo sapiens
  MOD_RES (8)..(8): Selenocysteine
  MOD_RES (37)..(37): Selenocysteine
MPREDRAXWKSNYFLKIIVSAGNYWMIIRNVSLWEQXMWAPSRCSRSACPFAGRLWC

SEQ ID NO: 24146 - protein, 89 aa, Homo sapiens
  MOD_RES (22)..(22): Selenocysteine
  MOD_RES (24)..(24): Selenocysteine
  MOD_RES (59)..(59): Selenocysteine
MASVSELACIYSALILHDDEVXVXALANVNIGSLICNVGAGGPAPAAGAAPAGGPAPSXAAAPAEEKKVEAKKEESEESDDDMGFGLFD

SEQ ID NO: 24147 - protein, 114 aa, Homo sapiens
  MOD_RES (22)..(22): Selenocysteine
  MOD_RES (24)..(24): Selenocysteine
  MOD_RES (84)..(84): Selenocysteine
MASVSELACIYSALILHDDEVXVXEDKINALIKAAGVNVEPFWPGLFAKALANVNIGSLICNVGAGGPAPAAGAAPAGGPAPSXAAAPAEEKKVEAKKEESEESDDDMGFGLFD

SEQ ID NO: 24148 - protein, 54 aa, Homo sapiens
  MOD_RES (22)..(22): Selenocysteine
  MOD_RES (24)..(24): Selenocysteine
  MOD_RES (43)..(43): Selenocysteine
  MOD_RES (50)..(50): Selenocysteine
MASVSELACIYSALILHDDEVXVXLRRRKWKQRKKNPRSLMMXWALVFLXKPLL

SEQ ID NO: 24149 - protein, 115 aa, Homo sapiens
MRYVASYLLAALGGNSSPSAKDIKKILDSVGIEADDDRLNKVISELNGKNIEDVIAQGIGKLASVPAGGAVAVSAAPGSAAPAAGSAPAAAEEKKDEKKEESEESDDDMGFGLFD

SEQ ID NO: 24150 - protein, 92 aa, Homo sapiens
  MOD_RES (1)..(1): Any amino acid
XGGNSSPSAKDIKKILDSVISELNGKNIEDVIAQGIGKLASVPAGGAVAVSAAPGSAAPAAGSAPAAAEEKKDEKKEESEESDDDMGFGLFD

SEQ ID NO: 24151 - protein, 121 aa, Homo sapiens
  MOD_RES (16)..(16): Selenocysteine
  MOD_RES (39)..(39): Selenocysteine
  MOD_RES (50)..(50): Selenocysteine
  MOD_RES (63)..(63): Selenocysteine
  MOD_RES (67)..(67): Selenocysteine
  MOD_RES (103)..(103): Selenocysteine
  MOD_RES (117)..(117): Selenocysteine
MEAPAAGLFLLLLLGXWAPAPGSASSEAPPLINEDVKRXVDLSSHLAKVXAEVVLAHLGGGSXSRAXSFLLALEPELEARLAHLGVQVKGEDEEENNLEVREXKIKGKRVCCPGSIXVVPC

SEQ ID NO: 24152 - protein, 607 aa, Homo sapiens
  MOD_RES (16)..(16): Selenocysteine
  MOD_RES (39)..(39): Selenocysteine
  MOD_RES (50)..(50): Selenocysteine
  MOD_RES (63)..(63): Selenocysteine
  MOD_RES (67)..(67): Selenocysteine
  MOD_RES (103)..(103): Selenocysteine
  MOD_RES (114)..(114): Selenocysteine
  MOD_RES (133)..(133): Selenocysteine
  MOD_RES (136)..(136): Selenocysteine
  MOD_RES (144)..(144): Selenocysteine
  MOD_RES (147)..(147): Selenocysteine
  MOD_RES (168)..(168): Selenocysteine
  MOD_RES (170)..(170): Selenocysteine
  MOD_RES (172)..(172): Selenocysteine
  MOD_RES (186)..(186): Selenocysteine
  MOD_RES (192)..(192): Selenocysteine
  MOD_RES (213)..(213): Selenocysteine
  MOD_RES (226)..(226): Selenocysteine
  MOD_RES (228)..(228): Selenocysteine
  MOD_RES (231)..(231): Selenocysteine
  MOD_RES (253)..(253): Selenocysteine
  MOD_RES (282)..(282): Selenocysteine
  MOD_RES (302)..(302): Selenocysteine
  MOD_RES (328)..(328): Selenocysteine
  MOD_RES (369)..(369): Selenocysteine
  MOD_RES (399)..(399): Selenocysteine
  MOD_RES (403)..(403): Selenocysteine
  MOD_RES (429)..(429): Selenocysteine
  MOD_RES (452)..(452): Selenocysteine
  MOD_RES (464)..(464): Selenocysteine
  MOD_RES (479)..(479): Selenocysteine
  MOD_RES (484)..(484): Selenocysteine
  MOD_RES (499)..(499): Selenocysteine
  MOD_RES (511)..(511): Selenocysteine
  MOD_RES (521)..(521): Selenocysteine
  MOD_RES (527)..(527): Selenocysteine
  MOD_RES (539)..(539): Selenocysteine
  MOD_RES (581)..(581): Selenocysteine
  MOD_RES (598)..(598): Selenocysteine
MEAPAAGLFLLLLLGXWAPAPGSASSEAPPLINEDVKRXVDLSSHLAKVXAEVVLAHLGGGSXSRAXSFLLALEPELEARLAHLGVQVKGEDEEENNLEVREXKIKGKSGRFFXVKLPVALDPGAKISVIVEXVYXHVLHPYPXQIXQSEKQFVVFEGNHYFYSPYPXKXQXMRVKLASRNVESYXKLGNPXRSEDLLDYGPFRDVPAYSQDXFKVHYENNSPFLXIXSMXRVIEVSHWGNIAVEENVDLKHXGAVLKGPFSRYDYQRQPDSGISSIRSFKXILPAAAQDVYYRDEIGNVSXSHLLILDDSVEMEIRPRFPLFGGWKXHYIVGYNLPSYEYLYNLGDQYALKMRFVDHVFDEQVIDSLXVKIILPEGAKNIEIDSPYEISRAPDELHYXYLDXFGRPVIVAYKKNLVEQHIQDIVVHYXFNKVLMLQEPLLVVAAFYILFFXVIIYVRLDFSIXKDPAAEARMKVACIXEQVLXLVNKRIGLYRHFDEXVNRYKQSRDISXLNSGKKSLEXEHKALXSEIALLQSRLKXEGSDLCDRVSEMQKLDAQVKELVLKSAVEAERLVAGKLKKDXYIENEKLISGKRQELVXKIDHILDAL

SEQ ID NO: 24153 - protein, 435 aa, Homo sapiens
  MOD_RES (14)..(14): Selenocysteine
  MOD_RES (20)..(20): Selenocysteine
  MOD_RES (41)..(41): Selenocysteine
  MOD_RES (54)..(54): Selenocysteine
  MOD_RES (56)..(56): Selenocysteine
  MOD_RES (59)..(59): Selenocysteine
  MOD_RES (81)..(81): Selenocysteine
  MOD_RES (110)..(110): Selenocysteine
  MOD_RES (130)..(130): Selenocysteine
  MOD_RES (156)..(156): Selenocysteine
  MOD_RES (197)..(197): Selenocysteine
  MOD_RES (227)..(227): Selenocysteine
  MOD_RES (231)..(231): Selenocysteine
  MOD_RES (257)..(257): Selenocysteine
  MOD_RES (280)..(280): Selenocysteine
  MOD_RES (292)..(292): Selenocysteine
  MOD_RES (307)..(307): Selenocysteine
  MOD_RES (312)..(312): Selenocysteine
  MOD_RES (327)..(327): Selenocysteine
  MOD_RES (339)..(339): Selenocysteine
  MOD_RES (349)..(349): Selenocysteine
  MOD_RES (355)..(355): Selenocysteine
  MOD_RES (367)..(367): Selenocysteine
  MOD_RES (409)..(409): Selenocysteine
  MOD_RES (426)..(426): Selenocysteine
MRVKLASRNVESYXKLGNPXRSEDLLDYGPFRDVPAYSQDXFKVHYENNSPFLXIXSMXRVIEVSHWGNIAVEENVDLKHXGAVLKGPFSRYDYQRQPDSGISSIRSFKXILPAAAQDVYYRDEIGNVSXSHLLILDDSVEMEIRPRFPLFGGWKXHYIVGYNLPSYEYLYNLGDQYALKMRFVDHVFDEQVIDSLXVKIILPEGAKNIEIDSPYEISRAPDELHYXYLDXFGRPVIVAYKKNLVEQHIQDIVVHYXFNKVLMLQEPLLVVAAFYILFFXVIIYVRLDFSIXKDPAAEARMKVACIXEQVLXLVNKRIGLYRHFDEXVNRYKQSRDISXLNSGKKSLEXEHKALXSEIALLQSRLKXEGSDLCDRVSEMQKLDAQVKELVLKSAVEAERLVAGKLKKDXYIENEKLISGKRQELVXKIDHILDAL

SEQ ID NO: 24154 - protein, 138 aa, Homo sapiens
  MOD_RES (4)..(4): Selenocysteine
  MOD_RES (17)..(17): Selenocysteine
  MOD_RES (19)..(19): Selenocysteine
  MOD_RES (28)..(28): Selenocysteine
  MOD_RES (52)..(52): Selenocysteine
  MOD_RES (60)..(60): Selenocysteine
  MOD_RES (78)..(78): Selenocysteine
  MOD_RES (83)..(83): Selenocysteine
  MOD_RES (102)..(102): Selenocysteine
  MOD_RES (109)..(109): Selenocysteine
  MOD_RES (120)..(120): Selenocysteine
  MOD_RES (136)..(136): Selenocysteine
ELDXSERKIEFDSASGXYXLYLIIGDAXLKNPILWNVADVVIKFPEEEAPSXVLSQNLFXPKQEIQWIRIGANVSNFXFAPSXIIFHLGHAAMLGLMYVYWXQLNMFQXLKYLAILGSVXFLAGNRMLAQQAVKRXAH

SEQ ID NO: 24155 - protein, 615 aa, Homo sapiens
  MOD_RES (8)..(8): Selenocysteine
  MOD_RES (15)..(15): Selenocysteine
  MOD_RES (20)..(20): Selenocysteine
  MOD_RES (24)..(24): Selenocysteine
  MOD_RES (26)..(26): Selenocysteine
  MOD_RES (30)..(30): Selenocysteine
  MOD_RES (46)..(46): Selenocysteine
  MOD_RES (76)..(76): Selenocysteine
  MOD_RES (91)..(91): Selenocysteine
  MOD_RES (117)..(117): Selenocysteine
  MOD_RES (125)..(125): Selenocysteine
  MOD_RES (129)..(129): Selenocysteine
  MOD_RES (135)..(135): Selenocysteine
  MOD_RES (175)..(176): Selenocysteine
  MOD_RES (183)..(183): Selenocysteine
  MOD_RES (192)..(192): Selenocysteine
  MOD_RES (250)..(250): Selenocysteine
  MOD_RES (261)..(261): Selenocysteine
  MOD_RES (269)..(269): Selenocysteine
  MOD_RES (272)..(272): Selenocysteine
  MOD_RES (286)..(286): Selenocysteine
  MOD_RES (291)..(291): Selenocysteine
  MOD_RES (294)..(294): Selenocysteine
  MOD_RES (330)..(330): Selenocysteine
  MOD_RES (339)..(339): Selenocysteine
  MOD_RES (344)..(344): Selenocysteine
  MOD_RES (350)..(350): Selenocysteine
  MOD_RES (361)..(362): Selenocysteine
  MOD_RES (365)..(365): Selenocysteine
  MOD_RES (373)..(373): Selenocysteine
  MOD_RES (393)..(393): Selenocysteine
  MOD_RES (398)..(398): Selenocysteine
  MOD_RES (402)..(402): Selenocysteine
  MOD_RES (411)..(411): Selenocysteine
  MOD_RES (433)..(433): Selenocysteine
  MOD_RES (446)..(446): Selenocysteine
  MOD_RES (448)..(448): Selenocysteine
  MOD_RES (457)..(457): Selenocysteine
  MOD_RES (481)..(481): Selenocysteine
  MOD_RES (489)..(489): Selenocysteine
  MOD_RES (507)..(507): Selenocysteine
  MOD_RES (512)..(512): Selenocysteine
  MOD_RES (514)..(514): Selenocysteine
  MOD_RES (539)..(539): Selenocysteine
  MOD_RES (544)..(544): Selenocysteine
  MOD_RES (563)..(563): Selenocysteine
  MOD_RES (570)..(570): Selenocysteine
  MOD_RES (581)..(581): Selenocysteine
  MOD_RES (610)..(610): Selenocysteine
  MOD_RES (613)..(613): Selenocysteine
MAPPGSSXVFLLALXIIASXWALXPXHYLXKHDVERLKASLDRPFXNLESAFYSIVGLSSLGAQVPDAKISISNEXKDLLLAAVSEDSSVXQIYHAVAALSGFGLPLASQEALSALXARLSKEEXVLAXVQALQXASHLSQQADLRSIVEEIEDLVARLDELGGVYLQFEEGLEXXALFVAAXYKLMDHVGXEPSIKEDQVIQLMNAIFSKKNFESLSEAFSVASAAAVLSHNRYHVPVVVVPEGSASDXHEQAILRLQVXNVLSQPLXQAXVKLEHAKSVASRAXVLQKXSFXPVGDVFELNFMNVKFSSGYYDFLVEVEGDNRYIANXVELRVKISXEVGIXNVDLSXVDKDQSIAPKXXRVXYPAKAKGXFIADSHQNFALFFQLVDVNXGAELXPHQXFVRLHNQKXGQEVVFVAEPDNKNVYKFELDXSERKIEFDSASGXYXLYLIIGDAXLKNPILWNVADVVIKFPEEEAPSXVLSQNLFXPKQEIQHLFREPEKRPPXVVSNXFXALILSPLLLLFALWIRIGANVSNFXFAPSXIIFHLGHAAMLGLMYVYWXQLNMFQXLKYLAILGSVXFLAGNRMLAQQAVKRIAAEQSSRLAKYRXLRXAH

SEQ ID NO: 24156 - protein, 345 aa, Homo sapiens
  MOD_RES (8)..(8): Selenocysteine
  MOD_RES (15)..(15): Selenocysteine
  MOD_RES (20)..(20): Selenocysteine
  MOD_RES (24)..(24): Selenocysteine
  MOD_RES (26)..(26): Selenocysteine
  MOD_RES (30)..(30): Selenocysteine
  MOD_RES (46)..(46): Selenocysteine
  MOD_RES (73)..(73): Selenocysteine
  MOD_RES (108)..(108): Selenocysteine
  MOD_RES (123)..(123): Selenocysteine
  MOD_RES (149)..(149): Selenocysteine
  MOD_RES (157)..(157): Selenocysteine
  MOD_RES (165)..(165): Selenocysteine
  MOD_RES (177)..(177): Selenocysteine
  MOD_RES (183)..(183): Selenocysteine
  MOD_RES (223)..(224): Selenocysteine
  MOD_RES (231)..(231): Selenocysteine
  MOD_RES (240)..(240): Selenocysteine
  MOD_RES (298)..(298): Selenocysteine
  MOD_RES (309)..(309): Selenocysteine
  MOD_RES (317)..(317): Selenocysteine
  MOD_RES (320)..(320): Selenocysteine
  MOD_RES (334)..(334): Selenocysteine
  MOD_RES (339)..(339): Selenocysteine
  MOD_RES (342)..(342): Selenocysteine
MAPPGSSXVFLLALXIIASXWALXPXHYLXKHDVERLKASLDRPFXNLESAFYSIVGLSSLGAQVPDAKKACXYIRSNLDPSNVDSLFYAAQASQALSGCEISISNEXKDLLLAAVSEDSSVXQIYHAVAALSGFGLPLASQEALSALXARLSKEEXVLARVWSXVLESRSLFSKRXVQALQXASHLSQQADLRSIVEEIEDLVARLDELGGVYLQFEEGLEXXALFVAAXYKLMDHVGXEPSIKEDQVIQLMNAIFSKKNFESLSEAFSVASAAAVLSHNRYHVPVVVVPEGSASDXHEQAILRLQVXNVLSQPLXQAXVKLEHAKSVASRAXVLQKXSFXPVG

SEQ ID NO: 24157 - protein, 631 aa, Homo sapiens
  MOD_RES (8)..(8): Selenocysteine
  MOD_RES (15)..(15): Selenocysteine
  MOD_RES (20)..(20): Selenocysteine
  MOD_RES (24)..(24): Selenocysteine
  MOD_RES (26)..(26): Selenocysteine
  MOD_RES (30)..(30): Selenocysteine
  MOD_RES (46)..(46): Selenocysteine
  MOD_RES (73)..(73): Selenocysteine
  MOD_RES (108)..(108): Selenocysteine
  MOD_RES (123)..(123): Selenocysteine
  MOD_RES (149)..(149): Selenocysteine
  MOD_RES (157)..(157): Selenocysteine
  MOD_RES (161)..(161): Selenocysteine
  MOD_RES (167)..(167): Selenocysteine
  MOD_RES (207)..(208): Selenocysteine
  MOD_RES (215)..(215): Selenocysteine
  MOD_RES (224)..(224): Selenocysteine
  MOD_RES (282)..(282): Selenocysteine
  MOD_RES (293)..(293): Selenocysteine
  MOD_RES (301)..(301): Selenocysteine
  MOD_RES (304)..(304): Selenocysteine
  MOD_RES (318)..(318): Selenocysteine
  MOD_RES (323)..(323): Selenocysteine
  MOD_RES (326)..(326): Selenocysteine
  MOD_RES (362)..(362): Selenocysteine
  MOD_RES (371)..(371): Selenocysteine
  MOD_RES (376)..(376): Selenocysteine
  MOD_RES (382)..(382): Selenocysteine
  MOD_RES (393)..(394): Selenocysteine
  MOD_RES (397)..(397): Selenocysteine
  MOD_RES (405)..(405): Selenocysteine
  MOD_RES (425)..(425): Selenocysteine
  MOD_RES (430)..(430): Selenocysteine
  MOD_RES (434)..(434): Selenocysteine
  MOD_RES (443)..(443): Selenocysteine
  MOD_RES (465)..(465): Selenocysteine
  MOD_RES (478)..(478): Selenocysteine
  MOD_RES (480)..(480): Selenocysteine
  MOD_RES (489)..(489): Selenocysteine
  MOD_RES (513)..(513): Selenocysteine
  MOD_RES (521)..(521): Selenocysteine
  MOD_RES (539)..(539): Selenocysteine
  MOD_RES (544)..(544): Selenocysteine
  MOD_RES (546)..(546): Selenocysteine
  MOD_RES (571)..(571): Selenocysteine
  MOD_RES (576)..(576): Selenocysteine
  MOD_RES (595)..(595): Selenocysteine
  MOD_RES (602)..(602): Selenocysteine
  MOD_RES (613)..(613): Selenocysteine
  MOD_RES (629)..(629): Selenocysteine
MAPPGSSXVFLLALXIIASXWALXPXHYLXKHDVERLKASLDRPFXNLESAFYSIVGLSSLGAQVPDAKKACXYIRSNLDPSNVDSLFYAAQASQALSGCEISISNEXKDLLLAAVSEDSSVXQIYHAVAALSGFGLPLASQEALSALXARLSKEEXVLAXVQALQXASHLSQQADLRSIVEEIEDLVARLDELGGVYLQFEEGLEXXALFVAAXYKLMDHVGXEPSIKEDQVIQLMNAIFSKKNFESLSEAFSVASAAAVLSHNRYHVPVVVVPEGSASDXHEQAILRLQVXNVLSQPLXQAXVKLEHAKSVASRAXVLQKXSFXPVGDVFELNFMNVKFSSGYYDFLVEVEGDNRYIANXVELRVKISXEVGIXNVDLSXVDKDQSIAPKXXRVXYPAKAKGXFIADSHQNFALFFQLVDVNXGAELXPHQXFVRLHNQKXGQEVVFVAEPDNKNVYKFELDXSERKIEFDSASGXYXLYLIIGDAXLKNPILWNVADVVIKFPEEEAPSXVLSQNLFXPKQEIQHLFREPEKRPPXVVSNXFXALILSPLLLLFALWIRIGANVSNFXFAPSXIIFHLGHAAMLGLMYVYWXQLNMFQXLKYLAILGSVXFLAGNRMLAQQAVKRXAH

SEQ ID NO: 24158 - protein, 162 aa, Homo sapiens
  MOD_RES (8)..(8): Selenocysteine
  MOD_RES (12)..(12): Selenocysteine
  MOD_RES (23)..(23): Selenocysteine
  MOD_RES (36)..(36): Selenocysteine
  MOD_RES (42)..(42): Selenocysteine
  MOD_RES (82)..(83): Selenocysteine
  MOD_RES (90)..(90): Selenocysteine
  MOD_RES (99)..(99): Selenocysteine
  MOD_RES (157)..(157): Selenocysteine
MQRKHVPXSDLXLIPAMWIPSSXLPRPARPSQDVRXVQALQXASHLSQQADLRSIVEEIEDLVARLDELGGVYLQFEEGLEXXALFVAAXYKLMDHVGXEPSIKEDQVIQLMNAIFSKKNFESLSEAFSVASAAAVLSHNRYHVPVVVVPEGSASDXHEQAI

SEQ ID NO: 24159 - protein, 167 aa, Homo sapiens
  MOD_RES (4)..(4): Selenocysteine
  MOD_RES (10)..(10): Selenocysteine
  MOD_RES (50)..(51): Selenocysteine
  MOD_RES (58)..(58): Selenocysteine
  MOD_RES (67)..(67): Selenocysteine
  MOD_RES (125)..(125): Selenocysteine
  MOD_RES (136)..(136): Selenocysteine
  MOD_RES (144)..(144): Selenocysteine
  MOD_RES (147)..(147): Selenocysteine
  MOD_RES (161)..(161): Selenocysteine
  MOD_RES (166)..(166): Selenocysteine
MQRXVQALQXASHLSQQADLRSIVEEIEDLVARLDELGGVYLQFEEGLEXXALFVAAXYKLMDHVGXEPSIKEDQVIQLMNAIFSKKNFESLSEAFSVASAAAVLSHNRYHVPVVVVPEGSASDXHEQAILRLQVXNVLSQPLXQAXVKLEHAKSVASRAXVLQKXS

SEQ ID NO: 24160 - protein, 147 aa, Homo sapiens
  MOD_RES (1)..(1): Any amino acid
  MOD_RES (3)..(3): Selenocysteine
  MOD_RES (5)..(5): Selenocysteine
  MOD_RES (14)..(14): Selenocysteine
  MOD_RES (38)..(38): Selenocysteine
  MOD_RES (46)..(46): Selenocysteine
  MOD_RES (64)..(64): Selenocysteine
  MOD_RES (69)..(69): Selenocysteine
  MOD_RES (71)..(71): Selenocysteine
  MOD_RES (96)..(96): Selenocysteine
  MOD_RES (101)..(101): Selenocysteine
  MOD_RES (124)..(124): Selenocysteine
  MOD_RES (133)..(133): Selenocysteine
XGXYXLYLIIGDAXLKNPILWNVADVVIKFPEEEAPSXVLSQNLFXPKQEIQHLFREPEKRPPXVVSNXFXALILSPLLLLFALWIRIGANVSNFXFAPSXIIFHLGHAEQHISSRRKMEILKXECQEKESRXIHSMRRKMEKKNFI

SEQ ID NO: 24161 - protein, 165 aa, Homo sapiens
  MOD_RES (72)..(72): Selenocysteine
  MOD_RES (93)..(93): Selenocysteine
  MOD_RES (101)..(101): Selenocysteine
  MOD_RES (118)..(118): Selenocysteine
  MOD_RES (126)..(126): Selenocysteine
  MOD_RES (148)..(148): Selenocysteine
MLMPKKNRIAIYELLFKEGVMVAKKDVHMPKHPELADKNVPNLHVMKAMQSLKSRGYVKEQFAWRHFYWYLXNEGIQYLRDYLHLPPEIVPAXLRRSRPEXGRPRPKGLEGERPARLXRGEADRDXYRRSAVPPGADKKAEAGAGSAXEFQFRGGFGRGRGQPPQ

SEQ ID NO: 24162 - protein, 172 aa, Homo sapiens
  MOD_RES (72)..(72): Selenocysteine
  MOD_RES (93)..(93): Selenocysteine
  MOD_RES (101)..(101): Selenocysteine
  MOD_RES (118)..(118): Selenocysteine
  MOD_RES (126)..(126): Selenocysteine
  MOD_RES (148)..(148): Selenocysteine
MLMPKKNRIAIYELLFKEGVMVAKKDVHMPKHPELADKNVPNLHVMKAMQSLKSRGYVKEQFAWRHFYWYLXNEGIQYLRDYLHLPPEIVPAXLRRSRPEXGRPRPKGLEGERPARLXRGEADRDXYRRSAVPPGADKKAEAGAGSAXEFQFVLIAHDCSQIMSFVKRKHVQ

SEQ ID NO: 24163 - protein, 82 aa, Homo sapiens
  MOD_RES (5)..(5): Selenocysteine
  MOD_RES (16)..(16): Selenocysteine
  MOD_RES (25)..(25): Selenocysteine
  MOD_RES (42)..(43): Selenocysteine
  MOD_RES (45)..(45): Selenocysteine
  MOD_RES (61)..(61): Selenocysteine
  MOD_RES (63)..(63): Selenocysteine
IQVRXRGWMPGLSVPXKSSRPSFKXRRGSCWEKLARRSSRGXXRXSVWASRHPRRLLRAPXLXRNAPSLVMCPFEGGSSLAW

SEQ ID NO: 24164 - protein, 88 aa, Homo sapiens
  MOD_RES (6)..(6): Selenocysteine
  MOD_RES (15)..(15): Selenocysteine
  MOD_RES (28)..(28): Selenocysteine
  MOD_RES (77)..(77): Selenocysteine
MADIQXERAYQKQPXIFQNKKRVLLGEXGKEKLPRADPLWRGDQDEDAEDHCHPPRLSALHPQVQPLREAPQEHVCXPVPLLQGRPDR

SEQ ID NO: 24165 - protein, 118 aa, Homo sapiens
  MOD_RES (6)..(6): Selenocysteine
  MOD_RES (15)..(15): Selenocysteine
  MOD_RES (28)..(28): Selenocysteine
  MOD_RES (46)..(46): Selenocysteine
  MOD_RES (54)..(54): Selenocysteine
  MOD_RES (63)..(63): Selenocysteine
  MOD_RES (78)..(78): Selenocysteine
  MOD_RES (85)..(85): Selenocysteine
MADIQXERAYQKQPXIFQNKKRVLLGEXGKEKLPRYYKNIGLGFKXPKEAIEGXYIDKKCPFXGNVSIRGRILSGVVXKMKMQRXIVIRRDYLHYIRKYNRFEKRHKNMSVHLSPCFR

SEQ ID NO: 24166 - protein, 158 aa, Homo sapiens
  MOD_RES (6)..(6): Selenocysteine
  MOD_RES (15)..(15): Selenocysteine
  MOD_RES (28)..(28): Selenocysteine
  MOD_RES (46)..(46): Selenocysteine
  MOD_RES (54)..(54): Selenocysteine
  MOD_RES (63)..(63): Selenocysteine
  MOD_RES (78)..(78): Selenocysteine
  MOD_RES (85)..(85): Selenocysteine
  MOD_RES (127)..(127): Selenocysteine
  MOD_RES (137)..(137): Selenocysteine
  MOD_RES (146)..(146): Selenocysteine
  MOD_RES (151)..(151): Selenocysteine
MADIQXERAYQKQPXIFQNKKRVLLGEXGKEKLPRYYKNIGLGFKXPKEAIEGXYIDKKCPFXGNVSIRGRILSGVVXKMKMQRXIVIRRDYLHYIRKYNRFEKRHKNMSVHLSPCFRDVQIGDIVXVGECRPLSKXVRFNVLKVXKAAGXKKQFQKF

SEQ ID NO: 24167 - protein, 79 aa, Homo sapiens
  MOD_RES (6)..(6): Selenocysteine
  MOD_RES (48)..(48): Selenocysteine
  MOD_RES (58)..(58): Selenocysteine
  MOD_RES (67)..(67): Selenocysteine
  MOD_RES (72)..(72): Selenocysteine
MKMQRXIVIRRDYLHYIRKYNRFEKRHKNMSVHLSPCFRDVQIGDIVXVGECRPLSKXVRFNVLKVXKAAGXKKQFQKF

SEQ ID NO: 24168 - protein, 132 aa, Homo sapiens
  MOD_RES (16)..(16): Selenocysteine
  MOD_RES (24)..(24): Selenocysteine
MAEEGIAAGGVMDVNXALQEVLKXALIHDGLARGIREAAKALDKRQAHLCVLASNCDEPMYVKLVEALCAEHQINLIKVDDNKKLGEWVGLCKIDREGKPRKVVGCSCVVVKDYGKESQAKDVIEEYFKCKK

SEQ ID NO: 24169 - protein, 151 aa, Homo sapiens
  MOD_RES (24)..(24): Selenocysteine
  MOD_RES (29)..(29): Selenocysteine
  MOD_RES (46)..(46): Selenocysteine
  MOD_RES (67)..(67): Selenocysteine
  MOD_RES (131)..(131): Selenocysteine
  MOD_RES (145)..(145): Selenocysteine
MGRMHAPGKGLSQSALPYRRSVPXWLKLXSDDVKEQIYKLAKKGLXPSQIGVILRDSHGVAQVRFVXGNKILRILKSKGLAPDLPEDLYHLIKKAVAVRKHLERNRKDKDAKFRLILIESRIHRLARYYKXKRVLPPNWKYESSXASALVA

SEQ ID NO: 24170 - protein, 148 aa, Homo sapiens
  MOD_RES (24)..(24): Selenocysteine
  MOD_RES (29)..(29): Selenocysteine
  MOD_RES (46)..(46): Selenocysteine
  MOD_RES (67)..(67): Selenocysteine
  MOD_RES (112)..(112): Selenocysteine
MGRMHAPGKGLSQSALPYRRSVPXWLKLXSDDVKEQIYKLAKKGLXPSQIGVILRDSHGVAQVRFVXGNKILRILKSKGLAPDLPEDLYHLIKKAVAVRKHLERNRKRAGFXVWLDIIRPSESSLPIGNMNHLQPLPWSHKFVCVLKQ

SEQ ID NO: 24171 - protein, 116 aa, Homo sapiens
  MOD_RES (24)..(24): Selenocysteine
  MOD_RES (29)..(29): Selenocysteine
  MOD_RES (46)..(46): Selenocysteine
  MOD_RES (102)..(102): Selenocysteine
MGRMHAPGKGLSQSALPYRRSVPXWLKLXSDDVKEQIYKLAKKGLXPSQIVLLLSPSLECSGAISAHCNLHLLDSSDSPASASRIGVILRDSHGVAQVRFVXGNKILRILKSKGLA

SEQ ID NO: 24172 - protein, 151 aa, Homo sapiens
  MOD_RES (40)..(40): Selenocysteine
  MOD_RES (45)..(45): Selenocysteine
  MOD_RES (52)..(52): Selenocysteine
  MOD_RES (57)..(57): Selenocysteine
  MOD_RES (91)..(91): Selenocysteine
  MOD_RES (100)..(100): Selenocysteine
  MOD_RES (105)..(105): Selenocysteine
  MOD_RES (107)..(107): Selenocysteine
  MOD_RES (133)..(133): Selenocysteine
  MOD_RES (140)..(140): Selenocysteine
MAPRKGKEKKEEQVISLGPQVAEGENVFGVCHIFASFNDXFVHVXDLSGKEXICRVXGGMKVKADRDESSPYAAMLAAQDVAQRCKELGIXALHIKLRAXGGNRXKXPGPGAQSALRALARSGMKIGRIEDVXPIPSDSXRRKGGRRGRRL

SEQ ID NO: 24173 - protein, 134 aa, Homo sapiens
  MOD_RES (40)..(40): Selenocysteine
  MOD_RES (45)..(45): Selenocysteine
  MOD_RES (52)..(52): Selenocysteine
  MOD_RES (57)..(57): Selenocysteine
  MOD_RES (91)..(91): Selenocysteine
  MOD_RES (100)..(100): Selenocysteine
  MOD_RES (105)..(105): Selenocysteine
  MOD_RES (107)..(107): Selenocysteine
  MOD_RES (132)..(132): Selenocysteine
MAPRKGKEKKEEQVISLGPQVAEGENVFGVCHIFASFNDXFVHVXDLSGKEXICRVXGGMKVKADRDESSPYAAMLAAQDVAQRCKELGIXALHIKLRAXGGNRXKXPGPGAQSALRALARSGMKIGRIEKXVG

SEQ ID NO: 24174 - protein, 120 aa, Homo sapiens
  MOD_RES (1)..(1): Any amino acid
  MOD_RES (33)..(33): Selenocysteine
  MOD_RES (42)..(42): Selenocysteine
  MOD_RES (47)..(47): Selenocysteine
  MOD_RES (49)..(49): Selenocysteine
  MOD_RES (92)..(92): Selenocysteine
  MOD_RES (119)..(119): Selenocysteine
XMKVKADRDESSPYAAMLAAQDVAQRCKELGIXALHIKLRAXGGNRXKXPGPGAQSALRALARSGMKIGRIGKCPPLANAWVYFEALAPKSXCCAQWMCSGWSGHFWQLSLLREAARGXL

SEQ ID NO: 24175 - protein, 141 aa, Homo sapiens
  MOD_RES (11)..(11): Selenocysteine
  MOD_RES (16)..(16): Selenocysteine
  MOD_RES (78)..(78): Selenocysteine
  MOD_RES (101)..(101): Selenocysteine
  MOD_RES (118)..(118): Selenocysteine
  MOD_RES (132)..(132): Selenocysteine
MAEVEQKKKRXFRKFXYRGVDLDQLLDMSYEQLMQLYSARQRRRLNRGLRRKQHSLLKRLRKAKKEAPPMEKPEVVKXHLRDMIILPEMVGSMVGVYNGKXFNQPEMIGHYLGEFSIXYKPVKHGRPGIGAXHSSRFIPLK

SEQ ID NO: 24176 - protein, 145 aa, Homo sapiens
  MOD_RES (11)..(11): Selenocysteine
  MOD_RES (16)..(16): Selenocysteine
  MOD_RES (78)..(78): Selenocysteine
  MOD_RES (101)..(101): Selenocysteine
  MOD_RES (122)..(122): Selenocysteine
  MOD_RES (136)..(136): Selenocysteine
MAEVEQKKKRXFRKFXYRGVDLDQLLDMSYEQLMQLYSARQRRRLNRGLRRKQHSLLKRLRKAKKEAPPMEKPEVVKXHLRDMIILPEMVGSMVGVYNGKXFNQVEIKPEMIGHYLGEFSIXYKPVKHGRPGIGAXHSSRFIPLK

SEQ ID NO: 24177 - protein, 129 aa, Homo sapiens
  MOD_RES (11)..(11): Selenocysteine
  MOD_RES (16)..(16): Selenocysteine
  MOD_RES (78)..(78): Selenocysteine
  MOD_RES (101)..(101): Selenocysteine
MAEVEQKKKRXFRKFXYRGVDLDQLLDMSYEQLMQLYSARQRRRLNRGLRRKQHSLLKRLRKAKKEAPPMEKPEVVKXHLRDMIILPEMVGSMVGVYNGKXFNQVEIKVCAAVPAGWGGLGSPDAGGIS

SEQ ID NO: 24178 - protein, 152 aa, Homo sapiens
  MOD_RES (18)..(18): Selenocysteine
  MOD_RES (23)..(23): Selenocysteine
  MOD_RES (85)..(85): Selenocysteine
  MOD_RES (108)..(108): Selenocysteine
  MOD_RES (129)..(129): Selenocysteine
  MOD_RES (143)..(143): Selenocysteine
MLGRGADLAEVEQKKKRXFRKFXYRGVDLDQLLDMSYEQLMQLYSARQRRRLNRGLRRKQHSLLKRLRKAKKEAPPMEKPEVVKXHLRDMIILPEMVGSMVGVYNGKXFNQVEIKPEMIGHYLGEFSIXYKPVKHGRPGIGAXHSSRFIPLK

SEQ ID NO: 24179 - protein, 7 aa, Homo sapiens
MQLYSAR

SEQ ID NO: 24180 - protein, 68 aa, Homo sapiens
  MOD_RES (45)..(45): Selenocysteine
  MOD_RES (68)..(68): Selenocysteine
MQLYSARQRRRLNRGLRRKQHSLLKRLRKAKKEAPPMEKPEVVKXHLRDMIILPEMVGSMVGVYNGKX

SEQ ID NO: 24181 - protein, 112 aa, Homo sapiens
  MOD_RES (45)..(45): Selenocysteine
  MOD_RES (68)..(68): Selenocysteine
  MOD_RES (89)..(89): Selenocysteine
  MOD_RES (103)..(103): Selenocysteine
MQLYSARQRRRLNRGLRRKQHSLLKRLRKAKKEAPPMEKPEVVKXHLRDMIILPEMVGSMVGVYNGKXFNQVEIKPEMIGHYLGEFSIXYKPVKHGRPGIGAXHSSRFIPLK

SEQ ID NO: 24182 - protein, 135 aa, Homo sapiens
  MOD_RES (13)..(13): Selenocysteine
  MOD_RES (68)..(68): Selenocysteine
  MOD_RES (91)..(91): Selenocysteine
  MOD_RES (112)..(112): Selenocysteine
  MOD_RES (126)..(126): Selenocysteine
MRRVSPGRAAHKXAWCILPSEQLMQLYSARQRRRLNRGLRRKQHSLLKRLRKAKKEAPPMEKPEVVKXHLRDMIILPEMVGSMVGVYNGKXFNQVEIKPEMIGHYLGEFSIXYKPVKHGRPGIGAXHSSRFIPLK

SEQ ID NO: 24183 - protein, 118 aa, Homo sapiens
  MOD_RES (51)..(51): Selenocysteine
  MOD_RES (74)..(74): Selenocysteine
  MOD_RES (95)..(95): Selenocysteine
  MOD_RES (109)..(109): Selenocysteine
MSYEQLMQLYSARQRRRLNRGLRRKQHSLLKRLRKAKKEAPPMEKPEVVKXHLRDMIILPEMVGSMVGVYNGKXFNQVEIKPEMIGHYLGEFSIXYKPVKHGRPGIGAXHSSRFIPLK

SEQ ID NO: 24184 - protein, 50 aa, Homo sapiens
  MOD_RES (39)..(39): Selenocysteine
MVRMNVLADALKSINNAEKRGKRQVLIRPCSKVIVRFLXVMMKHELGKLL

SEQ ID NO: 24185 - protein, 100 aa, Homo sapiens
  MOD_RES (39)..(39): Selenocysteine
  MOD_RES (66)..(66): Selenocysteine
MVRMNVLADALKSINNAEKRGKRQVLIRPCSKVIVRFLXVMMKHGYIGEFEIIDDHRAGKIVVNLXGRLNKCGVISPRFDVQLKDLEKWQNNLLPSRQFG

SEQ ID NO: 24186 - protein, 130 aa, Homo sapiens
  MOD_RES (39)..(39): Selenocysteine
  MOD_RES (66)..(66): Selenocysteine
  MOD_RES (105)..(106): Selenocysteine
  MOD_RES (121)..(121): Selenocysteine
MVRMNVLADALKSINNAEKRGKRQVLIRPCSKVIVRFLXVMMKHGYIGEFEIIDDHRAGKIVVNLXGRLNKCGVISPRFDVQLKDLEKWQNNLLPSRQFGFIVLXXSAGIMDHEEARRKHXGGKILGFFF

SEQ ID NO: 24187 - protein, 111 aa, Homo sapiens
  MOD_RES (39)..(39): Selenocysteine
  MOD_RES (66)..(66): Selenocysteine
  MOD_RES (103)..(103): Selenocysteine
MVRMNVLADALKSINNAEKRGKRQVLIRPCSKVIVRFLXVMMKHGYIGEFEIIDDHRAGKIVVNLXGRLNKVGVQWHDLGYCNLCLPGSSDSPASASLVAEIXVWGDQPQI

SEQ ID NO: 24188 - protein, 49 aa, Homo sapiens
  MOD_RES (39)..(39): Selenocysteine
MVRMNVLADALKSINNAEKRGKRQVLIRPCSKVIVRFLXVMMKHVSYLL

SEQ ID NO: 24189 - protein, 52 aa, Homo sapiens
  MOD_RES (39)..(39): Selenocysteine
MVRMNVLADALKSINNAEKRGKRQVLIRPCSKVIVRFLXVMMKHVWGDQPQI

SEQ ID NO: 24190 - protein, 58 aa, Homo sapiens
  MOD_RES (1)..(1): Any amino acid
  MOD_RES (33)..(33): Selenocysteine
  MOD_RES (54)..(54): Selenocysteine
XCGVISPRFDVQLKDLEKWQNNLLPSRQFGIYXLQIMRLVPWLKVFSLHGCCIXVSLY

SEQ ID NO: 24191 - protein, 50 aa, Homo sapiens
LLEPVLLLGKERFAGVDIRVRVKGGGHVAQIYAIRQSISKALVAYYQKCE

SEQ ID NO: 24192 - protein, 129 aa, Homo sapiens
  MOD_RES (18)..(18): Selenocysteine
  MOD_RES (20)..(20): Selenocysteine
  MOD_RES (101)..(101): Selenocysteine
MPSKGPLQSVQVFGRKKXAXAVAHCKRGNGLIKLLEPVLLLGKERFAGVDIRVRVKGGGHVAQIYAIRQSISKALVAYYQKYVDEASKKEIKDILIQYDRXLLVADPRRCESKKFGGPGARARYQKSYR

SEQ ID NO: 24193 - protein, 100 aa, Homo sapiens
  MOD_RES (18)..(18): Selenocysteine
  MOD_RES (20)..(20): Selenocysteine
  MOD_RES (46)..(46): Selenocysteine
MPSKGPLQSVQVFGRKKXAXAVAHCKRGNGLIKVNGRPLEMIEPRXLQYKLLEPVLLLGKERFAGVDIRVRVKGGGHVAQIYAIRQSISKALVAYYQKCE

SEQ ID NO: 24194 - protein, 146 aa, Homo sapiens
  MOD_RES (18)..(18): Selenocysteine
  MOD_RES (20)..(20): Selenocysteine
  MOD_RES (46)..(46): Selenocysteine
  MOD_RES (118)..(118): Selenocysteine
MPSKGPLQSVQVFGRKKXAXAVAHCKRGNGLIKVNGRPLEMIEPRXLQYKLLEPVLLLGKERFAGVDIRVRVKGGGHVAQIYAIRQSISKALVAYYQKYVDEASKKEIKDILIQYDRXLLVADPRRCESKKFGGPGARARYQKSYR

SEQ ID NO: 24195 - protein, 152 aa, Homo sapiens
  MOD_RES (18)..(18): Selenocysteine
  MOD_RES (20)..(20): Selenocysteine
  MOD_RES (46)..(46): Selenocysteine
  MOD_RES (128)..(128): Selenocysteine
  MOD_RES (142)..(142): Selenocysteine
  MOD_RES (148)..(148): Selenocysteine
MPSKGPLQSVQVFGRKKXAXAVAHCKRGNGLIKVNGRPLEMIEPRXLQYKLLEPVLLLGKERFAGVDIRVRVKGGGHVAQIYGESQELGAWRRWLWEGGLHSAPVPFNCVSFSQLSVSPSPKPWWPIXRNMWMRLPRRRSKXSSSSMXGPCW

SEQ ID NO: 24196 - protein, 85 aa, Homo sapiens
  MOD_RES (1)..(1): Selenocysteine
  MOD_RES (3)..(3): Selenocysteine
  MOD_RES (29)..(29): Selenocysteine
XAXAVAHCKRGNGLIKVNGRPLEMIEPRXLQYKLLEPVLLLGKERFAGVDIRVRVKGGGHVAQIYAIRQSISKALVAYYQKCECG

SEQ ID NO: 24197 - protein, 135 aa, Homo sapiens
  MOD_RES (6)..(6): Selenocysteine
  MOD_RES (8)..(8): Selenocysteine
  MOD_RES (22)..(22): Selenocysteine
  MOD_RES (30)..(30): Selenocysteine
  MOD_RES (55)..(55): Selenocysteine
  MOD_RES (102)..(102): Selenocysteine
  MOD_RES (120)..(120): Selenocysteine
  MOD_RES (123)..(123): Selenocysteine
  MOD_RES (130)..(130): Selenocysteine
MGRVRXKXVKKAARVIIEKYYXRLGNDFHXNKRVCEEIAIIPSKKLRNKIAGYVXHLMKRIQRGPVRGISIKLQEEERERRDNYVPEVSALDQEIIEVDPDXKEMLKLLDFGSLSNLQVXQPXVGMNFKXPRGPV

SEQ ID NO: 24198 - protein, 191 aa, Homo sapiens
  MOD_RES (6)..(6): Selenocysteine
  MOD_RES (8)..(8): Selenocysteine
  MOD_RES (22)..(22): Selenocysteine
  MOD_RES (30)..(30): Selenocysteine
  MOD_RES (55)..(55): Selenocysteine
  MOD_RES (102)..(102): Selenocysteine
  MOD_RES (174)..(174): Selenocysteine
MGRVRXKXVKKAARVIIEKYYXRLGNDFHXNKRVCEEIAIIPSKKLRNKIAGYVXHLMKRIQRGPVRGISIKLQEEERERRDNYVPEVSALDQEIIEVDPDXKEMLKLLLAYVAPFVSALAESACFSSVKAFLWCLHANHSEMSFGPFPGLRQSVQPSGHSAYSWDEFQNASGXCLNFFCSAVLFSINLGQ

SEQ ID NO: 24199 - protein, 136 aa, Homo sapiens
  MOD_RES (6)..(6): Selenocysteine
  MOD_RES (8)..(8): Selenocysteine
  MOD_RES (22)..(22): Selenocysteine
  MOD_RES (30)..(30): Selenocysteine
  MOD_RES (55)..(55): Selenocysteine
  MOD_RES (102)..(102): Selenocysteine
  MOD_RES (125)..(125): Selenocysteine
MGRVRXKXVKKAARVIIEKYYXRLGNDFHXNKRVCEEIAIIPSKKLRNKIAGYVXHLMKRIQRGPVRGISIKLQEEERERRDNYVPEVSALDQEIIEVDPDXKEMLKLLVSVCWIPKVVFSWSKXISRSYYPRSPS

SEQ ID NO: 24200 - protein, 59 aa, Homo sapiens
  MOD_RES (1)..(1): Any amino acid
  MOD_RES (5)..(5): Selenocysteine
  MOD_RES (7)..(7): Selenocysteine
  MOD_RES (21)..(21): Selenocysteine
  MOD_RES (29)..(29): Selenocysteine
XRVRXKXVKKAARVIIEKYYXRLGNDFHXNKRVCEEIAIIPSKKLRNKIAGCSYCSRDL

SEQ ID NO: 24201 - protein, 82 aa, Homo sapiens
  MOD_RES (66)..(66): Selenocysteine
  MOD_RES (68)..(69): Selenocysteine
  MOD_RES (75)..(75): Selenocysteine
MQNPRQYKIPDWFLNRQKDVKDGKYSQVLANGLDNKLREDLERLKKIRAHRGLRHFWGLRVRGQHXKXXGRRGRXVGVSKKK

SEQ ID NO: 24202 - protein, 152 aa, Homo sapiens
  MOD_RES (18)..(18): Selenocysteine
  MOD_RES (31)..(31): Selenocysteine
  MOD_RES (53)..(53): Selenocysteine
  MOD_RES (60)..(60): Selenocysteine
  MOD_RES (69)..(69): Selenocysteine
  MOD_RES (136)..(136): Selenocysteine
  MOD_RES (138)..(139): Selenocysteine
  MOD_RES (145)..(145): Selenocysteine
MSLVIPEKFQHILRVLNXNIDGRRKIAFAIXAIKGVGRRYAHVVLRKADIDLXKRAGELXEDEVERVIXIMQNPRQYKIPDWFLNRQKDVKDGKYSQVLANGLDNKLREDLERLKKIRAHRGLRHFWGLRVRGQHXKXXGRRGRXVGVSKKK

SEQ ID NO: 24203 - protein, 76 aa, Homo sapiens
  MOD_RES (5)..(5): Selenocysteine
  MOD_RES (36)..(36): Selenocysteine
  MOD_RES (55)..(55): Selenocysteine
  MOD_RES (60)..(60): Selenocysteine
  MOD_RES (76)..(76): Selenocysteine
MPGVXVKDVNQQEFVRALAAFLKKSGKLKVPEWVDXVKLAKHKELAPYDENWFYXRAASXARHLYLRGGAGVGSMX

SEQ ID NO: 24204 - protein, 145 aa, Homo sapiens
  MOD_RES (5)..(5): Selenocysteine
  MOD_RES (36)..(36): Selenocysteine
  MOD_RES (55)..(55): Selenocysteine
  MOD_RES (60)..(60): Selenocysteine
  MOD_RES (76)..(76): Selenocysteine
  MOD_RES (124)..(124): Selenocysteine
MPGVXVKDVNQQEFVRALAAFLKKSGKLKVPEWVDXVKLAKHKELAPYDENWFYXRAASXARHLYLRGGAGVGSMXKIYGGRQRNGVMPSHFSRGSKSVARRVLQALEGLKMVEKDQDGGRKLXPQGQRDLDRIAGQVAAANKKH

SEQ ID NO: 24205 - protein, 100 aa, Homo sapiens
  MOD_RES (5)..(5): Selenocysteine
  MOD_RES (36)..(36): Selenocysteine
  MOD_RES (55)..(55): Selenocysteine
  MOD_RES (86)..(86): Selenocysteine
MPGVXVKDVNQQEFVRALAAFLKKSGKLKVPEWVDXVKLAKHKELAPYDENWFYXRAGEELSFHSAAPVPPGWRWGWLHDQDLWGXSEKRRHAQPLQPRL

SEQ ID NO: 24206 - protein, 102 aa, Homo sapiens
  MOD_RES (5)..(5): Selenocysteine
  MOD_RES (36)..(36): Selenocysteine
  MOD_RES (55)..(55): Selenocysteine
  MOD_RES (66)..(66): Selenocysteine
  MOD_RES (78)..(78): Selenocysteine
  MOD_RES (87)..(87): Selenocysteine
MPGVXVKDVNQQEFVRALAAFLKKSGKLKVPEWVDXVKLAKHKELAPYDENWFYXRAGGLILSIYXEADSLGLDPSFXSGCVSSASXARHLYLRGGAGVGSM

SEQ ID NO: 24207 - protein, 71 aa, Homo sapiens
  MOD_RES (2)..(2): Selenocysteine
  MOD_RES (50)..(50): Selenocysteine
MXKIYGGRQRNGVMPSHFSRGSKSVARRVLQALEGLKMVEKDQDGGRKLXPQGQRDLDRIAGQVAAANKKH

SEQ ID NO: 24208 - protein, 71 aa, Homo sapiens
  MOD_RES (4)..(4): Selenocysteine
  MOD_RES (35)..(35): Selenocysteine
  MOD_RES (54)..(54): Selenocysteine
PGVXVKDVNQQEFVRALAAFLKKSGKLKVPEWVDXVKLAKHKELAPYDENWFYXRAELHCHQAGVHWCRLG

SEQ ID NO: 24209 - protein, 155 aa, Homo sapiens
  MOD_RES (27)..(27): Selenocysteine
  MOD_RES (33)..(33): Selenocysteine
  MOD_RES (60)..(60): Selenocysteine
  MOD_RES (90)..(90): Selenocysteine
  MOD_RES (96)..(96): Selenocysteine
  MOD_RES (113)..(113): Selenocysteine
  MOD_RES (135)..(135): Selenocysteine
  MOD_RES (141)..(141): Selenocysteine
  MOD_RES (143)..(143): Selenocysteine
  MOD_RES (152)..(152): Selenocysteine
ESEIIDFFLGASLKDEVLKIMPVQKQXRAGQRXRFKAFVAIGDYNGHVGLGVKCSKEVAXAIRGAIILAKLSIVPVRRGYWGNKIGKPHXVPCKVXGRCGSVLVRLIPAPRGXGIVSAPVPKKLLMMAGIDDCYXSARGCXAXLGNFGRWSXHGA

SEQ ID NO: 24210 - protein, 209 aa, Homo sapiens
  MOD_RES (86)..(86): Selenocysteine
  MOD_RES (92)..(92): Selenocysteine
  MOD_RES (119)..(119): Selenocysteine
  MOD_RES (149)..(149): Selenocysteine
  MOD_RES (155)..(155): Selenocysteine
  MOD_RES (172)..(172): Selenocysteine
  MOD_RES (194)..(194): Selenocysteine
  MOD_RES (200)..(200): Selenocysteine
  MOD_RES (202)..(202): Selenocysteine
MADDAGAAGGPGGPGGPGMGNRGGFRGGFGSGIRGRGRGRGRGRGRGRGARGGKAEDKEESEIIDFFLGASLKDEVLKIMPVQKQXRAGQRXRFKAFVAIGDYNGHVGLGVKCSKEVAXAIRGAIILAKLSIVPVRRGYWGNKIGKPHXVPCKVXGRCGSVLVRLIPAPRGXGIVSAPVPKKLLMMAGIDDCYXSARGCXAXLGNFGHL

SEQ ID NO: 24211 - protein, 197 aa, Homo sapiens
  MOD_RES (64)..(64): Selenocysteine
  MOD_RES (116)..(116): Selenocysteine
  MOD_RES (122)..(122): Selenocysteine
  MOD_RES (149)..(149): Selenocysteine
  MOD_RES (179)..(179): Selenocysteine
  MOD_RES (195)..(195): Selenocysteine
  MOD_RES (197)..(197): Selenocysteine
MADDAGAAGGPGGPGGPGMGNRGGFRGGFGSGIRGRGRGRGRGRGRGRGARGGKAEDKEWMPVXKLGRLVKDMKIKSLEEIYLFSLPIKESEIIDFFLGASLKDEVLKIMPVQKQXRAGQRXRFKAFVAIGDYNGHVGLGVKCSKEVAXAIRGAIILAKLSIVPVRRGYWGNKIGKPHXVPCKPRPPLMPFLRPXAX

SEQ ID NO: 24212 - protein, 218 aa, Homo sapiens
  MOD_RES (64)..(64): Selenocysteine
  MOD_RES (116)..(116): Selenocysteine
  MOD_RES (122)..(122): Selenocysteine
  MOD_RES (149)..(149): Selenocysteine
  MOD_RES (179)..(179): Selenocysteine
  MOD_RES (185)..(185): Selenocysteine
  MOD_RES (202)..(202): Selenocysteine
MADDAGAAGGPGGPGGPGMGNRGGFRGGFGSGIRGRGRGRGRGRGRGRGARGGKAEDKEWMPVXKLGRLVKDMKIKSLEEIYLFSLPIKESEIIDFFLGASLKDEVLKIMPVQKQXRAGQRXRFKAFVAIGDYNGHVGLGVKCSKEVAXAIRGAIILAKLSIVPVRRGYWGNKIGKPHXVPCKVXGRCGSVLVRLIPAPRGXGIVSAPVPKKLLMMAG

SEQ ID NO: 24213 - protein, 293 aa, Homo sapiens
  MOD_RES (64)..(64): Selenocysteine
  MOD_RES (116)..(116): Selenocysteine
  MOD_RES (122)..(122): Selenocysteine
  MOD_RES (149)..(149): Selenocysteine
  MOD_RES (179)..(179): Selenocysteine
  MOD_RES (185)..(185): Selenocysteine
  MOD_RES (202)..(202): Selenocysteine
  MOD_RES (224)..(224): Selenocysteine
  MOD_RES (230)..(230): Selenocysteine
  MOD_RES (232)..(232): Selenocysteine
  MOD_RES (240)..(240): Selenocysteine
  MOD_RES (247)..(247): Selenocysteine
  MOD_RES (252)..(252): Selenocysteine
  MOD_RES (259)..(259): Selenocysteine
  MOD_RES (262)..(262): Selenocysteine
  MOD_RES (270)..(270): Selenocysteine
  MOD_RES (276)..(276): Selenocysteine
  MOD_RES (278)..(278): Selenocysteine
  MOD_RES (285)..(285): Selenocysteine
  MOD_RES (292)..(293): Selenocysteine
MADDAGAAGGPGGPGGPGMGNRGGFRGGFGSGIRGRGRGRGRGRGRGRGARGGKAEDKEWMPVXKLGRLVKDMKIKSLEEIYLFSLPIKESEIIDFFLGASLKDEVLKIMPVQKQXRAGQRXRFKAFVAIGDYNGHVGLGVKCSKEVAXAIRGAIILAKLSIVPVRRGYWGNKIGKPHXVPCKVXGRCGSVLVRLIPAPRGXGIVSAPVPKKLLMMAGIDDCYXSARGCXAXLGNFAKAXFDAISKXYSYLXPDLWKEXVFXKSPYQEFXDHLVKXHXRVSVQRXQAPAVAXX

SEQ ID NO: 24214 - protein, 235 aa, Homo sapiens
  MOD_RES (64)..(64): Selenocysteine
  MOD_RES (116)..(116): Selenocysteine
  MOD_RES (122)..(122): Selenocysteine
  MOD_RES (127)..(127): Selenocysteine
  MOD_RES (144)..(144): Selenocysteine
  MOD_RES (166)..(166): Selenocysteine
  MOD_RES (172)..(172): Selenocysteine
  MOD_RES (174)..(174): Selenocysteine
  MOD_RES (182)..(182): Selenocysteine
  MOD_RES (189)..(189): Selenocysteine
  MOD_RES (194)..(194): Selenocysteine
  MOD_RES (201)..(201): Selenocysteine
  MOD_RES (204)..(204): Selenocysteine
  MOD_RES (212)..(212): Selenocysteine
  MOD_RES (218)..(218): Selenocysteine
  MOD_RES (220)..(220): Selenocysteine
  MOD_RES (227)..(227): Selenocysteine
  MOD_RES (234)..(235): Selenocysteine
MADDAGAAGGPGGPGGPGMGNRGGFRGGFGSGIRGRGRGRGRGRGRGRGARGGKAEDKEWMPVXKLGRLVKDMKIKSLEEIYLFSLPIKESEIIDFFLGASLKDEVLKIMPVQKQXRAGQRXRFKVXGRCGSVLVRLIPAPRGXGIVSAPVPKKLLMMAGIDDCYXSARGCXAXLGNFAKAXFDAISKXYSYLXPDLWKEXVFXKSPYQEFXDHLVKXHXRVSVQRXQAPAVAXX

SEQ ID NO: 24215 - protein, 44 aa, Homo sapiens
  MOD_RES (4)..(4): Selenocysteine
MPVXKLGRLVKDMKIKSLEEIYLFSLPIKESEIIDFFLGASLKD

SEQ ID NO: 24216 - protein, 195 aa, Homo sapiens
  MOD_RES (2)..(2): Selenocysteine
  MOD_RES (51)..(51): Selenocysteine
  MOD_RES (81)..(81): Selenocysteine
  MOD_RES (87)..(87): Selenocysteine
  MOD_RES (104)..(104): Selenocysteine
  MOD_RES (126)..(126): Selenocysteine
  MOD_RES (132)..(132): Selenocysteine
  MOD_RES (134)..(134): Selenocysteine
  MOD_RES (142)..(142): Selenocysteine
  MOD_RES (149)..(149): Selenocysteine
  MOD_RES (154)..(154): Selenocysteine
  MOD_RES (161)..(161): Selenocysteine
  MOD_RES (164)..(164): Selenocysteine
  MOD_RES (172)..(172): Selenocysteine
  MOD_RES (178)..(178): Selenocysteine
  MOD_RES (180)..(180): Selenocysteine
  MOD_RES (187)..(187): Selenocysteine
  MOD_RES (194)..(195): Selenocysteine
VXKLGRLVKDMKIKSLEEIYLFSLPIKAFVAIGDYNGHVGLGVKCSKEVAXAIRGAIILAKLSIVPVRRGYWGNKIGKPHXVPCKVXGRCGSVLVRLIPAPRGXGIVSAPVPKKLLMMAGIDDCYXSARGCXAXLGNFAKAXFDAISKXYSYLXPDLWKEXVFXKSPYQEFXDHLVKXHXRVSVQRXQAPAVAXX

SEQ ID NO: 24217 - protein, 63 aa, Homo sapiens
  MOD_RES (1)..(1): Any amino acid
  MOD_RES (6)..(6): Selenocysteine
  MOD_RES (34)..(34): Selenocysteine
  MOD_RES (56)..(56): Selenocysteine
XWMPVXKLGRLVKDMKIKSLEEIYLFSLPIKQGXVVMARPKLDKAKGNLSGKPHLXKQEKKGK

SEQ ID NO: 24218 - protein, 46 aa, Homo sapiens
  MOD_RES (6)..(6): Selenocysteine
  MOD_RES (9)..(9): Selenocysteine
  MOD_RES (23)..(23): Selenocysteine
  MOD_RES (25)..(25): Selenocysteine
MAFKDXGKXPVEPEVAIHRIRIXLXSRNVKSLEKDFENHYKKNSLW

SEQ ID NO: 24219 - protein, 142 aa, Homo sapiens
  MOD_RES (6)..(6): Selenocysteine
  MOD_RES (9)..(9): Selenocysteine
  MOD_RES (23)..(23): Selenocysteine
  MOD_RES (25)..(25): Selenocysteine
  MOD_RES (58)..(58): Selenocysteine
  MOD_RES (60)..(60): Selenocysteine
  MOD_RES (64)..(65): Selenocysteine
  MOD_RES (68)..(68): Selenocysteine
  MOD_RES (76)..(76): Selenocysteine
  MOD_RES (102)..(102): Selenocysteine
  MOD_RES (116)..(116): Selenocysteine
  MOD_RES (123)..(123): Selenocysteine
  MOD_RES (129)..(129): Selenocysteine
  MOD_RES (139)..(139): Selenocysteine
MAFKDXGKXPVEPEVAIHRIRIXLXSRNVKSLEKVCADLIRGAKEKNLKVKGPVRMPXKXLRIXXRKXPCGEGSKXWDRFQMRIHKRLIDLHSPSEIVKQIXSISIEPGVELIESXDAEPMDXEGQQYXLRSVFESPGXCPF

SEQ ID NO: 24220 - protein, 119 aa, Homo sapiens
  MOD_RES (6)..(6): Selenocysteine
  MOD_RES (9)..(9): Selenocysteine
  MOD_RES (23)..(23): Selenocysteine
  MOD_RES (25)..(25): Selenocysteine
  MOD_RES (58)..(58): Selenocysteine
  MOD_RES (60)..(60): Selenocysteine
  MOD_RES (64)..(65): Selenocysteine
  MOD_RES (68)..(68): Selenocysteine
  MOD_RES (76)..(76): Selenocysteine
  MOD_RES (102)..(102): Selenocysteine
  MOD_RES (115)..(115): Selenocysteine
MAFKDXGKXPVEPEVAIHRIRIXLXSRNVKSLEKVCADLIRGAKEKNLKVKGPVRMPXKXLRIXXRKXPCGEGSKXWDRFQMRIHKRLIDLHSPSEIVKQIXSISIEPGVEVEVXIADA

SEQ ID NO: 24221 - protein, 61 aa, Homo sapiens
  MOD_RES (6)..(6): Selenocysteine
  MOD_RES (9)..(9): Selenocysteine
  MOD_RES (23)..(23): Selenocysteine
  MOD_RES (25)..(25): Selenocysteine
  MOD_RES (58)..(58): Selenocysteine
MAFKDXGKXPVEPEVAIHRIRIXLXSRNVKSLEKVCADLIRGAKEKNLKVKGPVRMPXKVK

SEQ ID NO: 24222 - protein, 64 aa, Homo sapiens
  MOD_RES (3)..(3): Selenocysteine
  MOD_RES (5)..(5): Selenocysteine
  MOD_RES (9)..(10): Selenocysteine
  MOD_RES (13)..(13): Selenocysteine
  MOD_RES (21)..(21): Selenocysteine
  MOD_RES (47)..(47): Selenocysteine
  MOD_RES (60)..(60): Selenocysteine
MPXKXLRIXXRKXPCGEGSKXWDRFQMRIHKRLIDLHSPSEIVKQIXSISIEPGVEVEVXIADA

SEQ ID NO: 24223 - protein, 81 aa, Homo sapiens
  MOD_RES (43)..(43): Selenocysteine
  MOD_RES (52)..(52): Selenocysteine
MQNDAGEFVDLYVPRKCSASNRIIGAKDHASIQMNVAEVDKVXGRFNGQFKXYAICGAIRRMGESDDSILRLAKADGIVSK

SEQ ID NO: 24224 - protein, 83 aa, Homo sapiens
  MOD_RES (43)..(43): Selenocysteine
  MOD_RES (52)..(52): Selenocysteine
MQNDAGEFVDLYVPRKCSASNRIIGAKDHASIQMNVAEVDKVXGRFNGQFKXYAICGAIRRMGESDDSILRLAKADGIVSKNF

SEQ ID NO: 24225 - protein, 90 aa, Homo sapiens
  MOD_RES (43)..(43): Selenocysteine
  MOD_RES (52)..(52): Selenocysteine
  MOD_RES (75)..(75): Selenocysteine
  MOD_RES (78)..(78): Selenocysteine
MQNDAGEFVDLYVPRKCSASNRIIGAKDHASIQMNVAEVDKVXGRFNGQFKXYAICGAIRRMVSVSLGFAHHFGXSWXLPCALECVMVPE

SEQ ID NO: 24226 - protein, 66 aa, Homo sapiens
MQNDAGEFVDLYVPRKCSASNRIIGAKDHASIQMNVAEVSWEPGRREGCDICAGKAGCPIVEEPLG

SEQ ID NO: 24227 - protein, 55 aa, Homo sapiens
  MOD_RES (9)..(9): Selenocysteine
  MOD_RES (34)..(34): Selenocysteine
MGKCRGLRXARKLRSHRRDQKWHDKQYKKAHLGXALKANPFGGASHAKGIVLEKV

SEQ ID NO: 24228 - protein, 85 aa, Homo sapiens
  MOD_RES (9)..(9): Selenocysteine
  MOD_RES (34)..(34): Selenocysteine
MGKCRGLRXARKLRSHRRDQKWHDKQYKKAHLGXALKANPFGGASHAKGIVLEKVGVEAKQPNSAIRKCVRVQLIKNGKKERPRS

SEQ ID NO: 24229 - protein, 134 aa, Homo sapiens
  MOD_RES (9)..(9): Selenocysteine
  MOD_RES (34)..(34): Selenocysteine
  MOD_RES (82)..(82): Selenocysteine
MGKCRGLRXARKLRSHRRDQKWHDKQYKKAHLGXALKANPFGGASHAKGIVLEKVGVEAKQPNSAIRKCVRVQLIKNGKKIXAFVPNDGCLNFIEENDEVLVAGFGRKGHAVGDIPGVRFKSFHGYSGMVEMKL

SEQ ID NO: 24230 - protein, 143 aa, Homo sapiens
  MOD_RES (9)..(9): Selenocysteine
  MOD_RES (34)..(34): Selenocysteine
  MOD_RES (82)..(82): Selenocysteine
MGKCRGLRXARKLRSHRRDQKWHDKQYKKAHLGXALKANPFGGASHAKGIVLEKVGVEAKQPNSAIRKCVRVQLIKNGKKIXAFVPNDGCLNFIEENDEVLVAGFGRKGHAVGDIPGVRFKVVKVANVSLLALYKGKKERPRS

SEQ ID NO: 24231 - protein, 123 aa, Homo sapiens
  MOD_RES (9)..(9): Selenocysteine
  MOD_RES (34)..(34): Selenocysteine
  MOD_RES (82)..(82): Selenocysteine
  MOD_RES (100)..(100): Selenocysteine
  MOD_RES (123)..(123): Selenocysteine
MGKCRGLRXARKLRSHRRDQKWHDKQYKKAHLGXALKANPFGGASHAKGIVLEKVGVEAKQPNSAIRKCVRVQLIKNGKKIXAFVPNDGCLNFIEVSISXLSYLLFLGWPPSHFYLMQGSFLX

SEQ ID NO: 24232 - protein, 130 aa, Homo sapiens
  MOD_RES (4)..(4): Selenocysteine
  MOD_RES (6)..(6): Selenocysteine
  MOD_RES (9)..(9): Selenocysteine
  MOD_RES (14)..(14): Selenocysteine
  MOD_RES (34)..(34): Selenocysteine
  MOD_RES (38)..(38): Selenocysteine
  MOD_RES (50)..(51): Selenocysteine
  MOD_RES (62)..(62): Selenocysteine
  MOD_RES (69)..(70): Selenocysteine
  MOD_RES (102)..(102): Selenocysteine
  MOD_RES (120)..(120): Selenocysteine
MNDXVXIRXRKFMXNRLLQRKQMVIDVLHPGKAXVPKXEIREKLAKMYKXXPDVIFVFGFRXHFGGGKXXGFGMIYDSLDYAKKNEPKHRLARHGLYEKKKXSRKQRKERKNRMKKVRGXAKANVGAGKK

SEQ ID NO: 24233 - protein, 132 aa, Homo sapiens
  MOD_RES (4)..(4): Selenocysteine
  MOD_RES (6)..(6): Selenocysteine
  MOD_RES (9)..(9): Selenocysteine
  MOD_RES (14)..(14): Selenocysteine
  MOD_RES (34)..(34): Selenocysteine
  MOD_RES (38)..(38): Selenocysteine
  MOD_RES (50)..(51): Selenocysteine
  MOD_RES (62)..(62): Selenocysteine
  MOD_RES (69)..(70): Selenocysteine
  MOD_RES (102)..(102): Selenocysteine
  MOD_RES (120)..(120): Selenocysteine
MNDXVXIRXRKFMXNRLLQRKQMVIDVLHPGKAXVPKXEIREKLAKMYKXXPDVIFVFGFRXHFGGGKXXGFGMIYDSLDYAKKNEPKHRLARHGLYEKKKXSRKQRKERKNRMKKVRGXAKANVGAGKKKR

SEQ ID NO: 24234 - protein, 289 aa, Homo sapiens
  MOD_RES (4)..(4): Selenocysteine
  MOD_RES (6)..(6): Selenocysteine
  MOD_RES (9)..(9): Selenocysteine
  MOD_RES (14)..(14): Selenocysteine
  MOD_RES (34)..(34): Selenocysteine
  MOD_RES (38)..(38): Selenocysteine
  MOD_RES (50)..(51): Selenocysteine
  MOD_RES (62)..(62): Selenocysteine
  MOD_RES (69)..(70): Selenocysteine
  MOD_RES (102)..(102): Selenocysteine
  MOD_RES (120)..(120): Selenocysteine
  MOD_RES (151)..(151): Selenocysteine
  MOD_RES (178)..(178): Selenocysteine
  MOD_RES (195)..(195): Selenocysteine
  MOD_RES (199)..(199): Selenocysteine
  MOD_RES (251)..(251): Selenocysteine
  MOD_RES (253)..(253): Selenocysteine
MNDXVXIRXRKFMXNRLLQRKQMVIDVLHPGKAXVPKXEIREKLAKMYKXXPDVIFVFGFRXHFGGGKXXGFGMIYDSLDYAKKNEPKHRLARHGLYEKKKXSRKQRKERKNRMKKVRGXAKANVGAGKKMRELGLGVQALGRISQEERCXDVKNSKARESRGVVWQVEVPGPWSVWXCGRLRRGCGKYLQVAVXWRKXENREQCCQACLLERALVRNGAFMSPASPAPAGSPHPVDGDLVLHLPEALSAXLXLSPHIQAINKSFGPFFEIHQESSCFSPPSCLSGLGH

SEQ ID NO: 24235 - protein, 133 aa, Homo sapiens
  MOD_RES (4)..(4): Selenocysteine
  MOD_RES (6)..(6): Selenocysteine
  MOD_RES (9)..(9): Selenocysteine
  MOD_RES (14)..(14): Selenocysteine
  MOD_RES (34)..(34): Selenocysteine
  MOD_RES (38)..(38): Selenocysteine
  MOD_RES (50)..(51): Selenocysteine
  MOD_RES (62)..(62): Selenocysteine
  MOD_RES (69)..(70): Selenocysteine
  MOD_RES (102)..(102): Selenocysteine
  MOD_RES (120)..(120): Selenocysteine
MNDXVXIRXRKFMXNRLLQRKQMVIDVLHPGKAXVPKXEIREKLAKMYKXXPDVIFVFGFRXHFGGGKXXGFGMIYDSLDYAKKNEPKHRLARHGLYEKKKXSRKQRKERKNRMKKVRGXAKANVGAGKKPKE

SEQ ID NO: 24236 - protein, 131 aa, Homo sapiens
  MOD_RES (4)..(4): Selenocysteine
  MOD_RES (6)..(6): Selenocysteine
  MOD_RES (9)..(9): Selenocysteine
  MOD_RES (14)..(14): Selenocysteine
  MOD_RES (34)..(34): Selenocysteine
  MOD_RES (38)..(38): Selenocysteine
  MOD_RES (50)..(51): Selenocysteine
  MOD_RES (62)..(62): Selenocysteine
  MOD_RES (69)..(70): Selenocysteine
  MOD_RES (102)..(102): Selenocysteine
  MOD_RES (120)..(120): Selenocysteine
MNDXVXIRXRKFMXNRLLQRKQMVIDVLHPGKAXVPKXEIREKLAKMYKXXPDVIFVFGFRXHFGGGKXXGFGMIYDSLDYAKKNEPKHRLARHGLYEKKKXSRKQRKERKNRMKKVRGXAKANVGAGKKQ

SEQ ID NO: 24237 - protein, 125 aa, Homo sapiens
  MOD_RES (54)..(54): Selenocysteine
  MOD_RES (69)..(69): Selenocysteine
  MOD_RES (110)..(110): Selenocysteine
  MOD_RES (113)..(113): Selenocysteine
MPPKDDKKKKDAGKSAKKDKDPVNKSGGKAKKKKWSKGKVRDKLNNLVLFDKAXYDKLCKEVPNYKLIXPAVVSERLKIRGSLARAALQELLSKGLIKLVSKHRAQVIYXRNXKGGDAPAAGEDA

SEQ ID NO: 24238 - protein, 39 aa, Homo sapiens
MPPKDDKKKKDAGKSAKKDKDPVNKSGGKAKKKLWSLRD

SEQ ID NO: 24239 - protein, 39 aa, Homo sapiens
MPPKDDKKKKDAGKSAKKDKDPVNKSGGKAKKKVEIRPL

SEQ ID NO: 24240 - protein, 115 aa, Homo sapiens
  MOD_RES (2)..(2): Selenocysteine
  MOD_RES (24)..(24): Selenocysteine
  MOD_RES (96)..(96): Selenocysteine
MXKKRRNNGRAKKGRGHVQPIRCXNCARCVPKDKAIKKFVIRNIVEAAAVRDISEASVFDAYVLPKLYVKLHYCVSCAIHSKVVRNRSREARKDRXPPPRFRPAGAAPRPPPKPM

SEQ ID NO: 24241 - protein, 84 aa, Homo sapiens
  MOD_RES (44)..(45): Selenocysteine
  MOD_RES (52)..(52): Selenocysteine
  MOD_RES (61)..(61): Selenocysteine
  MOD_RES (67)..(67): Selenocysteine
  MOD_RES (74)..(74): Selenocysteine
MPLAKDLLHPSPEEEKRKHKKKRLVQSPNSYFMDVKCPGCYKIXXVFSHAQXVVLCVGCSXVLCQPXGGKARLXEGCSFRRKQH

SEQ ID NO: 24242 - protein, 66 aa, Homo sapiens
  MOD_RES (42)..(42): Selenocysteine
  MOD_RES (50)..(50): Selenocysteine
MPLAKDLLHPSPEEEKRKHKKKRLVQSPNSYFMDVKCPGEEXACCSGESXGPQQLENVVVLAVSYP

SEQ ID NO: 24243 - protein, 106 aa, Homo sapiens
  MOD_RES (7)..(7): Selenocysteine
  MOD_RES (9)..(9): Selenocysteine
  MOD_RES (12)..(12): Selenocysteine
  MOD_RES (14)..(14): Selenocysteine
  MOD_RES (22)..(22): Selenocysteine
  MOD_RES (55)..(55): Selenocysteine
  MOD_RES (66)..(66): Selenocysteine
  MOD_RES (86)..(87): Selenocysteine
MQIFVKXLXGKXIXLEVEPSDXIENVKAKIQDKEGIPPDQQRLIFAGKQLEDGRXLSDYNIQKESXLHLVLRLRGGAKKRKKKSYXXPKKNKHKRKKVKLAVLKYY

SEQ ID NO: 24244 - protein, 156 aa, Homo sapiens
  MOD_RES (7)..(7): Selenocysteine
  MOD_RES (9)..(9): Selenocysteine
  MOD_RES (12)..(12): Selenocysteine
  MOD_RES (14)..(14): Selenocysteine
  MOD_RES (22)..(22): Selenocysteine
  MOD_RES (55)..(55): Selenocysteine
  MOD_RES (66)..(66): Selenocysteine
  MOD_RES (86)..(87): Selenocysteine
  MOD_RES (147)..(147): Selenocysteine
MQIFVKXLXGKXIXLEVEPSDXIENVKAKIQDKEGIPPDQQRLIFAGKQLEDGRXLSDYNIQKESXLHLVLRLRGGAKKRKKKSYXXPKKNKHKRKKVKLAVLKYYKVDENGKISRLRRECPSDECGAGVFMASHFDRHYCGKCCLXYCFNKPEDK

SEQ ID NO: 24245 - protein, 100 aa, Homo sapiens
  MOD_RES (60)..(61): Selenocysteine
  MOD_RES (68)..(68): Selenocysteine
  MOD_RES (77)..(77): Selenocysteine
  MOD_RES (83)..(83): Selenocysteine
  MOD_RES (90)..(90): Selenocysteine
MCQRCGLKLIVIICFFVQLARDLLHPSLEEEKKKHKKKRLVQSPNSYFMDVKCPGCYKIXXVFSHAQXVVLCVGCSXVLCQPXGGKARLXEGCSFRRKQH

SEQ ID NO: 24246 - protein, 52 aa, Homo sapiens
  MOD_RES (12)..(13): Selenocysteine
  MOD_RES (20)..(20): Selenocysteine
  MOD_RES (29)..(29): Selenocysteine
  MOD_RES (35)..(35): Selenocysteine
  MOD_RES (42)..(42): Selenocysteine
MDVKCPGCYKIXXVFSHAQXVVLCVGCSXVLCQPXGGKARLXEGCSFRRKQH

SEQ ID NO: 24247 - protein, 84 aa, Homo sapiens
  MOD_RES (44)..(45): Selenocysteine
  MOD_RES (52)..(52): Selenocysteine
  MOD_RES (61)..(61): Selenocysteine
  MOD_RES (67)..(67): Selenocysteine
  MOD_RES (74)..(74): Selenocysteine
MPLARDLLHPSLEEEKKKHKKKRLVQSPNSYFMDVKCPGCYKIXXVFSHAQXVVLCVGCSXVLCQPXGGKARLXEGCSFRRKQH

SEQ ID NO: 24248 - protein, 97 aa, Homo sapiens
  MOD_RES (44)..(45): Selenocysteine
  MOD_RES (52)..(52): Selenocysteine
  MOD_RES (61)..(61): Selenocysteine
  MOD_RES (67)..(67): Selenocysteine
  MOD_RES (74)..(74): Selenocysteine
MPLARDLLHPSLEEEKKKHKKKRLVQSPNSYFMDVKCPGCYKIXXVFSHAQXVVLCVGCSXVLCQPXGGKARLXEGISFGILQPSDEIDDYKCLYLH

SEQ ID NO: 24249 - protein, 69 aa, Homo sapiens
  MOD_RES (3)..(3): Selenocysteine
  MOD_RES (15)..(15): Selenocysteine
  MOD_RES (21)..(21): Selenocysteine
  MOD_RES (28)..(28): Selenocysteine
  MOD_RES (38)..(38): Selenocysteine
  MOD_RES (57)..(57): Selenocysteine
MDXSRVQPIKLARVXKVLGRXGSQGQCXQVRVEFMDDXSRSIIRNVKGPVREGDVLXLLESEREARRLR

SEQ ID NO: 24250 - protein, 53 aa, Homo sapiens
MAVFDLAIPAEQIIFHGGRVCSNRHGLIRKYGLNMCRQCFRQYAKDIGFIKLD

SEQ ID NO: 24251 - protein, 67 aa, Homo sapiens
MGHQQLYWSHPRKFGQGSRSCRVCSNRHGLIRKYGLNMCRQCFRQYAKDIGFIKKDLSCLPWHCLWR

SEQ ID NO: 24252 - protein, 56 aa, Homo sapiens [sequence omitted]

SEQ ID NO: 24253 - protein, 44 aa, Homo sapiens
  MOD_RES (26)..(26): Selenocysteine
  MOD_RES (40)..(40): Selenocysteine
MAVQISKKRKFVADGIFKAELNEFLXRELAEDGYSGVENXECSW

SEQ ID NO: 24254 - protein, 231 aa, Homo sapiens
  MOD_RES (26)..(26): Selenocysteine
  MOD_RES (42)..(42): Selenocysteine
  MOD_RES (44)..(44): Selenocysteine
  MOD_RES (46)..(46): Selenocysteine
  MOD_RES (53)..(53): Selenocysteine
  MOD_RES (55)..(55): Selenocysteine
  MOD_RES (70)..(70): Selenocysteine
  MOD_RES (158)..(158): Selenocysteine
  MOD_RES (183)..(183): Selenocysteine
  MOD_RES (208)..(209): Selenocysteine
  MOD_RES (230)..(230): Selenocysteine
MAVQISKKRKFVADGIFKAELNEFLXRELAEDGYSGVEVRVXPXRXEIIILAXRXQNVLGEKGRRIRELXAVVQKRFGFPEGSLCAIAQAESLRYKLLGGLAVRRACYGVLRFIMESGAKGCEVVVSGKLRGQRAKSMKFVDGLMIHSGDPVNYYVDXAVRHVLLRQGVLGIKVKIMLPWDPXGKIGPKKPLPDHVSIVEPKDEILPXXPISEQKGGKPEPPAMPQPVPXA

SEQ ID NO: 24255 - protein, 115 aa, Homo sapiens
  MOD_RES (26)..(26): Selenocysteine
  MOD_RES (42)..(42): Selenocysteine
  MOD_RES (44)..(44): Selenocysteine
  MOD_RES (46)..(46): Selenocysteine
  MOD_RES (53)..(53): Selenocysteine
  MOD_RES (55)..(55): Selenocysteine
  MOD_RES (70)..(70): Selenocysteine
  MOD_RES (110)..(110): Selenocysteine
  MOD_RES (113)..(113): Selenocysteine
MAVQISKKRKFVADGIFKAELNEFLXRELAEDGYSGVEVRVXPXRXEIIILAXRXQNVLGEKGRRIRELXAVVQKRFGFPEGSVEGLLWCAAVHHGEWGQRLRGCGVWEXPRXEG

SEQ ID NO: 24256 - protein, 91 aa, Homo sapiens
  MOD_RES (26)..(26): Selenocysteine
  MOD_RES (42)..(42): Selenocysteine
  MOD_RES (44)..(44): Selenocysteine
  MOD_RES (46)..(46): Selenocysteine
  MOD_RES (53)..(53): Selenocysteine
  MOD_RES (55)..(55): Selenocysteine
  MOD_RES (70)..(70): Selenocysteine
  MOD_RES (89)..(89): Selenocysteine
MAVQISKKRKFVADGIFKAELNEFLXRELAEDGYSGVEVRVXPXRXEIIILAXRXQNVLGEKGRRIRELXAVVQKRFGFPEGSVEHCGXQR

SEQ ID NO: 24257 - protein, 259 aa, Homo sapiens
  MOD_RES (26)..(26): Selenocysteine
  MOD_RES (42)..(42): Selenocysteine
  MOD_RES (44)..(44): Selenocysteine
  MOD_RES (46)..(46): Selenocysteine
  MOD_RES (53)..(53): Selenocysteine
  MOD_RES (55)..(55): Selenocysteine
  MOD_RES (70)..(70): Selenocysteine
  MOD_RES (93)..(93): Selenocysteine
  MOD_RES (109)..(109): Selenocysteine
  MOD_RES (186)..(186): Selenocysteine
  MOD_RES (211)..(211): Selenocysteine
  MOD_RES (236)..(237): Selenocysteine
  MOD_RES (258)..(258): Selenocysteine
MAVQISKKRKFVADGIFKAELNEFLXRELAEDGYSGVEVRVXPXRXEIIILAXRXQNVLGEKGRRIRELXAVVQKRFGFPEGSVELKIMVMVXGYPLLPLKLYAEKVAXRGLCAIAQAESLRYKLLGGLAVRRACYGVLRFIMESGAKGCEVVVSGKLRGQRAKSMKFVDGLMIHSGDPVNYYVDXAVRHVLLRQGVLGIKVKIMLPWDPXGKIGPKKPLPDHVSIVEPKDEILPXXPISEQKGGKPEPPAMPQPVPXA

SEQ ID NO: 24258 - protein, 117 aa, Homo sapiens
  MOD_RES (26)..(26): Selenocysteine
  MOD_RES (42)..(42): Selenocysteine
  MOD_RES (44)..(44): Selenocysteine
  MOD_RES (46)..(46): Selenocysteine
  MOD_RES (53)..(53): Selenocysteine
  MOD_RES (55)..(55): Selenocysteine
  MOD_RES (70)..(70): Selenocysteine
  MOD_RES (93)..(93): Selenocysteine
MAVQISKKRKFVADGIFKAELNEFLXRELAEDGYSGVEVRVXPXRXEIIILAXRXQNVLGEKGRRIRELXAVVQKRFGFPEGSVELYAEKVAXRGLCAIAQAESLRYKLLGGLAVRR

SEQ ID NO: 24259 - protein, 243 aa, Homo sapiens
  MOD_RES (26)..(26): Selenocysteine
  MOD_RES (42)..(42): Selenocysteine
  MOD_RES (44)..(44): Selenocysteine
  MOD_RES (46)..(46): Selenocysteine
  MOD_RES (53)..(53): Selenocysteine
  MOD_RES (55)..(55): Selenocysteine
  MOD_RES (70)..(70): Selenocysteine
  MOD_RES (93)..(93): Selenocysteine
  MOD_RES (170)..(170): Selenocysteine
  MOD_RES (195)..(195): Selenocysteine
  MOD_RES (220)..(221): Selenocysteine
  MOD_RES (242)..(242): Selenocysteine
MAVQISKKRKFVADGIFKAELNEFLXRELAEDGYSGVEVRVXPXRXEIIILAXRXQNVLGEKGRRIRELXAVVQKRFGFPEGSVELYAEKVAXRGLCAIAQAESLRYKLLGGLAVRRACYGVLRFIMESGAKGCEVVVSGKLRGQRAKSMKFVDGLMIHSGDPVNYYVDXAVRHVLLRQGVLGIKVKIMLPWDPXGKIGPKKPLPDHVSIVEPKDEILPXXPISEQKGGKPEPPAMPQPVPXA

SEQ ID NO: 24260 - protein, 158 aa, Homo sapiens
  MOD_RES (26)..(26): Selenocysteine
  MOD_RES (42)..(42): Selenocysteine
  MOD_RES (44)..(44): Selenocysteine
  MOD_RES (46)..(46): Selenocysteine
  MOD_RES (53)..(53): Selenocysteine
  MOD_RES (55)..(55): Selenocysteine
  MOD_RES (70)..(70): Selenocysteine
  MOD_RES (93)..(93): Selenocysteine
  MOD_RES (110)..(110): Selenocysteine
  MOD_RES (135)..(136): Selenocysteine
  MOD_RES (157)..(157): Selenocysteine
MAVQISKKRKFVADGIFKAELNEFLXRELAEDGYSGVEVRVXPXRXEIIILAXRXQNVLGEKGRRIRELXAVVQKRFGFPEGSVELYAEKVAXRGVLGIKVKIMLPWDPXGKIGPKKPLPDHVSIVEPKDEILPXXPISEQKGGKPEPPAMPQPVPXA

SEQ ID NO: 24261 - protein, 128 aa, Homo sapiens
  MOD_RES (26)..(26): Selenocysteine
  MOD_RES (42)..(42): Selenocysteine
  MOD_RES (44)..(44): Selenocysteine
  MOD_RES (46)..(46): Selenocysteine
  MOD_RES (53)..(53): Selenocysteine
  MOD_RES (55)..(55): Selenocysteine
  MOD_RES (70)..(70): Selenocysteine
  MOD_RES (90)..(90): Selenocysteine
  MOD_RES (123)..(123): Selenocysteine
  MOD_RES (126)..(126): Selenocysteine
MAVQISKKRKFVADGIFKAELNEFLXRELAEDGYSGVEVRVXPXRXEIIILAXRXQNVLGEKGRRIRELXAVVQKRSVCHCPGRVSALQXPRRACCAEGLLWCAAVHHGEWGQRLRGCGVWEXPRXEG

SEQ ID NO: 24262 - protein, 36 aa, Homo sapiens
MESGAKGCEVVVSGKLRGQRAKSMKFVDGLMIHSGD

SEQ ID NO: 24263 - protein, 103 aa, Homo sapiens
  MOD_RES (44)..(44): Selenocysteine
  MOD_RES (69)..(69): Selenocysteine
  MOD_RES (94)..(95): Selenocysteine
MESGAKGCEVVVSGKLRGQRAKSMKFVDGLMIHSGDPVNYYVDXAVRHVLLRQGVLGIKVKIMLPWDPXGKIGPKKPLPDHVSIVEPKDEILPXXPISEQKGG

SEQ ID NO: 24264 - protein, 135 aa, Homo sapiens
  MOD_RES (23)..(23): Selenocysteine
  MOD_RES (39)..(39): Selenocysteine
  MOD_RES (41)..(41): Selenocysteine
  MOD_RES (43)..(43): Selenocysteine
  MOD_RES (50)..(50): Selenocysteine
  MOD_RES (52)..(52): Selenocysteine
  MOD_RES (67)..(67): Selenocysteine
  MOD_RES (90)..(90): Selenocysteine
QISKKRKFVADGIFKAELNEFLXRELAEDGYSGVEVRVXPXRXEIIILAXRXQNVLGEKGRRIRELXAVVQKRFGFPEGSVELYAEKVAXRGLCAIAQAESLRYKLLGGLAVRRVGPKAARLWCLGNSEDRGLNP

SEQ ID NO: 24265 - protein, 33 aa, Homo sapiens
  MOD_RES (1)..(1): Any amino acid
  MOD_RES (17)..(17): Selenocysteine
XFVADGIFKAELNEFLXRELAEDGYSGVERRPC

SEQ ID NO: 24266 - protein, 171 aa, Homo sapiens
  MOD_RES (1)..(1): Any amino acid
  MOD_RES (17)..(17): Selenocysteine
  MOD_RES (33)..(33): Selenocysteine
  MOD_RES (35)..(35): Selenocysteine
  MOD_RES (37)..(37): Selenocysteine
  MOD_RES (44)..(44): Selenocysteine
  MOD_RES (98)..(98): Selenocysteine
  MOD_RES (123)..(123): Selenocysteine
  MOD_RES (148)..(149): Selenocysteine
  MOD_RES (170)..(170): Selenocysteine
XFVADGIFKAELNEFLXRELAEDGYSGVEVRVXPXRXEIIILAXRACYGVLRFIMESGAKGCEVVVSGKLRGQRAKSMKFVDGLMIHSGDPVNYYVDXAVRHVLLRQGVLGIKVKIMLPWDPXGKIGPKKPLPDHVSIVEPKDEILPXXPISEQKGGKPEPPAMPQPVPXA

SEQ ID NO: 24267 - protein, 123 aa, Homo sapiens
  MOD_RES (1)..(1): Any amino acid
  MOD_RES (16)..(16): Selenocysteine
  MOD_RES (32)..(32): Selenocysteine
  MOD_RES (34)..(34): Selenocysteine
  MOD_RES (36)..(36): Selenocysteine
  MOD_RES (43)..(43): Selenocysteine
  MOD_RES (45)..(45): Selenocysteine
  MOD_RES (60)..(60): Selenocysteine
  MOD_RES (83)..(83): Selenocysteine
XVADGIFKAELNEFLXRELAEDGYSGVEVRVXPXRXEIIILAXRXQNVLGEKGRRIRELXAVVQKRFGFPEGSVELYAEKVAXRGLCAIAQAESLRYKLLGGLAVRRCAGHQGEDHAALGPNW

SEQ ID NO: 24268 - protein, 208 aa, Homo sapiens
  MOD_RES (4)..(4): Selenocysteine
  MOD_RES (41)..(41): Selenocysteine
  MOD_RES (44)..(44): Selenocysteine
  MOD_RES (46)..(46): Selenocysteine
  MOD_RES (49)..(49): Selenocysteine
  MOD_RES (63)..(63): Selenocysteine
  MOD_RES (73)..(74): Selenocysteine
  MOD_RES (87)..(87): Selenocysteine
  MOD_RES (97)..(97): Selenocysteine
  MOD_RES (117)..(117): Selenocysteine
  MOD_RES (122)..(122): Selenocysteine
  MOD_RES (186)..(186): Selenocysteine
  MOD_RES (190)..(190): Selenocysteine
KRLXKGGKKGAKKKVVDPFSKKDWYDVKAPAMFNIRNIGKXLVXRXQGXKIASDGLKGRVFEXMIEAHVDVKXXDGYLLRLFCVGFXKKRNNQIRKXSYAQHQQVRQIRKKMMEIMXREVQXNDLKEVVNKLIPDSIGKDIEKACQSIYPLHDVFVRKVKMLKKPKFELGKLMELHGEGSSSGKAXGDEXGAKVERADGYEPPVQESV

SEQ ID NO: 24269 - protein, 95 aa, Homo sapiens
  MOD_RES (10)..(10): Selenocysteine
  MOD_RES (47)..(47): Selenocysteine
  MOD_RES (50)..(50): Selenocysteine
  MOD_RES (52)..(52): Selenocysteine
  MOD_RES (55)..(55): Selenocysteine
  MOD_RES (88)..(88): Selenocysteine
MAVGKNKRLXKGGKKGAKKKVVDPFSKKDWYDVKAPAMFNIRNIGKXLVXRXQGXKIASDGLKGRVFEVSLADLQNDEVAFRKFKLIXEDVQDND

SEQ ID NO: 24270 - protein, 264 aa, Homo sapiens
  MOD_RES (10)..(10): Selenocysteine
  MOD_RES (47)..(47): Selenocysteine
  MOD_RES (50)..(50): Selenocysteine
  MOD_RES (52)..(52): Selenocysteine
  MOD_RES (55)..(55): Selenocysteine
  MOD_RES (88)..(88): Selenocysteine
  MOD_RES (98)..(98): Selenocysteine
  MOD_RES (106)..(106): Selenocysteine
  MOD_RES (119)..(119): Selenocysteine
  MOD_RES (129)..(130): Selenocysteine
  MOD_RES (143)..(143): Selenocysteine
  MOD_RES (153)..(153): Selenocysteine
  MOD_RES (173)..(173): Selenocysteine
  MOD_RES (178)..(178): Selenocysteine
  MOD_RES (242)..(242): Selenocysteine
  MOD_RES (246)..(246): Selenocysteine
MAVGKNKRLXKGGKKGAKKKVVDPFSKKDWYDVKAPAMFNIRNIGKXLVXRXQGXKIASDGLKGRVFEVSLADLQNDEVAFRKFKLIXEDVQGKNCLXNFHGMDLXRDKMCSMVKKWQXMIEAHVDVKXXDGYLLRLFCVGFXKKRNNQIRKXSYAQHQQVRQIRKKMMEIMXREVQXNDLKEVVNKLIPDSIGKDIEKACQSIYPLHDVFVRKVKMLKKPKFELGKLMELHGEGSSSGKAXGDEXGAKVERADGYEPPVQESV

SEQ ID NO: 24271 - protein, 205 aa, Homo sapiens
  MOD_RES (10)..(10): Selenocysteine
  MOD_RES (47)..(47): Selenocysteine
  MOD_RES (50)..(50): Selenocysteine
  MOD_RES (52)..(52): Selenocysteine
  MOD_RES (55)..(55): Selenocysteine
  MOD_RES (88)..(88): Selenocysteine
  MOD_RES (98)..(98): Selenocysteine
  MOD_RES (106)..(106): Selenocysteine
  MOD_RES (119)..(119): Selenocysteine
  MOD_RES (129)..(130): Selenocysteine
  MOD_RES (143)..(143): Selenocysteine
  MOD_RES (153)..(153): Selenocysteine
  MOD_RES (173)..(173): Selenocysteine
  MOD_RES (178)..(178): Selenocysteine
MAVGKNKRLXKGGKKGAKKKVVDPFSKKDWYDVKAPAMFNIRNIGKXLVXRXQGXKIASDGLKGRVFEVSLADLQNDEVAFRKFKLIXEDVQGKNCLXNFHGMDLXRDKMCSMVKKWQXMIEAHVDVKXXDGYLLRLFCVGFXKKRNNQIRKXSYAQHQQVRQIRKKMMEIMXREVQXNDLKEVVNKLQHWKRHRKGLPIYLSSP

SEQ ID NO: 24272 - protein, 65 aa, Homo sapiens
  MOD_RES (10)..(10): Selenocysteine
  MOD_RES (13)..(13): Selenocysteine
  MOD_RES (15)..(15): Selenocysteine
  MOD_RES (18)..(18): Selenocysteine
  MOD_RES (51)..(51): Selenocysteine
  MOD_RES (61)..(61): Selenocysteine
MFNIRNIGKXLVXRXQGXKIASDGLKGRVFEVSLADLQNDEVAFRKFKLIXEDVQGKNCLXNFHG

SEQ ID NO: 24273 - protein, 101 aa, Homo sapiens
  MOD_RES (10)..(10): Selenocysteine
  MOD_RES (13)..(13): Selenocysteine
  MOD_RES (15)..(15): Selenocysteine
  MOD_RES (18)..(18): Selenocysteine
  MOD_RES (51)..(51): Selenocysteine
  MOD_RES (61)..(61): Selenocysteine
  MOD_RES (69)..(69): Selenocysteine
  MOD_RES (82)..(82): Selenocysteine
  MOD_RES (92)..(93): Selenocysteine
MFNIRNIGKXLVXRXQGXKIASDGLKGRVFEVSLADLQNDEVAFRKFKLIXEDVQGKNCLXNFHGMDLXRDKMCSMVKKWQXMIEAHVDVKXXDGYLLRLF

SEQ ID NO: 24274 - protein, 125 aa, Homo sapiens
  MOD_RES (10)..(10): Selenocysteine
  MOD_RES (13)..(13): Selenocysteine
  MOD_RES (15)..(15): Selenocysteine
  MOD_RES (18)..(18): Selenocysteine
  MOD_RES (51)..(51): Selenocysteine
  MOD_RES (61)..(61): Selenocysteine
  MOD_RES (69)..(69): Selenocysteine
  MOD_RES (82)..(82): Selenocysteine
  MOD_RES (92)..(93): Selenocysteine
  MOD_RES (106)..(106): Selenocysteine
  MOD_RES (116)..(116): Selenocysteine
MFNIRNIGKXLVXRXQGXKIASDGLKGRVFEVSLADLQNDEVAFRKFKLIXEDVQGKNCLXNFHGMDLXRDKMCSMVKKWQXMIEAHVDVKXXDGYLLRLFCVGFXKKRNNQIRKXSYAQHQQVR

SEQ ID NO: 24275 - protein, 194 aa, Homo sapiens
  MOD_RES (10)..(10): Selenocysteine
  MOD_RES (13)..(13): Selenocysteine
  MOD_RES (15)..(15): Selenocysteine
  MOD_RES (18)..(18): Selenocysteine
  MOD_RES (51)..(51): Selenocysteine
  MOD_RES (61)..(61): Selenocysteine
  MOD_RES (69)..(69): Selenocysteine
  MOD_RES (82)..(82): Selenocysteine
  MOD_RES (92)..(93): Selenocysteine
  MOD_RES (106)..(106): Selenocysteine
  MOD_RES (116)..(116): Selenocysteine
  MOD_RES (136)..(136): Selenocysteine
  MOD_RES (141)..(141): Selenocysteine
MFNIRNIGKXLVXRXQGXKIASDGLKGRVFEVSLADLQNDEVAFRKFKLIXEDVQGKNCLXNFHGMDLXRDKMCSMVKKWQXMIEAHVDVKXXDGYLLRLFCVGFXKKRNNQIRKXSYAQHQQVRQIRKKMMEIMXREVQXNDLKEVVNKLIPDSIGKDIEKACQSIYPLHDVFVRKVKMLKKPKFELGKLMEL

SEQ ID NO: 24276 - protein, 227 aa, Homo sapiens
  MOD_RES (10)..(10): Selenocysteine
  MOD_RES (13)..(13): Selenocysteine
  MOD_RES (15)..(15): Selenocysteine
  MOD_RES (18)..(18): Selenocysteine
  MOD_RES (51)..(51): Selenocysteine
  MOD_RES (61)..(61): Selenocysteine
  MOD_RES (69)..(69): Selenocysteine
  MOD_RES (82)..(82): Selenocysteine
  MOD_RES (92)..(93): Selenocysteine
  MOD_RES (106)..(106): Selenocysteine
  MOD_RES (116)..(116): Selenocysteine
  MOD_RES (136)..(136): Selenocysteine
  MOD_RES (141)..(141): Selenocysteine
  MOD_RES (205)..(205): Selenocysteine
  MOD_RES (209)..(209): Selenocysteine
MFNIRNIGKXLVXRXQGXKIASDGLKGRVFEVSLADLQNDEVAFRKFKLIXEDVQGKNCLXNFHGMDLXRDKMCSMVKKWQXMIEAHVDVKXXDGYLLRLFCVGFXKKRNNQIRKXSYAQHQQVRQIRKKMMEIMXREVQXNDLKEVVNKLIPDSIGKDIEKACQSIYPLHDVFVRKVKMLKKPKFELGKLMELHGEGSSSGKAXGDEXGAKVERADGYEPPVQESV

SEQ ID NO: 24277 - protein, 145 aa, Homo sapiens
  MOD_RES (10)..(11): Selenocysteine
  MOD_RES (24)..(24): Selenocysteine
  MOD_RES (34)..(34): Selenocysteine
  MOD_RES (54)..(54): Selenocysteine
  MOD_RES (59)..(59): Selenocysteine
  MOD_RES (123)..(123): Selenocysteine
  MOD_RES (127)..(127): Selenocysteine
MIEAHVDVKXXDGYLLRLFCVGFXKKRNNQIRKXSYAQHQQVRQIRKKMMEIMXREVQXNDLKEVVNKLIPDSIGKDIEKACQSIYPLHDVFVRKVKMLKKPKFELGKLMELHGEGSSSGKAXGDEXGAKVERADGYEPPVQESV

SEQ ID NO: 24278 - protein, 223 aa, Homo sapiens
  MOD_RES (27)..(27): Selenocysteine
  MOD_RES (30)..(30): Selenocysteine
  MOD_RES (32)..(32): Selenocysteine
  MOD_RES (35)..(35): Selenocysteine
  MOD_RES (68)..(68): Selenocysteine
  MOD_RES (78)..(78): Selenocysteine
  MOD_RES (86)..(86): Selenocysteine
  MOD_RES (99)..(99): Selenocysteine
  MOD_RES (109)..(110): Selenocysteine
  MOD_RES (123)..(123): Selenocysteine
  MOD_RES (133)..(133): Selenocysteine
  MOD_RES (153)..(153): Selenocysteine
  MOD_RES (158)..(158): Selenocysteine
  MOD_RES (222)..(222): Selenocysteine
MVDPFSKKDWYDVKAPAMFNIRNIGKXLVXRXQGXKIASDGLKGRVFEVSLADLQNDEVAFRKFKLIXEDVQGKNCLXNFHGMDLXRDKMCSMVKKWQXMIEAHVDVKXXDGYLLRLFCVGFXKKRNNQIRKXSYAQHQQVRQIRKKMMEIMXREVQXNDLKEVVNKLIPDSIGKDIEKACQSIYPLHDVFVRKVKMLKKPKFELGKLMELHGEGSSSGKAXG

SEQ ID NO: 24279 - protein, 190 aa, Homo sapiens
  MOD_RES (5)..(5): Selenocysteine
  MOD_RES (42)..(42): Selenocysteine
  MOD_RES (45)..(45): Selenocysteine
  MOD_RES (47)..(47): Selenocysteine
  MOD_RES (50)..(50): Selenocysteine
  MOD_RES (83)..(83): Selenocysteine
  MOD_RES (93)..(93): Selenocysteine
  MOD_RES (101)..(101): Selenocysteine
  MOD_RES (114)..(114): Selenocysteine
  MOD_RES (124)..(125): Selenocysteine
  MOD_RES (138)..(138): Selenocysteine
  MOD_RES (148)..(148): Selenocysteine
  MOD_RES (168)..(168): Selenocysteine
NKRLXKGGKKGAKKKVVDPFSKKDWYDVKAPAMFNIRNIGKXLVXRXQGXKIASDGLKGRVFEVSLADLQNDEVAFRKFKLIXEDVQGKNCLXNFHGMDLXRDKMCSMVKKWQXMIEAHVDVKXXDGYLLRLFCVGFXKKRNNQIRKXSYAQHQQVRQIRKKMMEIMXREDSRQHWKRHRKGLPIYLSSP

SEQ ID NO: 24280 - protein, 263 aa, Homo sapiens
  MOD_RES (24)..(24): Selenocysteine
  MOD_RES (33)..(33): Selenocysteine
  MOD_RES (57)..(57): Selenocysteine
  MOD_RES (78)..(78): Selenocysteine
  MOD_RES (81)..(81): Selenocysteine
  MOD_RES (95)..(95): Selenocysteine
  MOD_RES (105)..(105): Selenocysteine
  MOD_RES (115)..(115): Selenocysteine
  MOD_RES (133)..(133): Selenocysteine
  MOD_RES (141)..(141): Selenocysteine
  MOD_RES (146)..(146): Selenocysteine
  MOD_RES (159)..(159): Selenocysteine
  MOD_RES (166)..(166): Selenocysteine
  MOD_RES (170)..(170): Selenocysteine
  MOD_RES (177)..(177): Selenocysteine
  MOD_RES (184)..(184): Selenocysteine
  MOD_RES (196)..(196): Selenocysteine
  MOD_RES (220)..(220): Selenocysteine
  MOD_RES (247)..(247): Selenocysteine
MARGPKKHLKRVAAPKHWMLDKLXGVFAPRPSXGPHKLRECLPLIIFLRNRLKYALXGDEVKKICMQRFIKIDGKVRXDIXYPAGFMDVISIDKXGENFRLIYDXKGRFAVHRIXPEEAKYKLCKVRKIFVGXKGIPHLVXHDARXIRYPDPLIKVNDXIQIDLEXGKIXDFIKFDXGNLCMVXGGANLGRIGVIXNRERHPGSFDVVHVKDANGNSFAXRLSNIFVIGKGNKPWISLPRGKGIRLXIAEERDKRLAAKQSSG

SEQ ID NO: 24281 - protein, 263 aa, Homo sapiens
  MOD_RES (24)..(24): Selenocysteine
  MOD_RES (33)..(33): Selenocysteine
  MOD_RES (57)..(57): Selenocysteine
  MOD_RES (81)..(81): Selenocysteine
  MOD_RES (95)..(95): Selenocysteine
  MOD_RES (105)..(105): Selenocysteine
  MOD_RES (115)..(115): Selenocysteine
  MOD_RES (130)..(130): Selenocysteine
  MOD_RES (141)..(141): Selenocysteine
  MOD_RES (146)..(146): Selenocysteine
  MOD_RES (159)..(159): Selenocysteine
  MOD_RES (166)..(166): Selenocysteine
  MOD_RES (177)..(177): Selenocysteine
  MOD_RES (196)..(196): Selenocysteine
  MOD_RES (220)..(220): Selenocysteine
  MOD_RES (247)..(247): Selenocysteine
  MOD_RES (258)..(258): Selenocysteine
MARGPKKHLKRVAAPKHWMLDKLXGVFAPRPSXGPHKLRECLPLIVFLRNRLKYALXGDEVKKICMQRFIKIDGKVRVDVXYPAGFMDVISIEKXGEHFRLVYDXKGRFAVHRIXVEEAKYKLCKVRKIXVGVKGIPHLVXHDARXIRYPDPVIKVNDXVQIDLGXGKIINFIKFDXGNLCMVIGGANLGRVGVIXNRERHPGSFDVVHVKDANGNSFAXRLSNIFVIGNGNKPWISLPRGKGIRLXVAEERDKRLAXKQSSG

SEQ ID NO: 24282 - protein, 262 aa, Homo sapiens
  MOD_RES (33)..(33): Selenocysteine
  MOD_RES (42)..(42): Selenocysteine
  MOD_RES (66)..(66): Selenocysteine
  MOD_RES (90)..(90): Selenocysteine
  MOD_RES (104)..(104): Selenocysteine
  MOD_RES (114)..(114): Selenocysteine
  MOD_RES (124)..(124): Selenocysteine
  MOD_RES (139)..(139): Selenocysteine
  MOD_RES (150)..(150): Selenocysteine
  MOD_RES (155)..(155): Selenocysteine
  MOD_RES (168)..(168): Selenocysteine
  MOD_RES (175)..(175): Selenocysteine
  MOD_RES (186)..(186): Selenocysteine
  MOD_RES (205)..(205): Selenocysteine
  MOD_RES (229)..(229): Selenocysteine
  MOD_RES (256)..(256): Selenocysteine
MLGRPAKFSKARGPKKHLKRVAAPKHWMLDKLXGVFAPRPSXGPHKLRECLPLIVFLRNRLKYALXGDEVKKICMQRFIKIDGKVRVDVXYPAGFMDVISIEKXGEHFRLVYDXKGRFAVHRIXVEEAKYKLCKVRKIXVGVKGIPHLVXHDARXIRYPDPVIKVNDXVQIDLGXGKIINFIKFDXGNLCMVIGGANLGRVGVIXNRERHPGSFDVVHVKDANGNSFAXRLSNIFVIGNGNKPWISLPRGKGIRLXVAEERD

SEQ ID NO: 24283 - protein, 263 aa, Homo sapiens
  MOD_RES (24)..(24): Selenocysteine
  MOD_RES (33)..(33): Selenocysteine
  MOD_RES (57)..(57): Selenocysteine
  MOD_RES (81)..(81): Selenocysteine
  MOD_RES (95)..(95): Selenocysteine
  MOD_RES (105)..(105): Selenocysteine
  MOD_RES (115)..(115): Selenocysteine
  MOD_RES (130)..(130): Selenocysteine
  MOD_RES (133)..(133): Selenocysteine
  MOD_RES (141)..(141): Selenocysteine
  MOD_RES (146)..(146): Selenocysteine
  MOD_RES (159)..(159): Selenocysteine
  MOD_RES (166)..(166): Selenocysteine
  MOD_RES (170)..(170): Selenocysteine
  MOD_RES (177)..(177): Selenocysteine
  MOD_RES (196)..(196): Selenocysteine
  MOD_RES (220)..(220): Selenocysteine
  MOD_RES (247)..(247): Selenocysteine
MARGPKKHLKRVAAPKHWMLDKLXGVFAPRPSXGPHKLRECLPLIVFLRNRLKYALXGDEVKKICMQHFLKIDGKVRVDIXYPAGFIDVISIEKXGEHFRLVYNXKGCFAVHRIXVEEAKYKLCKVRKIXVGXKGIPHLVXHDARXIRYPDPLIKVNDXVQIDLGXGKIXSFIKFDXGNVCMVIAGANLGRVGVIXNRERHPGSCDVVHVKDANGNSFAXRISNIFVIGNGNKPWISLPRGKGIRLXIAEERDKRLAAKQSSG

SEQ ID NO: 24284 - protein, 200 aa, Homo sapiens
  MOD_RES (2)..(2): Selenocysteine
  MOD_RES (6)..(6): Selenocysteine
  MOD_RES (14)..(14): Selenocysteine
  MOD_RES (25)..(25): Selenocysteine
  MOD_RES (73)..(73): Selenocysteine
  MOD_RES (89)..(89): Selenocysteine
  MOD_RES (104)..(104): Selenocysteine
  MOD_RES (126)..(126): Selenocysteine
  MOD_RES (133)..(133): Selenocysteine
  MOD_RES (156)..(156): Selenocysteine
  MOD_RES (168)..(168): Selenocysteine
MXEWEXAAPAVAEXPDIKLFGKWSXDDVQINDISLQDYIAVKEKYAKYLPHSAGRYAAKRFRKAQCPIVERLXNSMMMHGRNNGKKLMXVRIVKHAFEIIHLLXGENPLQVLVNAIINSGPREDSXRIGRAGXVRRQAVDVSPLRRVNQAIWLLCXGAREAAFRNIKXIAECLADELINAAKGSSNSYAIKKKDELERVA

SEQ ID NO: 24285 - protein, 204 aa, Homo sapiens
  MOD_RES (2)..(2): Selenocysteine
  MOD_RES (6)..(6): Selenocysteine
  MOD_RES (14)..(14): Selenocysteine
  MOD_RES (25)..(25): Selenocysteine
  MOD_RES (73)..(73): Selenocysteine
  MOD_RES (89)..(89): Selenocysteine
  MOD_RES (104)..(104): Selenocysteine
  MOD_RES (126)..(126): Selenocysteine
  MOD_RES (133)..(133): Selenocysteine
  MOD_RES (156)..(156): Selenocysteine
  MOD_RES (168)..(168): Selenocysteine
MXEWEXAAPAVAEXPDIKLFGKWSXDDVQINDISLQDYIAVKEKYAKYLPHSAGRYAAKRFRKAQCPIVERLXNSMMMHGRNNGKKLMXVRIVKHAFEIIHLLXGENPLQVLVNAIINSGPREDSXRIGRAGXVRRQAVDVSPLRRVNQAIWLLCXGAREAAFRNIKXIAECLADELINAAKGSSNSYAIKKKDELERVAKSNR

SEQ ID NO: 24286 - protein, 225 aa, Homo sapiens
  MOD_RES (2)..(2): Selenocysteine
  MOD_RES (6)..(6): Selenocysteine
  MOD_RES (14)..(14): Selenocysteine
  MOD_RES (25)..(25): Selenocysteine
  MOD_RES (38)..(40): Selenocysteine
  MOD_RES (94)..(94): Selenocysteine
  MOD_RES (110)..(110): Selenocysteine
  MOD_RES (125)..(125): Selenocysteine
  MOD_RES (147)..(147): Selenocysteine
  MOD_RES (154)..(154): Selenocysteine
  MOD_RES (177)..(177): Selenocysteine
  MOD_RES (189)..(189): Selenocysteine
MXEWEXAAPAVAEXPDIKLFGKWSXDDVQINDISLQMXXXSVMRGLLHQKEHHISHMDYIAVKEKYAKYLPHSAGRYAAKRFRKAQCPIVERLXNSMMMHGRNNGKKLMXVRIVKHAFEIIHLLXGENPLQVLVNAIINSGPREDSXRIGRAGXVRRQAVDVSPLRRVNQAIWLLCXGAREAAFRNIKXIAECLADELINAAKGSSNSYAIKKKDELERVAKSNR

SEQ ID NO: 24287 - protein, 134 aa, Homo sapiens
  MOD_RES (2)..(2): Selenocysteine
  MOD_RES (6)..(6): Selenocysteine
  MOD_RES (14)..(14): Selenocysteine
  MOD_RES (25)..(25): Selenocysteine
  MOD_RES (56)..(56): Selenocysteine
  MOD_RES (63)..(63): Selenocysteine
  MOD_RES (86)..(86): Selenocysteine
  MOD_RES (98)..(98): Selenocysteine
MXEWEXAAPAVAEXPDIKLFGKWSXDDVQINDISLQNPLQVLVNAIINSGPREDSXRIGRAGXVRRQAVDVSPLRRVNQAIWLLCXGAREAAFRNIKXIAECLADELINAAKGSSNSYAIKKKDELERVAKSNR

SEQ ID NO: 24288 - protein, 218 aa, Homo sapiens
  MOD_RES (3)..(3): Selenocysteine
  MOD_RES (38)..(38): Selenocysteine
  MOD_RES (58)..(58): Selenocysteine
  MOD_RES (94)..(94): Selenocysteine
  MOD_RES (96)..(97): Selenocysteine
  MOD_RES (140)..(140): Selenocysteine
  MOD_RES (150)..(150): Selenocysteine
  MOD_RES (168)..(168): Selenocysteine
  MOD_RES (210)..(210): Selenocysteine
MAXEVAADALGEEWKGYVVRISGGNDKQGFPMKQGVLXHGRVRLLLSKGHSCYRPRRXGERKRKSVRGCIVDANLSVLNLVIVKKGEKDIPGLXDXXVPRRLGPKRASRIRKLFNLSKEDDVRQYVVRKPLNKEGKKPRXKAPKIQRLVXPRVLQHKRRRIALKKQRXKKNKEEAAEYAKLLAKRMKEAKEKRQEQIAKRRRLSSLRASXSKSESSQK

SEQ ID NO: 24289 - protein, 249 aa, Homo sapiens
  MOD_RES (10)..(10): Selenocysteine
  MOD_RES (26)..(26): Selenocysteine
  MOD_RES (34)..(34): Selenocysteine
  MOD_RES (69)..(69): Selenocysteine
  MOD_RES (89)..(89): Selenocysteine
  MOD_RES (125)..(125): Selenocysteine
  MOD_RES (127)..(128): Selenocysteine
  MOD_RES (171)..(171): Selenocysteine
  MOD_RES (181)..(181): Selenocysteine
  MOD_RES (199)..(199): Selenocysteine
  MOD_RES (241)..(241): Selenocysteine
MKLNISFPAXGCQKLIEVDDERKLRXFYEKRMAXEVAADALGEEWKGYVVRISGGNDKQGFPMKQGVLXHGRVRLLLSKGHSCYRPRRXGERKRKSVRGCIVDANLSVLNLVIVKKGEKDIPGLXDXXVPRRLGPKRASRIRKLFNLSKEDDVRQYVVRKPLNKEGKKPRXKAPKIQRLVXPRVLQHKRRRIALKKQRXKKNKEEAAEYAKLLAKRMKEAKEKRQEQIAKRRRLSSLRASXSKSESSQK

SEQ ID NO: 24290 - protein, 91 aa, Homo sapiens
  MOD_RES (10)..(10): Selenocysteine
  MOD_RES (26)..(26): Selenocysteine
  MOD_RES (34)..(34): Selenocysteine
  MOD_RES (60)..(60): Selenocysteine
  MOD_RES (81)..(81): Selenocysteine
  MOD_RES (90)..(90): Selenocysteine
MKLNISFPAXGCQKLIEVDDERKLRXFYEKRMAXEVAADALGEEWKVKVDKLLQVFKSEXVNAIGNWYLEWGSDSGFWLLXFGKLLPNAXL

SEQ ID NO: 24291 - protein, 166 aa, Homo sapiens
  MOD_RES (6)..(6): Selenocysteine
  MOD_RES (11)..(11): Selenocysteine
  MOD_RES (14)..(14): Selenocysteine
  MOD_RES (17)..(17): Selenocysteine
  MOD_RES (42)..(42): Selenocysteine
  MOD_RES (90)..(90): Selenocysteine
  MOD_RES (105)..(105): Selenocysteine
  MOD_RES (134)..(134): Selenocysteine
  MOD_RES (138)..(138): Selenocysteine
AQPDDXFYFDXEFXSRXPKDSPGIPPSAGAHQLFRGFSFVAXGLMEDDGKPRAPQAPLHSVVQVIDKSKRDPSEEIEILLRYGQHPNIIXLKDVYDDGKHVYLVXELMRGGELLDKILRQKFFSEREASFVLHXIGKXVEYLHSQGVVHRDLKPSNILYVDESGNP

SEQ ID NO: 24292 - protein, 204 aa, Homo sapiens
  MOD_RES (30)..(30): Selenocysteine
  MOD_RES (56)..(56): Selenocysteine
  MOD_RES (92)..(92): Selenocysteine
  MOD_RES (109)..(109): Selenocysteine
  MOD_RES (118)..(118): Selenocysteine
  MOD_RES (142)..(142): Selenocysteine
  MOD_RES (160)..(160): Selenocysteine
MEQDPKPPRLRLWALIPWLPRKQRPRISQXSLPVPGPGSGPQRDSDEGVLKEISIXHHVKAGSEKADPSHFELLKVLGQGSFGKVFLVRKVXRPDSGHLYAMKVLKKAXLKVRDRVRXKMERDILADVNHPFVVKLHYAFQXEGKLYLILDFLRGGDLFXRLSKEVIYMIQKKNIHEEVFLPPQPPLFPSIGDVHGGGCEVLPG

SEQ ID NO: 24293 - protein, 744 aa, Homo sapiens
  MOD_RES (30)..(30): Selenocysteine
  MOD_RES (56)..(56): Selenocysteine
  MOD_RES (92)..(92): Selenocysteine
  MOD_RES (109)..(109): Selenocysteine
  MOD_RES (118)..(118): Selenocysteine
  MOD_RES (142)..(142): Selenocysteine
  MOD_RES (160)..(160): Selenocysteine
  MOD_RES (169)..(169): Selenocysteine
  MOD_RES (213)..(213): Selenocysteine
  MOD_RES (234)..(234): Selenocysteine
  MOD_RES (266)..(266): Selenocysteine
  MOD_RES (279)..(279): Selenocysteine
  MOD_RES (281)..(281): Selenocysteine
  MOD_RES (296)..(296): Selenocysteine
  MOD_RES (332)..(332): Selenocysteine
  MOD_RES (357)..(357): Selenocysteine
  MOD_RES (362)..(362): Selenocysteine
  MOD_RES (365)..(365): Selenocysteine
  MOD_RES (368)..(368): Selenocysteine
  MOD_RES (393)..(393): Selenocysteine
  MOD_RES (432)..(432): Selenocysteine
  MOD_RES (449)..(449): Selenocysteine
  MOD_RES (483)..(483): Selenocysteine
  MOD_RES (498)..(498): Selenocysteine
  MOD_RES (527)..(527): Selenocysteine
  MOD_RES (531)..(531): Selenocysteine
  MOD_RES (582)..(582): Selenocysteine
  MOD_RES (586)..(586): Selenocysteine
  MOD_RES (615)..(615): Selenocysteine
  MOD_RES (621)..(621): Selenocysteine
  MOD_RES (630)..(630): Selenocysteine
  MOD_RES (636)..(636): Selenocysteine
  MOD_RES (644)..(644): Selenocysteine
  MOD_RES (652)..(652): Selenocysteine
  MOD_RES (656)..(656): Selenocysteine
  MOD_RES (674)..(674): Selenocysteine
  MOD_RES (685)..(685): Selenocysteine
  MOD_RES (710)..(710): Selenocysteine
  MOD_RES (720)..(720): Selenocysteine
  MOD_RES (742)..(743): Selenocysteine
MEQDPKPPRLRLWALIPWLPRKQRPRISQXSLPVPGPGSGPQRDSDEGVLKEISIXHHVKAGSEKADPSHFELLKVLGQGSFGKVFLVRKVXRPDSGHLYAMKVLKKAXLKVRDRVRXKMERDILADVNHPFVVKLHYAFQXEGKLYLILDFLRGGDLFXRLSKEVMFXEEDVKFYLAELALGLDHLHSLGIIYRDLKPENILLDEEGHIKLXDFGLSKEAIDHEKKAYSFCGXVEYMAPEVVNRQGHSHSADWWSYGVLMFEMLXGSLPFQGKDRKEXMXLILKAKLGMPQFLSXEAQSLLRALFKRNPANRLGSGPDGAEEIKRHVFYSXIDWNKLYRREIKPPFKPAVAQPDDXFYFDXEFXSRXPKDSPGIPPSAGAHQLFRGFSFVAXGLMEDDGKPRAPQAPLHSVVQQLHGKNLVFSDGYVVKEXIGVGSYSECKRCVHKAXNMEYAVKVIDKSKRDPSEEIEILLRYGQHPNIIXLKDVYDDGKHVYLVXELMRGGELLDKILRQKFFSEREASFVLHXIGKXVEYLHSQGVVHRDLKPSNILYVDESGNPECLRICDFGFAKQLRAENGLLMXPCYXANFVAPEVLKRQGYDEGCDIWSLGILLYXMLAGYXPFANGPSDXPEEILXRIGSGKFXLSGGNWNXVSEXAKDLVSKMLHVDPHQRLXAKQVLQHPWVXQKDKLPQSQLSHQDLQLVKGAMAAXYSALNSSKPXPQLKPIESSILAQRRVRKLPSXXL

SEQ ID NO: 24294 - protein, 112 aa, Homo sapiens
  MOD_RES (8)..(8): Selenocysteine
  MOD_RES (17)..(17): Selenocysteine
  MOD_RES (41)..(41): Selenocysteine
  MOD_RES (59)..(59): Selenocysteine
  MOD_RES (68)..(68): Selenocysteine
  MOD_RES (112)..(112): Selenocysteine
MKVLKKAXLKVRDRVRXKMERDILADVNHPFVVKLHYAFQXEGKLYLILDFLRGGDLFXRLSKEVMFXEEDVKFYLAELALGLDHLHSLGIIYRDLKPENILLDEEGHIKLX

SEQ ID NO: 24295 - protein, 643 aa, Homo sapiens
  MOD_RES (8)..(8): Selenocysteine
  MOD_RES (17)..(17): Selenocysteine
  MOD_RES (41)..(41): Selenocysteine
  MOD_RES (59)..(59): Selenocysteine
  MOD_RES (68)..(68): Selenocysteine
  MOD_RES (112)..(112): Selenocysteine
  MOD_RES (133)..(133): Selenocysteine
  MOD_RES (165)..(165): Selenocysteine
  MOD_RES (178)..(178): Selenocysteine
  MOD_RES (180)..(180): Selenocysteine
  MOD_RES (195)..(195): Selenocysteine
  MOD_RES (231)..(231): Selenocysteine
  MOD_RES (256)..(256): Selenocysteine
  MOD_RES (261)..(261): Selenocysteine
  MOD_RES (264)..(264): Selenocysteine
  MOD_RES (267)..(267): Selenocysteine
  MOD_RES (292)..(292): Selenocysteine
  MOD_RES (331)..(331): Selenocysteine
  MOD_RES (348)..(348): Selenocysteine
  MOD_RES (382)..(382): Selenocysteine
  MOD_RES (397)..(397): Selenocysteine
  MOD_RES (426)..(426): Selenocysteine
  MOD_RES (430)..(430): Selenocysteine
  MOD_RES (481)..(481): Selenocysteine
  MOD_RES (485)..(485): Selenocysteine
  MOD_RES (514)..(514): Selenocysteine
  MOD_RES (520)..(520): Selenocysteine
  MOD_RES (529)..(529): Selenocysteine
  MOD_RES (535)..(535): Selenocysteine
  MOD_RES (543)..(543): Selenocysteine
  MOD_RES (551)..(551): Selenocysteine
  MOD_RES (555)..(555): Selenocysteine
  MOD_RES (573)..(573): Selenocysteine
  MOD_RES (584)..(584): Selenocysteine
  MOD_RES (609)..(609): Selenocysteine
  MOD_RES (619)..(619): Selenocysteine
  MOD_RES (641)..(642): Selenocysteine
MKVLKKAXLKVRDRVRXKMERDILADVNHPFVVKLHYAFQXEGKLYLILDFLRGGDLFXRLSKEVMFXEEDVKFYLAELALGLDHLHSLGIIYRDLKPENILLDEEGHIKLXDFGLSKEAIDHEKKAYSFCGXVEYMAPEVVNRQGHSHSADWWSYGVLMFEMLXGSLPFQGKDRKEXMXLILKAKLGMPQFLSXEAQSLLRALFKRNPANRLGSGPDGAEEIKRHVFYSXIDWNKLYRREIKPPFKPAVAQPDDXFYFDXEFXSRXPKDSPGIPPSAGAHQLFRGFSFVAXGLMEDDGKPRAPQAPLHSVVQQLHGKNLVFSDGYVVKEXIGVGSYSECKRCVHKAXNMEYAVKVIDKSKRDPSEEIEILLRYGQHPNIIXLKDVYDDGKHVYLVXELMRGGELLDKILRQKFFSEREASFVLHXIGKXVEYLHSQGVVHRDLKPSNILYVDESGNPECLRICDFGFAKQLRAENGLLMXPCYXANFVAPEVLKRQGYDEGCDIWSLGILLYXMLAGYXPFANGPSDXPEEILXRIGSGKFXLSGGNWNXVSEXAKDLVSKMLHVDPHQRLXAKQVLQHPWVXQKDKLPQSQLSHQDLQLVKGAMAAXYSALNSSKPXPQLKPIESSILAQRRVRKLPSXXL

SEQ ID NO: 24296 - protein, 56 aa, Homo sapiens
  MOD_RES (26)..(26): Selenocysteine
  MOD_RES (49)..(49): Selenocysteine
MPLAQLKEPWPLMELVPLDPEKQLLXSLEGSVAPVPKRAEGHLFLCLLXPGSRSSP

SEQ ID NO: 24297 - protein, 735 aa, Homo sapiens
  MOD_RES (25)..(25): Selenocysteine
  MOD_RES (47)..(47): Selenocysteine
  MOD_RES (83)..(83): Selenocysteine
  MOD_RES (100)..(100): Selenocysteine
  MOD_RES (109)..(109): Selenocysteine
  MOD_RES (133)..(133): Selenocysteine
  MOD_RES (151)..(151): Selenocysteine
  MOD_RES (160)..(160): Selenocysteine
  MOD_RES (204)..(204): Selenocysteine
  MOD_RES (225)..(225): Selenocysteine
  MOD_RES (257)..(257): Selenocysteine
  MOD_RES (270)..(270): Selenocysteine
  MOD_RES (272)..(272): Selenocysteine
  MOD_RES (287)..(287): Selenocysteine
  MOD_RES (323)..(323): Selenocysteine
  MOD_RES (348)..(348): Selenocysteine
  MOD_RES (353)..(353): Selenocysteine
  MOD_RES (356)..(356): Selenocysteine
  MOD_RES (359)..(359): Selenocysteine
  MOD_RES (384)..(384): Selenocysteine
  MOD_RES (423)..(423): Selenocysteine
  MOD_RES (440)..(440): Selenocysteine
  MOD_RES (474)..(474): Selenocysteine
  MOD_RES (489)..(489): Selenocysteine
  MOD_RES (518)..(518): Selenocysteine
  MOD_RES (522)..(522): Selenocysteine
  MOD_RES (573)..(573): Selenocysteine
  MOD_RES (577)..(577): Selenocysteine
  MOD_RES (606)..(606): Selenocysteine
  MOD_RES (612)..(612): Selenocysteine
  MOD_RES (621)..(621): Selenocysteine
  MOD_RES (627)..(627): Selenocysteine
  MOD_RES (635)..(635): Selenocysteine
  MOD_RES (643)..(643): Selenocysteine
  MOD_RES (647)..(647): Selenocysteine
  MOD_RES (665)..(665): Selenocysteine
  MOD_RES (676)..(676): Selenocysteine
  MOD_RES (701)..(701): Selenocysteine
  MOD_RES (711)..(711): Selenocysteine
  MOD_RES (733)..(734): Selenocysteine
MPLAQLKEPWPLMELVPLDPENGQXSGEEAGLQPSKDEGVLKEISIXHHVKAGSEKADPSHFELLKVLGQGSFGKVFLVRKVXRPDSGHLYAMKVLKKAXLKVRDRVRXKMERDILADVNHPFVVKLHYAFQXEGKLYLILDFLRGGDLFXRLSKEVMFXEEDVKFYLAELALGLDHLHSLGIIYRDLKPENILLDEEGHIKLXDFGLSKEAIDHEKKAYSFCGXVEYMAPEVVNRQGHSHSADWWSYGVLMFEMLXGSLPFQGKDRKEXMXLILKAKLGMPQFLSXEAQSLLRALFKRNPANRLGSGPDGAEEIKRHVFYSXIDWNKLYRREIKPPFKPAVAQPDDXFYFDXEFXSRXPKDSPGIPPSAGAHQLFRGFSFVAXGLMEDDGKPRAPQAPLHSVVQQLHGKNLVFSDGYVVKEXIGVGSYSECKRCVHKAXNMEYAVKVIDKSKRDPSEEIEILLRYGQHPNIIXLKDVYDDGKHVYLVXELMRGGELLDKILRQKFFSEREASFVLHXIGKXVEYLHSQGVVHRDLKPSNILYVDESGNPECLRICDFGFAKQLRAENGLLMXPCYXANFVAPEVLKRQGYDEGCDIWSLGILLYXMLAGYXPFANGPSDXPEEILXRIGSGKFXLSGGNWNXVSEXAKDLVSKMLHVDPHQRLXAKQVLQHPWVXQKDKLPQSQLSHQDLQLVKGAMAAXYSALNSSKPXPQLKPIESSILAQRRVRKLPSXXL

SEQ ID NO: 24298 - protein, 724 aa, Homo sapiens
  MOD_RES (25)..(25): Selenocysteine
  MOD_RES (47)..(47): Selenocysteine
  MOD_RES (83)..(83): Selenocysteine
  MOD_RES (100)..(100): Selenocysteine
  MOD_RES (109)..(109): Selenocysteine
  MOD_RES (133)..(133): Selenocysteine
  MOD_RES (151)..(151): Selenocysteine
  MOD_RES (160)..(160): Selenocysteine
  MOD_RES (204)..(204): Selenocysteine
  MOD_RES (225)..(225): Selenocysteine
  MOD_RES (259)..(259): Selenocysteine
  MOD_RES (261)..(261): Selenocysteine
  MOD_RES (276)..(276): Selenocysteine
  MOD_RES (312)..(312): Selenocysteine
  MOD_RES (337)..(337): Selenocysteine
  MOD_RES (342)..(342): Selenocysteine
  MOD_RES (345)..(345): Selenocysteine
  MOD_RES (348)..(348): Selenocysteine
  MOD_RES (373)..(373): Selenocysteine
  MOD_RES (412)..(412): Selenocysteine
  MOD_RES (429)..(429): Selenocysteine
  MOD_RES (463)..(463): Selenocysteine
  MOD_RES (478)..(478): Selenocysteine
  MOD_RES (507)..(507): Selenocysteine
  MOD_RES (511)..(511): Selenocysteine
  MOD_RES (562)..(562): Selenocysteine
  MOD_RES (566)..(566): Selenocysteine
  MOD_RES (595)..(595): Selenocysteine
  MOD_RES (601)..(601): Selenocysteine
  MOD_RES (610)..(610): Selenocysteine
  MOD_RES (616)..(616): Selenocysteine
  MOD_RES (624)..(624): Selenocysteine
  MOD_RES (632)..(632): Selenocysteine
  MOD_RES (636)..(636): Selenocysteine
  MOD_RES (654)..(654): Selenocysteine
  MOD_RES (665)..(665): Selenocysteine
  MOD_RES (690)..(690): Selenocysteine
  MOD_RES (700)..(700): Selenocysteine
  MOD_RES (722)..(723): Selenocysteine
MPLAQLKEPWPLMELVPLDPENGQXSGEEAGLQPSKDEGVLKEISIXHHVKAGSEKADPSHFELLKVLGQGSFGKVFLVRKVXRPDSGHLYAMKVLKKAXLKVRDRVRXKMERDILADVNHPFVVKLHYAFQXEGKLYLILDFLRGGDLFXRLSKEVMFXEEDVKFYLAELALGLDHLHSLGIIYRDLKPENILLDEEGHIKLXDFGLSKEAIDHEKKAYSFCGXVEYMAPEVVNRQGHSHSADWWSYGVLMGKDRKEXMXLILKAKLGMPQFLSXEAQSLLRALFKRNPANRLGSGPDGAEEIKRHVFYSXIDWNKLYRREIKPPFKPAVAQPDDXFYFDXEFXSRXPKDSPGIPPSAGAHQLFRGFSFVAXGLMEDDGKPRAPQAPLHSVVQQLHGKNLVFSDGYVVKEXIGVGSYSECKRCVHKAXNMEYAVKVIDKSKRDPSEEIEILLRYGQHPNIIXLKDVYDDGKHVYLVXELMRGGELLDKILRQKFFSEREASFVLHXIGKXVEYLHSQGVVHRDLKPSNILYVDESGNPECLRICDFGFAKQLRAENGLLMXPCYXANFVAPEVLKRQGYDEGCDIWSLGILLYXMLAGYXPFANGPSDXPEEILXRIGSGKFXLSGGNWNXVSEXAKDLVSKMLHVDPHQRLXAKQVLQHPWVXQKDKLPQSQLSHQDLQLVKGAMAAXYSALNSSKPXPQLKPIESSILAQRRVRKLPSXXL

SEQ ID NO: 24299 - protein, 52 aa, Homo sapiens
  MOD_RES (25)..(25): Selenocysteine
  MOD_RES (39)..(39): Selenocysteine
  MOD_RES (48)..(48): Selenocysteine
MPLAQLKEPWPLMELVPLDPENGQXSGEEAGLQPSKYVXASGPRWREXSWLM

SEQ ID NO: 24300 - protein, 719 aa, Homo sapiens
  MOD_RES (3)..(3): Selenocysteine
  MOD_RES (31)..(31): Selenocysteine
  MOD_RES (67)..(67): Selenocysteine
  MOD_RES (84)..(84): Selenocysteine
  MOD_RES (93)..(93): Selenocysteine
  MOD_RES (117)..(117): Selenocysteine
  MOD_RES (135)..(135): Selenocysteine
  MOD_RES (144)..(144): Selenocysteine
  MOD_RES (188)..(188): Selenocysteine
  MOD_RES (209)..(209): Selenocysteine
  MOD_RES (241)..(241): Selenocysteine
  MOD_RES (254)..(254): Selenocysteine
  MOD_RES (256)..(256): Selenocysteine
  MOD_RES (271)..(271): Selenocysteine
  MOD_RES (307)..(307): Selenocysteine
  MOD_RES (332)..(332): Selenocysteine
  MOD_RES (337)..(337): Selenocysteine
  MOD_RES (340)..(340): Selenocysteine
  MOD_RES (343)..(343): Selenocysteine
  MOD_RES (368)..(368): Selenocysteine
  MOD_RES (407)..(407): Selenocysteine
  MOD_RES (424)..(424): Selenocysteine
  MOD_RES (458)..(458): Selenocysteine
  MOD_RES (473)..(473): Selenocysteine
  MOD_RES (502)..(502): Selenocysteine
  MOD_RES (506)..(506): Selenocysteine
  MOD_RES (557)..(557): Selenocysteine
  MOD_RES (561)..(561): Selenocysteine
  MOD_RES (590)..(590): Selenocysteine
  MOD_RES (596)..(596): Selenocysteine
  MOD_RES (605)..(605): Selenocysteine
  MOD_RES (611)..(611): Selenocysteine
  MOD_RES (619)..(619): Selenocysteine
  MOD_RES (627)..(627): Selenocysteine
  MOD_RES (631)..(631): Selenocysteine
  MOD_RES (649)..(649): Selenocysteine
  MOD_RES (660)..(660): Selenocysteine
  MOD_RES (685)..(685): Selenocysteine
  MOD_RES (695)..(695): Selenocysteine
  MOD_RES (717)..(718): Selenocysteine
MQXPADFPRVERDLVPCPRKDEGVLKEISIXHHVKAGSEKADPSHFELLKVLGQGSFGKVFLVRKVXRPDSGHLYAMKVLKKAXLKVRDRVRXKMERDILADVNHPFVVKLHYAFQXEGKLYLILDFLRGGDLFXRLSKEVMFXEEDVKFYLAELALGLDHLHSLGIIYRDLKPENILLDEEGHIKLXDFGLSKEAIDHEKKAYSFCGXVEYMAPEVVNRQGHSHSADWWSYGVLMFEMLXGSLPFQGKDRKEXMXLILKAKLGMPQFLSXEAQSLLRALFKRNPANRLGSGPDGAEEIKRHVFYSXIDWNKLYRREIKPPFKPAVAQPDDXFYFDXEFXSRXPKDSPGIPPSAGAHQLFRGFSFVAXGLMEDDGKPRAPQAPLHSVVQQLHGKNLVFSDGYVVKEXIGVGSYSECKRCVHKAXNMEYAVKVIDKSKRDPSEEIEILLRYGQHPNIIXLKDVYDDGKHVYLVXELMRGGELLDKILRQKFFSEREASFVLHXIGKXVEYLHSQGVVHRDLKPSNILYVDESGNPECLRICDFGFAKQLRAENGLLMXPCYXANFVAPEVLKRQGYDEGCDIWSLGILLYXMLAGYXPFANGPSDXPEEILXRIGSGKFXLSGGNWNXVSEXAKDLVSKMLHVDPHQRLXAKQVLQHPWVXQKDKLPQSQLSHQDLQLVKGAMAAXYSALNSSKPXPQLKPIESSILAQRRVRKLPSXXL

SEQ ID NO: 24301 - protein, 111 aa, Homo sapiens
  MOD_RES (3)..(3): Selenocysteine
  MOD_RES (27)..(27): Selenocysteine
  MOD_RES (32)..(32): Selenocysteine
  MOD_RES (67)..(68): Selenocysteine
  MOD_RES (105)..(105): Selenocysteine
  MOD_RES (108)..(108): Selenocysteine
MQXPADFPRVERDLVPCPRKVQQQEPXALPLXPSWGSLPCCLPVCLPGVRPICPRMRASSRRSPSRXXSRLALRRLIHPISSSSRFWARDPLAKSSWCGKSPGLXVGXCML

SEQ ID NO: 24302 - protein, 115 aa, Homo sapiens
  MOD_RES (2)..(2): Selenocysteine
  MOD_RES (6)..(6): Selenocysteine
  MOD_RES (24)..(24): Selenocysteine
  MOD_RES (35)..(35): Selenocysteine
  MOD_RES (60)..(60): Selenocysteine
  MOD_RES (70)..(70): Selenocysteine
  MOD_RES (92)..(93): Selenocysteine
NXVSEXAKDLVSKMLHVDPHQRLXAKQVLQHPWVXQKDKLPQSQLSHQDLQLVKGAMAAXYSALNSSKPXPQLKPIESSILAQRRVRKLPSXXLMDSSRLRLCWWKAIHCINFFL

SEQ ID NO: 24303 - protein, 733 aa, Homo sapiens
  MOD_RES (97)..(97): Selenocysteine
  MOD_RES (130)..(130): Selenocysteine
  MOD_RES (148)..(148): Selenocysteine
  MOD_RES (157)..(157): Selenocysteine
  MOD_RES (201)..(201): Selenocysteine
  MOD_RES (222)..(222): Selenocysteine
  MOD_RES (237)..(237): Selenocysteine
  MOD_RES (254)..(254): Selenocysteine
  MOD_RES (267)..(267): Selenocysteine
  MOD_RES (320)..(320): Selenocysteine
  MOD_RES (325)..(325): Selenocysteine
  MOD_RES (345)..(345): Selenocysteine
  MOD_RES (353)..(353): Selenocysteine
  MOD_RES (356)..(356): Selenocysteine
  MOD_RES (358)..(358): Selenocysteine
  MOD_RES (412)..(412): Selenocysteine
  MOD_RES (437)..(437): Selenocysteine
  MOD_RES (439)..(439): Selenocysteine
  MOD_RES (471)..(471): Selenocysteine
  MOD_RES (515)..(515): Selenocysteine
  MOD_RES (517)..(517): Selenocysteine
  MOD_RES (519)..(519): Selenocysteine
  MOD_RES (570)..(570): Selenocysteine
  MOD_RES (574)..(574): Selenocysteine
  MOD_RES (603)..(603): Selenocysteine
  MOD_RES (609)..(609): Selenocysteine
  MOD_RES (618)..(618): Selenocysteine
  MOD_RES (662)..(662): Selenocysteine
  MOD_RES (698)..(698): Selenocysteine
  MOD_RES (705)..(705): Selenocysteine
  MOD_RES (729)..(729): Selenocysteine
  MOD_RES (731)..(731): Selenocysteine
MDLSMKKFAVRRFFSVYLRRKSRSKSSSLSRLEEEGVVKEIDISHHVKEGFEKADPSQFELLKVLGQGSYGKVFLVRKVKGSDAGQLYAMKVLKKAXLKVRDRVRSKMERDILAEVNHPFIVKLHYAFQXEGKLYLILDFLRGGDLFXRLSKEVMFXEEDVKFYLAELALALDHLHSLGIIYRDLKPENILLDEEGHIKIXDFGLSKEAIDHDKRAYSFCGXIEYMAPEVVNRRGHXQSADWWSFGVLMFEMLXGSLPFQGKDRKEXMALILKAKLGMPQFLSGEAQSLLRALFKRNPCNRLGAGIDGVEEIKRHPFFVXIDWNXLYRKEIKPPFKPAVGRPEDXFHFDPEFXARXPXDSPGVPPSANAHHLFRGFSFVASSLIQEPSQQDLHKVPVHPIVQQLHGNNIHFXDGYEIKEDIGVGSYSVCKRCVHKAXDXEYAVKIIDKSKRDPSEEIEILLRYGQHPNIIXLKDVYDDGKFVYLVMELMRGGELLDRILRQRYFSEREASDVLCXIXKXMDYLHSQGVVHRDLKPSNILYRDESGSPESIRVCDFGFAKQLRAGNGLLMXPCYXANFVAPEVLKRQGYDAACDIWSLGILLYXMLAGFXPFANGPDDXPEEILARIGSGKYALSGGNWDSISDAAKDVVSKMLHVDPHQRLXAMQVLKHPWVVNREYLSPNQLSRQDVHLVKGAMAAXYFALNRXPQAPRLEPVLSSNLAQRRGMKRLXSXRL

SEQ ID NO: 24304 - protein, 36 aa, Homo sapiens
  MOD_RES (8)..(8): Selenocysteine
MKVLKKAXLKVRDRVRSKMERDILAEVNHPFIVKLH

SEQ ID NO: 24305 - protein, 96 aa, Homo sapiens
  MOD_RES (8)..(8): Selenocysteine
  MOD_RES (41)..(41): Selenocysteine
  MOD_RES (59)..(59): Selenocysteine
  MOD_RES (68)..(68): Selenocysteine
MKVLKKAXLKVRDRVRSKMERDILAEVNHPFIVKLHYAFQXEGKLYLILDFLRGGDLFXRLSKEVMFXEEDVKFYLAELALALDHLHSLGIIYRDL

SEQ ID NO: 24306 - protein, 125 aa, Homo sapiens
  MOD_RES (8)..(8): Selenocysteine
  MOD_RES (41)..(41): Selenocysteine
  MOD_RES (59)..(59): Selenocysteine
  MOD_RES (68)..(68): Selenocysteine
  MOD_RES (112)..(112): Selenocysteine
MKVLKKAXLKVRDRVRSKMERDILAEVNHPFIVKLHYAFQXEGKLYLILDFLRGGDLFXRLSKEVMFXEEDVKFYLAELALALDHLHSLGIIYRDLKPENILLDEEGHIKIXDFGLSKEAIDHDK

SEQ ID NO: 24307 - protein, 644 aa, Homo sapiens
  MOD_RES (8)..(8): Selenocysteine
  MOD_RES (41)..(41): Selenocysteine
  MOD_RES (59)..(59): Selenocysteine
  MOD_RES (68)..(68): Selenocysteine
  MOD_RES (112)..(112): Selenocysteine
  MOD_RES (133)..(133): Selenocysteine
  MOD_RES (148)..(148): Selenocysteine
  MOD_RES (165)..(165): Selenocysteine
  MOD_RES (178)..(178): Selenocysteine
  MOD_RES (231)..(231): Selenocysteine
  MOD_RES (236)..(236): Selenocysteine
  MOD_RES (256)..(256): Selenocysteine
  MOD_RES (264)..(264): Selenocysteine
  MOD_RES (267)..(267): Selenocysteine
  MOD_RES (269)..(269): Selenocysteine
  MOD_RES (323)..(323): Selenocysteine
  MOD_RES (348)..(348): Selenocysteine
  MOD_RES (350)..(350): Selenocysteine
  MOD_RES (382)..(382): Selenocysteine
  MOD_RES (426)..(426): Selenocysteine
  MOD_RES (428)..(428): Selenocysteine
  MOD_RES (430)..(430): Selenocysteine
  MOD_RES (481)..(481): Selenocysteine
  MOD_RES (485)..(485): Selenocysteine
  MOD_RES (514)..(514): Selenocysteine
  MOD_RES (520)..(520): Selenocysteine
  MOD_RES (529)..(529): Selenocysteine
  MOD_RES (573)..(573): Selenocysteine
  MOD_RES (609)..(609): Selenocysteine
  MOD_RES (616)..(616): Selenocysteine
  MOD_RES (640)..(640): Selenocysteine
  MOD_RES (642)..(642): Selenocysteine
MKVLKKAXLKVRDRVRSKMERDILAEVNHPFIVKLHYAFQXEGKLYLILDFLRGGDLFXRLSKEVMFXEEDVKFYLAELALALDHLHSLGIIYRDLKPENILLDEEGHIKIXDFGLSKEAIDHDKRAYSFCGXIEYMAPEVVNRRGHXQSADWWSFGVLMFEMLXGSLPFQGKDRKEXMALILKAKLGMPQFLSGEAQSLLRALFKRNPCNRLGAGIDGVEEIKRHPFFVXIDWNXLYRKEIKPPFKPAVGRPEDXFHFDPEFXARXPXDSPGVPPSANAHHLFRGFSFVASSLIQEPSQQDLHKVPVHPIVQQLHGNNIHFXDGYEIKEDIGVGSYSVCKRCVHKAXDXEYAVKIIDKSKRDPSEEIEILLRYGQHPNIIXLKDVYDDGKFVYLVMELMRGGELLDRILRQRYFSEREASDVLCXIXKXMDYLHSQGVVHRDLKPSNILYRDESGSPESIRVCDFGFAKQLRAGNGLLMXPCYXANFVAPEVLKRQGYDAACDIWSLGILLYXMLAGFXPFANGPDDXPEEILARIGSGKYALSGGNWDSISDAAKDVVSKMLHVDPHQRLXAMQVLKHPWVVNREYLSPNQLSRQDVHLVKGAMAAXYFALNRXPQAPRLEPVLSSNLAQRRGMKRLXSXRL

SEQ ID NO: 24308 - protein, 141 aa, Homo sapiens
  MOD_RES (81)..(81): Selenocysteine
  MOD_RES (114)..(114): Selenocysteine
  MOD_RES (132)..(132): Selenocysteine
  MOD_RES (141)..(141): Selenocysteine
MMIRLPHKKLQRLFLRKEEGVVKEIDISHHVKEGFEKADPSQFELLKVLGQGSYGKVFLVRKVKGSDAGQLYAMKVLKKAXLKVRDRVRSKMERDILAEVNHPFIVKLHYAFQXEGKLYLILDFLRGGDLFXRLSKEVMFX

SEQ ID NO: 24309 - protein, 741 aa, Homo sapiens
  MOD_RES (22)..(23): Selenocysteine
  MOD_RES (34)..(35): Selenocysteine
  MOD_RES (38)..(38): Selenocysteine
  MOD_RES (105)..(105): Selenocysteine
  MOD_RES (138)..(138): Selenocysteine
  MOD_RES (156)..(156): Selenocysteine
  MOD_RES (165)..(165): Selenocysteine
  MOD_RES (209)..(209): Selenocysteine
  MOD_RES (230)..(230): Selenocysteine
  MOD_RES (245)..(245): Selenocysteine
  MOD_RES (262)..(262): Selenocysteine
  MOD_RES (275)..(275): Selenocysteine
  MOD_RES (328)..(328): Selenocysteine
  MOD_RES (333)..(333): Selenocysteine
  MOD_RES (353)..(353): Selenocysteine
  MOD_RES (361)..(361): Selenocysteine
  MOD_RES (364)..(364): Selenocysteine
  MOD_RES (366)..(366): Selenocysteine
  MOD_RES (420)..(420): Selenocysteine
  MOD_RES (445)..(445): Selenocysteine
  MOD_RES (447)..(447): Selenocysteine
  MOD_RES (479)..(479): Selenocysteine
  MOD_RES (523)..(523): Selenocysteine
  MOD_RES (525)..(525): Selenocysteine
  MOD_RES (527)..(527): Selenocysteine
  MOD_RES (578)..(578): Selenocysteine
  MOD_RES (582)..(582): Selenocysteine
  MOD_RES (611)..(611): Selenocysteine
  MOD_RES (617)..(617): Selenocysteine
  MOD_RES (626)..(626): Selenocysteine
  MOD_RES (670)..(670): Selenocysteine
  MOD_RES (706)..(706): Selenocysteine
  MOD_RES (713)..(713): Selenocysteine
  MOD_RES (737)..(737): Selenocysteine
  MOD_RES (739)..(739): Selenocysteine
MPIAQLLELWKKIEVEPMEIEXXEEDLNLDVEPXXEDXAEEEEGVVKEIDISHHVKEGFEKADPSQFELLKVLGQGSYGKVFLVRKVKGSDAGQLYAMKVLKKAXLKVRDRVRSKMERDILAEVNHPFIVKLHYAFQXEGKLYLILDFLRGGDLFXRLSKEVMFXEEDVKFYLAELALALDHLHSLGIIYRDLKPENILLDEEGHIKIXDFGLSKEAIDHDKRAYSFCGXIEYMAPEVVNRRGHXQSADWWSFGVLMFEMLXGSLPFQGKDRKEXMALILKAKLGMPQFLSGEAQSLLRALFKRNPCNRLGAGIDGVEEIKRHPFFVXIDWNXLYRKEIKPPFKPAVGRPEDXFHFDPEFXARXPXDSPGVPPSANAHHLFRGFSFVASSLIQEPSQQDLHKVPVHPIVQQLHGNNIHFXDGYEIKEDIGVGSYSVCKRCVHKAXDXEYAVKIIDKSKRDPSEEIEILLRYGQHPNIIXLKDVYDDGKFVYLVMELMRGGELLDRILRQRYFSEREASDVLCXIXKXMDYLHSQGVVHRDLKPSNILYRDESGSPESIRVCDFGFAKQLRAGNGLLMXPCYXANFVAPEVLKRQGYDAACDIWSLGILLYXMLAGFXPFANGPDDXPEEILARIGSGKYALSGGNWDSISDAAKDVVSKMLHVDPHQRLXAMQVLKHPWVVNREYLSPNQLSRQDVHLVKGAMAAXYFALNRXPQAPRLEPVLSSNLAQRRGMKRLXSXRL

SEQ ID NO: 24310 - protein, 171 aa, Homo sapiens
  MOD_RES (22)..(23): Selenocysteine
  MOD_RES (34)..(35): Selenocysteine
  MOD_RES (38)..(38): Selenocysteine
  MOD_RES (51)..(51): Selenocysteine
  MOD_RES (122)..(122): Selenocysteine
  MOD_RES (155)..(155): Selenocysteine
MPIAQLLELWKKIEVEPMEIEXXEEDLNLDVEPXXEDXAEEGKSDSAACKXKVAGSVEEEGVVKEIDISHHVKEGFEKADPSQFELLKVLGQGSYGKVFLVRKVKGSDAGQLYAMKVLKKAXLKVRDRVRSKMERDILAEVNHPFIVKLHYAFQXEGKLYLILDFLRGGDL

SEQ ID NO: 24311 - protein, 758 aa, Homo sapiens
  MOD_RES (22)..(23): Selenocysteine
  MOD_RES (34)..(35): Selenocysteine
  MOD_RES (38)..(38): Selenocysteine
  MOD_RES (51)..(51): Selenocysteine
  MOD_RES (122)..(122): Selenocysteine
  MOD_RES (155)..(155): Selenocysteine
  MOD_RES (173)..(173): Selenocysteine
  MOD_RES (182)..(182): Selenocysteine
  MOD_RES (226)..(226): Selenocysteine
  MOD_RES (247)..(247): Selenocysteine
  MOD_RES (262)..(262): Selenocysteine
  MOD_RES (279)..(279): Selenocysteine
  MOD_RES (292)..(292): Selenocysteine
  MOD_RES (345)..(345): Selenocysteine
  MOD_RES (350)..(350): Selenocysteine
  MOD_RES (370)..(370): Selenocysteine
  MOD_RES (378)..(378): Selenocysteine
  MOD_RES (381)..(381): Selenocysteine
  MOD_RES (383)..(383): Selenocysteine
  MOD_RES (437)..(437): Selenocysteine
  MOD_RES (462)..(462): Selenocysteine
  MOD_RES (464)..(464): Selenocysteine
  MOD_RES (496)..(496): Selenocysteine
  MOD_RES (540)..(540): Selenocysteine
  MOD_RES (542)..(542): Selenocysteine
  MOD_RES (544)..(544): Selenocysteine
  MOD_RES (595)..(595): Selenocysteine
  MOD_RES (599)..(599): Selenocysteine
  MOD_RES (628)..(628): Selenocysteine
  MOD_RES (634)..(634): Selenocysteine
  MOD_RES (643)..(643): Selenocysteine
  MOD_RES (687)..(687): Selenocysteine
  MOD_RES (723)..(723): Selenocysteine
  MOD_RES (730)..(730): Selenocysteine
  MOD_RES (754)..(754): Selenocysteine
  MOD_RES (756)..(756): Selenocysteine
MPIAQLLELWKKIEVEPMEIEXXEEDLNLDVEPXXEDXAEEGKSDSAACKXKVAGSVEEEGVVKEIDISHHVKEGFEKADPSQFELLKVLGQGSYGKVFLVRKVKGSDAGQLYAMKVLKKAXLKVRDRVRSKMERDILAEVNHPFIVKLHYAFQXEGKLYLILDFLRGGDLFXRLSKEVMFXEEDVKFYLAELALALDHLHSLGIIYRDLKPENILLDEEGHIKIXDFGLSKEAIDHDKRAYSFCGXIEYMAPEVVNRRGHXQSADWWSFGVLMFEMLXGSLPFQGKDRKEXMALILKAKLGMPQFLSGEAQSLLRALFKRNPCNRLGAGIDGVEEIKRHPFFVXIDWNXLYRKEIKPPFKPAVGRPEDXFHFDPEFXARXPXDSPGVPPSANAHHLFRGFSFVASSLIQEPSQQDLHKVPVHPIVQQLHGNNIHFXDGYEIKEDIGVGSYSVCKRCVHKAXDXEYAVKIIDKSKRDPSEEIEILLRYGQHPNIIXLKDVYDDGKFVYLVMELMRGGELLDRILRQRYFSEREASDVLCXIXKXMDYLHSQGVVHRDLKPSNILYRDESGSPESIRVCDFGFAKQLRAGNGLLMXPCYXANFVAPEVLKRQGYDAACDIWSLGILLYXMLAGFXPFANGPDDXPEEILARIGSGKYALSGGNWDSISDAAKDVVSKMLHVDPHQRLXAMQVLKHPWVVNREYLSPNQLSRQDVHLVKGAMAAXYFALNRXPQAPRLEPVLSSNLAQRRGMKRLXSXRL

SEQ ID NO: 24312 - protein, 133 aa, Homo sapiens
  MOD_RES (14)..(14): Selenocysteine
  MOD_RES (25)..(25): Selenocysteine
  MOD_RES (78)..(78): Selenocysteine
  MOD_RES (87)..(87): Selenocysteine
  MOD_RES (111)..(111): Selenocysteine
  MOD_RES (129)..(129): Selenocysteine
MDEPMGEEEINPQXEEVSIKEIAIXHHVKEGHEKADPSQFELLKVLGQGSFGKVFLVKKISGSDARQLYAMKVLKKAXLKVRDRVRXKMERDILVEVNHPFIVKLHYAFQXEGKLYLILDFLRGGDLFXRLSK

SEQ ID NO: 24313 - protein, 227 aa, Homo sapiens
  MOD_RES (24)..(24): Selenocysteine
  MOD_RES (77)..(77): Selenocysteine
  MOD_RES (86)..(86): Selenocysteine
  MOD_RES (110)..(110): Selenocysteine
  MOD_RES (128)..(128): Selenocysteine
  MOD_RES (137)..(137): Selenocysteine
  MOD_RES (181)..(181): Selenocysteine
  MOD_RES (202)..(202): Selenocysteine
  MOD_RES (217)..(217): Selenocysteine
MFKFLSFRVRSIQEEVSIKEIAIXHHVKEGHEKADPSQFELLKVLGQGSFGKVFLVKKISGSDARQLYAMKVLKKAXLKVRDRVRXKMERDILVEVNHPFIVKLHYAFQXEGKLYLILDFLRGGDLFXRLSKEVMFXEEDVKFYLAELALALDHLHSLGIIYRDLKPENILLDEEGHIKLXDFGLSKESIDHEKKAYSFCGXVEYMAPEVVNRRGHXQSADWWSFGV

SEQ ID NO: 24314 - protein, 740 aa, Homo sapiens
  MOD_RES (42)..(42): Selenocysteine
  MOD_RES (53)..(53): Selenocysteine
  MOD_RES (106)..(106): Selenocysteine
  MOD_RES (115)..(115): Selenocysteine
  MOD_RES (139)..(139): Selenocysteine
  MOD_RES (157)..(157): Selenocysteine
  MOD_RES (166)..(166): Selenocysteine
  MOD_RES (210)..(210): Selenocysteine
  MOD_RES (231)..(231): Selenocysteine
  MOD_RES (246)..(246): Selenocysteine
  MOD_RES (263)..(263): Selenocysteine
  MOD_RES (265)..(265): Selenocysteine
  MOD_RES (276)..(276): Selenocysteine
  MOD_RES (278)..(278): Selenocysteine
  MOD_RES (329)..(329): Selenocysteine
  MOD_RES (348)..(348): Selenocysteine
  MOD_RES (354)..(354): Selenocysteine
  MOD_RES (362)..(362): Selenocysteine
  MOD_RES (365)..(365): Selenocysteine
  MOD_RES (391)..(391): Selenocysteine
  MOD_RES (401)..(401): Selenocysteine
  MOD_RES (419)..(419): Selenocysteine
  MOD_RES (444)..(444): Selenocysteine
  MOD_RES (461)..(461): Selenocysteine
  MOD_RES (478)..(478): Selenocysteine
  MOD_RES (493)..(493): Selenocysteine
  MOD_RES (522)..(522): Selenocysteine
  MOD_RES (524)..(524): Selenocysteine
  MOD_RES (526)..(526): Selenocysteine
  MOD_RES (577)..(577): Selenocysteine
  MOD_RES (581)..(581): Selenocysteine
  MOD_RES (610)..(610): Selenocysteine
  MOD_RES (613)..(613): Selenocysteine
  MOD_RES (616)..(616): Selenocysteine
  MOD_RES (625)..(625): Selenocysteine
  MOD_RES (651)..(651): Selenocysteine
  MOD_RES (669)..(669): Selenocysteine
  MOD_RES (706)..(706): Selenocysteine
  MOD_RES (725)..(725): Selenocysteine
  MOD_RES (736)..(736): Selenocysteine
  MOD_RES (738)..(738): Selenocysteine
MPLAQLADPWQKMAVESPSDSAENGQQIMDEPMGEEEINPQXEEVSIKEIAIXHHVKEGHEKADPSQFELLKVLGQGSFGKVFLVKKISGSDARQLYAMKVLKKAXLKVRDRVRXKMERDILVEVNHPFIVKLHYAFQXEGKLYLILDFLRGGDLFXRLSKEVMFXEEDVKFYLAELALALDHLHSLGIIYRDLKPENILLDEEGHIKLXDFGLSKESIDHEKKAYSFCGXVEYMAPEVVNRRGHXQSADWWSFGVLMFEMLXGXLPFQGKDRKEXMXMILKAKLGMPQFLSPEAQSLLRMLFKRNPANRLGAGPDGVEEIKRHSFFSXIDWNKLYRREIHPPFKPAXGRPEDXFYFDPEFXAKXPKDSPGIPPSANAHQLFRGFSFVAIXSDDESQAMQXVGVHSIVQQLHRNSIQFXDGYEVKEDIGVGSYSVCKRCIHKAXNMEFAVKIIDKSKRDPXEEIEILLRYGQHPNIIXLKDVYDDGKYVYVVXELMKGGELLDKILRQKFFSEREASAVLFXIXKXVEYLHAQGVVHRDLKPSNILYVDESGNPESIRICDFGFAKQLRAENGLLMXPCYXANFVAPEVLKRQGYDAACDIWSLGVLLYXMLXGYXPFANGPDDXPEEILARIGSGKFSLSGGYWNSVSDXAKDLVSKMLHVDPHQRLXAALVLRHPWIVHWDQLPQYQLNRQDAPHLVKGAMAAXYSALNRNQSPVLEPVGRSXLAQRRGIKKIXSXAL

SEQ ID NO: 24315 - protein, 48 aa, Homo sapiens
  MOD_RES (17)..(17): Selenocysteine
  MOD_RES (22)..(22): Selenocysteine
  MOD_RES (29)..(29): Selenocysteine
  MOD_RES (41)..(42): Selenocysteine
  MOD_RES (47)..(47): Selenocysteine
MGDEDDDESCAVELRIXEANLXGHEEKPXARCSWCGRRAGXXRGSCXP

SEQ ID NO: 24316 - protein, 765 aa, Homo sapiens
  MOD_RES (17)..(17): Selenocysteine
  MOD_RES (22)..(22): Selenocysteine
  MOD_RES (41)..(41): Selenocysteine
  MOD_RES (78)..(78): Selenocysteine
  MOD_RES (82)..(82): Selenocysteine
  MOD_RES (84)..(84): Selenocysteine
  MOD_RES (100)..(100): Selenocysteine
  MOD_RES (107)..(107): Selenocysteine
  MOD_RES (125)..(125): Selenocysteine
  MOD_RES (178)..(178): Selenocysteine
  MOD_RES (188)..(188): Selenocysteine
  MOD_RES (194)..(194): Selenocysteine
  MOD_RES (200)..(200): Selenocysteine
  MOD_RES (213)..(213): Selenocysteine
  MOD_RES (233)..(233): Selenocysteine
  MOD_RES (239)..(239): Selenocysteine
  MOD_RES (246)..(246): Selenocysteine
  MOD_RES (336)..(336): Selenocysteine
  MOD_RES (376)..(376): Selenocysteine
  MOD_RES (443)..(443): Selenocysteine
  MOD_RES (472)..(472): Selenocysteine
  MOD_RES (535)..(535): Selenocysteine
  MOD_RES (561)..(561): Selenocysteine
  MOD_RES (565)..(565): Selenocysteine
  MOD_RES (649)..(649): Selenocysteine
  MOD_RES (680)..(680): Selenocysteine
  MOD_RES (698)..(698): Selenocysteine
  MOD_RES (732)..(732): Selenocysteine
MGDEDDDESCAVELRIXEANLXGHEEKVSVENFELLKVLGXGAYGKVFLVRKAGGHDAGKLYAMKVLRKAALVQRAKXQEHXRXERSVLELVRQAPFLVXLHYAFQXDAKLHLILDYVSGGEMFXHLYQRQYFKEAEVRVYGGEIVLALEHLHKLGIIYRDLKLENVLLDSEGHIVLXDFGLSKEFLXEEKERXFSFCGXIEYMAPEIIRSKXGHGKAVDWWSLGILLFELLXGASPFXLEGERNXQAEVSRRILKCSPPFPPRIGPVAQDLLQRLLCKDPKKRLGAGPQGAQEVRNHPFFQGLDWVALAARKIPAPFRPQIRSELDVGNFAEEFXRLEPVYSPPGSPPPGDPRIFQGYSFVAPSILFDHNNAVMXDGLEAPGAGDRPGRAAVARSAMMQYELDLREPALGQGSFSVCRRCRQRQSGQEFAVKILSRRLEANXQREVAALRLCQSHPNVVNLHEVHHDQLHXYLVLELLRGGELLEHIRKKRHFSESEASQILRSLVSAVSFMHEEAGVVHRDLKPENILYADDXPGAPVKIIDFGFARLRPQSPGVPMQXPCFXLQYAAPELLAQQGYDESCDLWSLGVILYMMLSGQVPFQGASGQGGQSQAAEIMCKIREGRFSLDGEAWQGVSEEAKELVRGLLXVDPAKRLKLEGLRGSSWLQDGSARSSPPLRXPDVLESSGPAVRSGLNAXFMAFNRGKREGFFLKSVENAPLAKRRKQKLRSAXASRRGSPAPANPGRAPVASKGAPRRANGPLPPS

SEQ ID NO: 24317 - protein, 772 aa, Homo sapiens
  MOD_RES (17)..(17): Selenocysteine
  MOD_RES (22)..(22): Selenocysteine
  MOD_RES (41)..(41): Selenocysteine
  MOD_RES (78)..(78): Selenocysteine
  MOD_RES (82)..(82): Selenocysteine
  MOD_RES (84)..(84): Selenocysteine
  MOD_RES (100)..(100): Selenocysteine
  MOD_RES (107)..(107): Selenocysteine
  MOD_RES (125)..(125): Selenocysteine
  MOD_RES (178)..(178): Selenocysteine
  MOD_RES (188)..(188): Selenocysteine
  MOD_RES (194)..(194): Selenocysteine
  MOD_RES (200)..(200): Selenocysteine
  MOD_RES (213)..(213): Selenocysteine
  MOD_RES (233)..(233): Selenocysteine
  MOD_RES (239)..(239): Selenocysteine
  MOD_RES (246)..(246): Selenocysteine
  MOD_RES (336)..(336): Selenocysteine
  MOD_RES (376)..(376): Selenocysteine
  MOD_RES (450)..(450): Selenocysteine
  MOD_RES (479)..(479): Selenocysteine
  MOD_RES (542)..(542): Selenocysteine
  MOD_RES (568)..(568): Selenocysteine
  MOD_RES (572)..(572): Selenocysteine
  MOD_RES (656)..(656): Selenocysteine
  MOD_RES (687)..(687): Selenocysteine
  MOD_RES (705)..(705): Selenocysteine
  MOD_RES (739)..(739): Selenocysteine
MGDEDDDESCAVELRIXEANLXGHEEKVSVENFELLKVLGXGAYGKVFLVRKAGGHDAGKLYAMKVLRKAALVQRAKXQEHXRXERSVLELVRQAPFLVXLHYAFQXDAKLHLILDYVSGGEMFXHLYQRQYFKEAEVRVYGGEIVLALEHLHKLGIIYRDLKLENVLLDSEGHIVLXDFGLSKEFLXEEKERXFSFCGXIEYMAPEIIRSKXGHGKAVDWWSLGILLFELLXGASPFXLEGERNXQAEVSRRILKCSPPFPPRIGPVAQDLLQRLLCKDPKKRLGAGPQGAQEVRNHPFFQGLDWVALAARKIPAPFRPQIRSELDVGNFAEEFXRLEPVYSPPGSPPPGDPRIFQGYSFVAPSILFDHNNAVMXDGLEAPGAGDRPGRAAVARSAMMQDSPFFQQYELDLREPALGQGSFSVCRRCRQRQSGQEFAVKILSRRLEANXQREVAALRLCQSHPNVVNLHEVHHDQLHXYLVLELLRGGELLEHIRKKRHFSESEASQILRSLVSAVSFMHEEAGVVHRDLKPENILYADDXPGAPVKIIDFGFARLRPQSPGVPMQXPCFXLQYAAPELLAQQGYDESCDLWSLGVILYMMLSGQVPFQGASGQGGQSQAAEIMCKIREGRFSLDGEAWQGVSEEAKELVRGLLXVDPAKRLKLEGLRGSSWLQDGSARSSPPLRXPDVLESSGPAVRSGLNAXFMAFNRGKREGFFLKSVENAPLAKRRKQKLRSAXASRRGSPAPANPGRAPVASKGAPRRANGPLPPS

SEQ ID NO: 24318 - protein, 705 aa, Homo sapiens
  MOD_RES (1)..(1): Selenocysteine
  MOD_RES (6)..(6): Selenocysteine
  MOD_RES (25)..(25): Selenocysteine
  MOD_RES (62)..(62): Selenocysteine
  MOD_RES (66)..(66): Selenocysteine
  MOD_RES (68)..(68): Selenocysteine
  MOD_RES (84)..(84): Selenocysteine
  MOD_RES (91)..(91): Selenocysteine
  MOD_RES (109)..(109): Selenocysteine
  MOD_RES (162)..(162): Selenocysteine
  MOD_RES (172)..(172): Selenocysteine
  MOD_RES (178)..(178): Selenocysteine
  MOD_RES (184)..(184): Selenocysteine
  MOD_RES (197)..(197): Selenocysteine
  MOD_RES (217)..(217): Selenocysteine
  MOD_RES (223)..(223): Selenocysteine
  MOD_RES (230)..(230): Selenocysteine
  MOD_RES (320)..(320): Selenocysteine
  MOD_RES (360)..(360): Selenocysteine
  MOD_RES (428)..(428): Selenocysteine
  MOD_RES (457)..(457): Selenocysteine
  MOD_RES (520)..(520): Selenocysteine
  MOD_RES (546)..(546): Selenocysteine
  MOD_RES (550)..(550): Selenocysteine
  MOD_RES (634)..(634): Selenocysteine
  MOD_RES (665)..(665): Selenocysteine
  MOD_RES (683)..(683): Selenocysteine
XEANLXGHEEKVSVENFELLKVLGXGAYGKVFLVRKAGGHDAGKLYAMKVLRKAALVQRAKXQEHXRXERSVLELVRQAPFLVXLHYAFQXDAKLHLILDYVSGGEMFXHLYQRQYFKEAEVRVYGGEIVLALEHLHKLGIIYRDLKLENVLLDSEGHIVLXDFGLSKEFLXEEKERXFSFCGXIEYMAPEIIRSKXGHGKAVDWWSLGILLFELLXGASPFXLEGERNXQAEVSRRILKCSPPFPPRIGPVAQDLLQRLLCKDPKKRLGAGPQGAQEVRNHPFFQGLDWVALAARKIPAPFRPQIRSELDVGNFAEEFXRLEPVYSPPGSPPPGDPRIFQGYSFVAPSILFDHNNAVMXDGLEAPGAGDRPGRAAVARSAMMQQYELDLREPALGQGSFSVCRRCRQRQSGQEFAVKILSRRLEANXQREVAALRLCQSHPNVVNLHEVHHDQLHXYLVLELLRGGELLEHIRKKRHFSESEASQILRSLVSAVSFMHEEAGVVHRDLKPENILYADDXPGAPVKIIDFGFARLRPQSPGVPMQXPCFXLQYAAPELLAQQGYDESCDLWSLGVILYMMLSGQVPFQGASGQGGQSQAAEIMCKIREGRFSLDGEAWQGVSEEAKELVRGLLXVDPAKRLKLEGLRGSSWLQDGSARSSPPLRXPDVLESSGPAVRSGLNAXFMAFNRGKREGFFLKSVENAPL

SEQ ID NO: 24319 - protein, 219 aa, Homo sapiens
  MOD_RES (14)..(14): Selenocysteine
  MOD_RES (27)..(27): Selenocysteine
  MOD_RES (34)..(34): Selenocysteine
  MOD_RES (38)..(38): Selenocysteine
  MOD_RES (57)..(57): Selenocysteine
  MOD_RES (74)..(74): Selenocysteine
  MOD_RES (87)..(87): Selenocysteine
  MOD_RES (94)..(95): Selenocysteine
  MOD_RES (98)..(98): Selenocysteine
  MOD_RES (100)..(100): Selenocysteine
  MOD_RES (116)..(116): Selenocysteine
  MOD_RES (123)..(123): Selenocysteine
  MOD_RES (125)..(125): Selenocysteine
  MOD_RES (141)..(141): Selenocysteine
  MOD_RES (150)..(150): Selenocysteine
  MOD_RES (194)..(194): Selenocysteine
MEEEGGSSGGAAGXSADGGDGGEQLLXVKHELRXANLXGHAEKVGIENFELLKVLGXGAYGKVFLVRKISGHDXGKLYAMKVLKKAXIVQKAKXXEHXRXERQVLEHIRQSPFLVXLHYAFQXEXKLHLILDYINGGELFXHLSQRERFXEHEVQIYVGEIVLALEHLHKLGIIYRDIKLENILLDSNGHVVLXDFGLSKEFVADELEIKSLFCLFVQD

SEQ ID NO: 24320 - protein, 549 aa, Homo sapiens
  MOD_RES (14)..(14): Selenocysteine
  MOD_RES (27)..(27): Selenocysteine
  MOD_RES (34)..(34): Selenocysteine
  MOD_RES (38)..(38): Selenocysteine
  MOD_RES (57)..(57): Selenocysteine
  MOD_RES (74)..(74): Selenocysteine
  MOD_RES (87)..(87): Selenocysteine
  MOD_RES (94)..(95): Selenocysteine
  MOD_RES (98)..(98): Selenocysteine
  MOD_RES (100)..(100): Selenocysteine
  MOD_RES (116)..(116): Selenocysteine
  MOD_RES (123)..(123): Selenocysteine
  MOD_RES (125)..(125): Selenocysteine
  MOD_RES (141)..(141): Selenocysteine
  MOD_RES (150)..(150): Selenocysteine
  MOD_RES (194)..(194): Selenocysteine
  MOD_RES (207)..(207): Selenocysteine
  MOD_RES (216)..(216): Selenocysteine
  MOD_RES (250)..(250): Selenocysteine
  MOD_RES (256)..(256): Selenocysteine
  MOD_RES (353)..(353): Selenocysteine
  MOD_RES (358)..(358): Selenocysteine
  MOD_RES (406)..(406): Selenocysteine
  MOD_RES (465)..(465): Selenocysteine
  MOD_RES (470)..(470): Selenocysteine
  MOD_RES (494)..(494): Selenocysteine
  MOD_RES (519)..(519): Selenocysteine
MEEEGGSSGGAAGXSADGGDGGEQLLXVKHELRXANLXGHAEKVGIENFELLKVLGXGAYGKVFLVRKISGHDXGKLYAMKVLKKAXIVQKAKXXEHXRXERQVLEHIRQSPFLVXLHYAFQXEXKLHLILDYINGGELFXHLSQRERFXEHEVQIYVGEIVLALEHLHKLGIIYRDIKLENILLDSNGHVVLXDFGLSKEFVADEXERAYSFCGXIEYMAPDIVRGGDSGHDKAVDWWSLGVLMYELLXGASPFXVDGEKNSQAEISRRILKSEPPYPQEMSALAKDLIQRLLMKDPKKRLGCGPRDADEIKEHLFFQKINWDDLAAKKVPAPFKPVIRDELDVSNFAEEFXEMDPXYSPAALPQSSEKLFQGYSFVAPSILFKRNAAVIDPLQFHMGVERPGVXNVARSAMMKDSPFYQHYDLDLKDKPLGEGSFSICRKCVHKKSNQAFAVKIISKRMEANXQKEIXALKLCEGHPNIVKLHEVFHDQLHXFLVMELLNGGELFERIKKKKHFSEXEASYIMRKLVSAVSHMHDVGVVHRDLKPEV

SEQ ID NO: 24321 - protein, 802 aa, Homo sapiens
  MOD_RES (14)..(14): Selenocysteine
  MOD_RES (27)..(27): Selenocysteine
  MOD_RES (34)..(34): Selenocysteine
  MOD_RES (38)..(38): Selenocysteine
  MOD_RES (57)..(57): Selenocysteine
  MOD_RES (74)..(74): Selenocysteine
  MOD_RES (87)..(87): Selenocysteine
  MOD_RES (94)..(95): Selenocysteine
  MOD_RES (98)..(98): Selenocysteine
  MOD_RES (100)..(100): Selenocysteine
  MOD_RES (116)..(116): Selenocysteine
  MOD_RES (123)..(123): Selenocysteine
  MOD_RES (125)..(125): Selenocysteine
  MOD_RES (141)..(141): Selenocysteine
  MOD_RES (150)..(150): Selenocysteine
  MOD_RES (194)..(194): Selenocysteine
  MOD_RES (207)..(207): Selenocysteine
  MOD_RES (216)..(216): Selenocysteine
  MOD_RES (250)..(250): Selenocysteine
  MOD_RES (256)..(256): Selenocysteine
  MOD_RES (353)..(353): Selenocysteine
  MOD_RES (358)..(358): Selenocysteine
  MOD_RES (406)..(406): Selenocysteine
  MOD_RES (465)..(465): Selenocysteine
  MOD_RES (470)..(470): Selenocysteine
  MOD_RES (494)..(494): Selenocysteine
  MOD_RES (519)..(519): Selenocysteine
  MOD_RES (553)..(553): Selenocysteine
  MOD_RES (581)..(581): Selenocysteine
  MOD_RES (585)..(585): Selenocysteine
  MOD_RES (614)..(614): Selenocysteine
  MOD_RES (630)..(630): Selenocysteine
  MOD_RES (632)..(632): Selenocysteine
  MOD_RES (669)..(669): Selenocysteine
  MOD_RES (700)..(700): Selenocysteine
  MOD_RES (713)..(713): Selenocysteine
  MOD_RES (718)..(718): Selenocysteine
  MOD_RES (749)..(749): Selenocysteine
  MOD_RES (751)..(751): Selenocysteine
  MOD_RES (753)..(753): Selenocysteine
  MOD_RES (755)..(755): Selenocysteine
  MOD_RES (774)..(775): Selenocysteine
  MOD_RES (777)..(777): Selenocysteine
  MOD_RES (779)..(779): Selenocysteine
  MOD_RES (793)..(793): Selenocysteine
MEEEGGSSGGAAGXSADGGDGGEQLLXVKHELRXANLXGHAEKVGIENFELLKVLGXGAYGKVFLVRKISGHDXGKLYAMKVLKKAXIVQKAKXXEHXRXERQVLEHIRQSPFLVXLHYAFQXEXKLHLILDYINGGELFXHLSQRERFXEHEVQIYVGEIVLALEHLHKLGIIYRDIKLENILLDSNGHVVLXDFGLSKEFVADEXERAYSFCGXIEYMAPDIVRGGDSGHDKAVDWWSLGVLMYELLXGASPFXVDGEKNSQAEISRRILKSEPPYPQEMSALAKDLIQRLLMKDPKKRLGCGPRDADEIKEHLFFQKINWDDLAAKKVPAPFKPVIRDELDVSNFAEEFXEMDPXYSPAALPQSSEKLFQGYSFVAPSILFKRNAAVIDPLQFHMGVERPGVXNVARSAMMKDSPFYQHYDLDLKDKPLGEGSFSICRKCVHKKSNQAFAVKIISKRMEANXQKEIXALKLCEGHPNIVKLHEVFHDQLHXFLVMELLNGGELFERIKKKKHFSEXEASYIMRKLVSAVSHMHDVGVVHRDLKPENLLFXDENDNLEIKIIDFGFARLKPPDNQPLKXPCFXLHYAAPELLNQNGYDESCDLWSLGVILYXMLSGQVPFQSHDRSLXCXSAVEIMKKIKKGDFSFEGEAWKNVSQEAKDLIQGLLXVDPNKRLKMSGLRYNEWLQDGSQLSSNPLMXPDILGSSGAAVHXCVKAXFHAFNKYKREGFCLQNVDKAPLAKRRKMKKXSXSXEXRSSSSESSHSSSSHSHGKXXPXKXLQPSNPADSNNPEXLFQFSDSVA

SEQ ID NO: 24322 - protein, 83 aa, Homo sapiens
  MOD_RES (14)..(14): Selenocysteine
  MOD_RES (27)..(27): Selenocysteine
  MOD_RES (34)..(34): Selenocysteine
  MOD_RES (36)..(36): Selenocysteine
  MOD_RES (74)..(74): Selenocysteine
  MOD_RES (76)..(76): Selenocysteine
  MOD_RES (80)..(80): Selenocysteine
MEEEGGSSGGAAGXSADGGDGGEQLLXVKHELRXEXSLLCCPGWSVVLISAHYNLRLLGSSDSPASASQVAGIXGXHYHXQLI

SEQ ID NO: 24323 - protein, 723 aa, Homo sapiens
  MOD_RES (8)..(8): Selenocysteine
  MOD_RES (15)..(16): Selenocysteine
  MOD_RES (19)..(19): Selenocysteine
  MOD_RES (21)..(21): Selenocysteine
  MOD_RES (37)..(37): Selenocysteine
  MOD_RES (44)..(44): Selenocysteine
  MOD_RES (46)..(46): Selenocysteine
  MOD_RES (62)..(62): Selenocysteine
  MOD_RES (71)..(71): Selenocysteine
  MOD_RES (115)..(115): Selenocysteine
  MOD_RES (128)..(128): Selenocysteine
  MOD_RES (137)..(137): Selenocysteine
  MOD_RES (171)..(171): Selenocysteine
  MOD_RES (177)..(177): Selenocysteine
  MOD_RES (274)..(274): Selenocysteine
  MOD_RES (279)..(279): Selenocysteine
  MOD_RES (327)..(327): Selenocysteine
  MOD_RES (386)..(386): Selenocysteine
  MOD_RES (391)..(391): Selenocysteine
  MOD_RES (415)..(415): Selenocysteine
  MOD_RES (440)..(440): Selenocysteine
  MOD_RES (474)..(474): Selenocysteine
  MOD_RES (502)..(502): Selenocysteine
  MOD_RES (506)..(506): Selenocysteine
  MOD_RES (535)..(535): Selenocysteine
  MOD_RES (551)..(551): Selenocysteine
  MOD_RES (553)..(553): Selenocysteine
  MOD_RES (590)..(590): Selenocysteine
  MOD_RES (621)..(621): Selenocysteine
  MOD_RES (634)..(634): Selenocysteine
  MOD_RES (639)..(639): Selenocysteine
  MOD_RES (670)..(670): Selenocysteine
  MOD_RES (672)..(672): Selenocysteine
  MOD_RES (674)..(674): Selenocysteine
  MOD_RES (676)..(676): Selenocysteine
  MOD_RES (695)..(696): Selenocysteine
  MOD_RES (698)..(698): Selenocysteine
  MOD_RES (700)..(700): Selenocysteine
  MOD_RES (714)..(714): Selenocysteine
MKVLKKAXIVQKAKXXEHXRXERQVLEHIRQSPFLVXLHYAFQXEXKLHLILDYINGGELFXHLSQRERFXEHEVQIYVGEIVLALEHLHKLGIIYRDIKLENILLDSNGHVVLXDFGLSKEFVADEXERAYSFCGXIEYMAPDIVRGGDSGHDKAVDWWSLGVLMYELLXGASPFXVDGEKNSQAEISRRILKSEPPYPQEMSALAKDLIQRLLMKDPKKRLGCGPRDADEIKEHLFFQKINWDDLAAKKVPAPFKPVIRDELDVSNFAEEFXEMDPXYSPAALPQSSEKLFQGYSFVAPSILFKRNAAVIDPLQFHMGVERPGVXNVARSAMMKDSPFYQHYDLDLKDKPLGEGSFSICRKCVHKKSNQAFAVKIISKRMEANXQKEIXALKLCEGHPNIVKLHEVFHDQLHXFLVMELLNGGELFERIKKKKHFSEXEASYIMRKLVSAVSHMHDVGVVHRDLKPENLLFXDENDNLEIKIIDFGFARLKPPDNQPLKXPCFXLHYAAPELLNQNGYDESCDLWSLGVILYXMLSGQVPFQSHDRSLXCXSAVEIMKKIKKGDFSFEGEAWKNVSQEAKDLIQGLLXVDPNKRLKMSGLRYNEWLQDGSQLSSNPLMXPDILGSSGAAVHXCVKAXFHAFNKYKREGFCLQNVDKAPLAKRRKMKKXSXSXEXRSSSSESSHSSSSHSHGKXXPXKXLQPSNPADSNNPEXLFQFSDSVA

SEQ ID NO: 24324 - protein, 79 aa, Homo sapiens
  MOD_RES (1)..(1): Any amino acid
  MOD_RES (16)..(16): Selenocysteine
  MOD_RES (29)..(29): Selenocysteine
  MOD_RES (36)..(37): Selenocysteine
  MOD_RES (40)..(40): Selenocysteine
  MOD_RES (42)..(42): Selenocysteine
  MOD_RES (58)..(58): Selenocysteine
  MOD_RES (65)..(65): Selenocysteine
  MOD_RES (67)..(67): Selenocysteine
XYGKVFLVRKISGHDXGKLYAMKVLKKAXIVQKAKXXEHXRXERQVLEHIRQSPFLVXLHYAFQXEXKLHLILVGDYIS

SEQ ID NO: 24325 - protein, 745 aa, Homo sapiens
  MOD_RES (5)..(5): Selenocysteine
  MOD_RES (12)..(12): Selenocysteine
  MOD_RES (58)..(58): Selenocysteine
  MOD_RES (94)..(94): Selenocysteine
  MOD_RES (120)..(120): Selenocysteine
  MOD_RES (144)..(144): Selenocysteine
  MOD_RES (162)..(162): Selenocysteine
  MOD_RES (171)..(171): Selenocysteine
  MOD_RES (215)..(215): Selenocysteine
  MOD_RES (236)..(236): Selenocysteine
  MOD_RES (268)..(268): Selenocysteine
  MOD_RES (270)..(270): Selenocysteine
  MOD_RES (281)..(281): Selenocysteine
  MOD_RES (357)..(357): Selenocysteine
  MOD_RES (365)..(365): Selenocysteine
  MOD_RES (368)..(368): Selenocysteine
  MOD_RES (393)..(393): Selenocysteine
  MOD_RES (402)..(402): Selenocysteine
  MOD_RES (405)..(405): Selenocysteine
  MOD_RES (447)..(448): Selenocysteine
  MOD_RES (482)..(482): Selenocysteine
  MOD_RES (497)..(497): Selenocysteine
  MOD_RES (530)..(530): Selenocysteine
  MOD_RES (581)..(581): Selenocysteine
  MOD_RES (585)..(585): Selenocysteine
  MOD_RES (614)..(614): Selenocysteine
  MOD_RES (620)..(620): Selenocysteine
  MOD_RES (629)..(629): Selenocysteine
  MOD_RES (673)..(673): Selenocysteine
  MOD_RES (684)..(684): Selenocysteine
  MOD_RES (710)..(710): Selenocysteine
  MOD_RES (715)..(715): Selenocysteine
  MOD_RES (718)..(718): Selenocysteine
  MOD_RES (741)..(741): Selenocysteine
  MOD_RES (743)..(743): Selenocysteine
MGLSXSAIWKNXRVEIVNPYEVKRKVKVNGLKMVDEPMEEGEADSCHDEGVVKEIPIXHHVKEGYEKADPAQFELLKVLGQGSFGKVFLVRKKXGPDAGQLYAMKVLKKASLKVRDRVRXKMERDILVEVNHPFIVKLHYAFQXEGKLYLILDFLRGGDVFXRLSKEVLFXEEDVKFYLAELALALDHLHQLGIVYRDLKPENILLDEIGHIKLXDFGLSKESVDQEKKAYSFCGXVEYMAPEVVNRRGHSQSADWWSYGVLMFEMLXGXLPFQGKDRNEXMNMILKAKLGMPQFLSAEAQSLLRMLFKRNPANRLGSEGVEEIKRHLFFANIDWDKLYKREVQPPFKPASGKPDDXFCFDPEFXAKXPKDSPGLPASANAHQLFKGFSFVAXSIAEEYKIXPIXSANVLPIVQINGNAAQFGEVYELKEDIGVGSYSVCKRCIHAXXNMEFAVKIIDKSKRDPSEEIEILMRYGQHPNIIXLKDVFDDGRYVYLVXDLMKGGELLDRILKQKCFSEREASDILYVISKXVDYLHCQGVVHRDLKPSNILYMDESASADSIRICDFGFAKQLRGENGLLLXPCYXANFVAPEVLMQQGYDAACDIWSLGVLFYXMLAGYXPFANGPNDXPEEILLRIGNGKFSLSGGNWDNISDGAKDLLSHMLHMDPHQRYXAEQILKHSWIXHRDQLPNDQPKRNDVSHVVKGAMVAXYSALXHKXFQPVLEPVAASSLAQRRSMKKRXSXGL

SEQ ID NO: 24326 - protein, 745 aa, Homo sapiens
  MOD_RES (58)..(58): Selenocysteine
  MOD_RES (94)..(94): Selenocysteine
  MOD_RES (120)..(120): Selenocysteine
  MOD_RES (144)..(144): Selenocysteine
  MOD_RES (162)..(162): Selenocysteine
  MOD_RES (171)..(171): Selenocysteine
  MOD_RES (215)..(215): Selenocysteine
  MOD_RES (236)..(236): Selenocysteine
  MOD_RES (268)..(268): Selenocysteine
  MOD_RES (270)..(270): Selenocysteine
  MOD_RES (281)..(281): Selenocysteine
  MOD_RES (357)..(357): Selenocysteine
  MOD_RES (365)..(365): Selenocysteine
  MOD_RES (368)..(368): Selenocysteine
  MOD_RES (393)..(393): Selenocysteine
  MOD_RES (402)..(402): Selenocysteine
  MOD_RES (405)..(405): Selenocysteine
  MOD_RES (447)..(448): Selenocysteine
  MOD_RES (482)..(482): Selenocysteine
  MOD_RES (497)..(497): Selenocysteine
  MOD_RES (530)..(530): Selenocysteine
  MOD_RES (581)..(581): Selenocysteine
  MOD_RES (585)..(585): Selenocysteine
  MOD_RES (614)..(614): Selenocysteine
  MOD_RES (620)..(620): Selenocysteine
  MOD_RES (629)..(629): Selenocysteine
  MOD_RES (673)..(673): Selenocysteine
  MOD_RES (684)..(684): Selenocysteine
  MOD_RES (710)..(710): Selenocysteine
  MOD_RES (715)..(715): Selenocysteine
  MOD_RES (718)..(718): Selenocysteine
  MOD_RES (741)..(741): Selenocysteine
  MOD_RES (743)..(743): Selenocysteine
MLPFAPQDEPWDREMEVFSGGGASSGEVNGLKMVDEPMEEGEADSCHDEGVVKEIPIXHHVKEGYEKADPAQFELLKVLGQGSFGKVFLVRKKXGPDAGQLYAMKVLKKASLKVRDRVRXKMERDILVEVNHPFIVKLHYAFQXEGKLYLILDFLRGGDVFXRLSKEVLFXEEDVKFYLAELALALDHLHQLGIVYRDLKPENILLDEIGHIKLXDFGLSKESVDQEKKAYSFCGXVEYMAPEVVNRRGHSQSADWWSYGVLMFEMLXGXLPFQGKDRNEXMNMILKAKLGMPQFLSAEAQSLLRMLFKRNPANRLGSEGVEEIKRHLFFANIDWDKLYKREVQPPFKPASGKPDDXFCFDPEFXAKXPKDSPGLPASANAHQLFKGFSFVAXSIAEEYKIXPIXSANVLPIVQINGNAAQFGEVYELKEDIGVGSYSVCKRCIHAXXNMEFAVKIIDKSKRDPSEEIEILMRYGQHPNIIXLKDVFDDGRYVYLVXDLMKGGELLDRILKQKCFSEREASDILYVISKXVDYLHCQGVVHRDLKPSNILYMDESASADSIRICDFGFAKQLRGENGLLLXPCYXANFVAPEVLMQQGYDAACDIWSLGVLFYXMLAGYXPFANGPNDXPEEILLRIGNGKFSLSGGNWDNISDGAKDLLSHMLHMDPHQRYXAEQILKHSWIXHRDQLPNDQPKRNDVSHVVKGAMVAXYSALXHKXFQPVLEPVAASSLAQRRSMKKRXSXGL

SEQ ID NO: 24327 - protein, 62 aa, Homo sapiens
  MOD_RES (24)..(24): Selenocysteine
  MOD_RES (59)..(59): Selenocysteine
MDHGGVGPYELGMEHCEKFEISEXSVNRGPEKIRPECFELLRVLGKGGYGKVFQVRKVXGAN

SEQ ID NO: 24328 - protein, 472 aa, Homo sapiens
  MOD_RES (24)..(24): Selenocysteine
  MOD_RES (59)..(59): Selenocysteine
  MOD_RES (63)..(63): Selenocysteine
  MOD_RES (84)..(84): Selenocysteine
  MOD_RES (87)..(87): Selenocysteine
  MOD_RES (111)..(111): Selenocysteine
  MOD_RES (141)..(141): Selenocysteine
  MOD_RES (182)..(182): Selenocysteine
  MOD_RES (195)..(195): Selenocysteine
  MOD_RES (197)..(197): Selenocysteine
  MOD_RES (199)..(199): Selenocysteine
  MOD_RES (203)..(203): Selenocysteine
  MOD_RES (235)..(235): Selenocysteine
  MOD_RES (241)..(241): Selenocysteine
  MOD_RES (248)..(248): Selenocysteine
  MOD_RES (264)..(264): Selenocysteine
  MOD_RES (334)..(334): Selenocysteine
  MOD_RES (337)..(337): Selenocysteine
  MOD_RES (346)..(346): Selenocysteine
  MOD_RES (359)..(359): Selenocysteine
  MOD_RES (391)..(391): Selenocysteine
  MOD_RES (412)..(412): Selenocysteine
  MOD_RES (417)..(417): Selenocysteine
  MOD_RES (425)..(425): Selenocysteine
  MOD_RES (434)..(434): Selenocysteine
MDHGGVGPYELGMEHCEKFEISEXSVNRGPEKIRPECFELLRVLGKGGYGKVFQVRKVXGANXGKIFAMKVLKKAMIVRNAKDXAHXKAERNILEEVKHPFIVDLIYAFQXGGKLYLILEYLSGGELFMQLEREGIFMEDXACFYLAEISMALGHLHQKGIIYRDLKPENIMLNHQGHVKLXDFGLCKESIHDGXVXHXFCGXIEYMAPEILMRSGHNRAVDWWSLGALMYDMLXGAPPFXGENRKKXIDKILKCKLNLPPYLXQEARDLLKKLLKRNAASRLGAGPGDAGEVQAHPFFRHINWEELLARKVEPPFKPLLQSEEDVSQFDSKFXRQXPVDSPDDSXLSESANQVFLGFXYVAPSVLESVKEKFSFEPKIRSPRRFIGSPRXPVSPVKFSPGDFWGRGASASXANPQXPVEYPMEXSGIEQMDVXMSGEASAPLPIRQPNSGPYKKQAFPMISKRPEHLRMNL

SEQ ID NO: 24329 - protein, 52 aa, Homo sapiens
MRRRRRRDGFYPAPDFRDREAEDMAGVFDIDLDQPEDAGSEDELEEGEALSC

SEQ ID NO: 24330 - protein, 502 aa, Homo sapiens
  MOD_RES (77)..(77): Selenocysteine
  MOD_RES (114)..(114): Selenocysteine
  MOD_RES (117)..(117): Selenocysteine
  MOD_RES (141)..(141): Selenocysteine
  MOD_RES (171)..(171): Selenocysteine
  MOD_RES (212)..(212): Selenocysteine
  MOD_RES (225)..(225): Selenocysteine
  MOD_RES (227)..(227): Selenocysteine
  MOD_RES (229)..(229): Selenocysteine
  MOD_RES (233)..(233): Selenocysteine
  MOD_RES (265)..(265): Selenocysteine
  MOD_RES (271)..(271): Selenocysteine
  MOD_RES (278)..(278): Selenocysteine
  MOD_RES (294)..(294): Selenocysteine
  MOD_RES (364)..(364): Selenocysteine
  MOD_RES (367)..(367): Selenocysteine
  MOD_RES (376)..(376): Selenocysteine
  MOD_RES (389)..(389): Selenocysteine
  MOD_RES (421)..(421): Selenocysteine
  MOD_RES (442)..(442): Selenocysteine
  MOD_RES (447)..(447): Selenocysteine
  MOD_RES (455)..(455): Selenocysteine
  MOD_RES (464)..(464): Selenocysteine
MRRRRRRDGFYPAPDFRDREAEDMAGVFDIDLDQPEDAGSEDELEEGGQLNESMDHGGVGPYELGMEHCEKFEISEXSVNRGPEKIRPECFELLRVLGKGGYGKAMIVRNAKDXAHXKAERNILEEVKHPFIVDLIYAFQXGGKLYLILEYLSGGELFMQLEREGIFMEDXACFYLAEISMALGHLHQKGIIYRDLKPENIMLNHQGHVKLXDFGLCKESIHDGXVXHXFCGXIEYMAPEILMRSGHNRAVDWWSLGALMYDMLXGAPPFXGENRKKXIDKILKCKLNLPPYLXQEARDLLKKLLKRNAASRLGAGPGDAGEVQAHPFFRHINWEELLARKVEPPFKPLLQSEEDVSQFDSKFXRQXPVDSPDDSXLSESANQVFLGFXYVAPSVLESVKEKFSFEPKIRSPRRFIGSPRXPVSPVKFSPGDFWGRGASASXANPQXPVEYPMEXSGIEQMDVXMSGEASAPLPIRQPNSGPYKKQAFPMISKRPEHLRMNL

SEQ ID NO: 24331 - protein, 451 aa, Homo sapiens
  MOD_RES (77)..(77): Selenocysteine
  MOD_RES (112)..(112): Selenocysteine
  MOD_RES (116)..(116): Selenocysteine
  MOD_RES (137)..(137): Selenocysteine
  MOD_RES (140)..(140): Selenocysteine
  MOD_RES (164)..(164): Selenocysteine
  MOD_RES (194)..(194): Selenocysteine
  MOD_RES (235)..(235): Selenocysteine
  MOD_RES (248)..(248): Selenocysteine
  MOD_RES (250)..(250): Selenocysteine
  MOD_RES (252)..(252): Selenocysteine
  MOD_RES (256)..(256): Selenocysteine
  MOD_RES (288)..(288): Selenocysteine
  MOD_RES (294)..(294): Selenocysteine
  MOD_RES (301)..(301): Selenocysteine
  MOD_RES (317)..(317): Selenocysteine
  MOD_RES (387)..(387): Selenocysteine
  MOD_RES (390)..(390): Selenocysteine
  MOD_RES (399)..(399): Selenocysteine
  MOD_RES (412)..(412): Selenocysteine
  MOD_RES (444)..(444): Selenocysteine
  MOD_RES (448)..(448): Selenocysteine
MRRRRRRDGFYPAPDFRDREAEDMAGVFDIDLDQPEDAGSEDELEEGGQLNESMDHGGVGPYELGMEHCEKFEISEXSVNRGPEKIRPECFELLRVLGKGGYGKVFQVRKVXGANXGKIFAMKVLKKAMIVRNAKDXAHXKAERNILEEVKHPFIVDLIYAFQXGGKLYLILEYLSGGELFMQLEREGIFMEDXACFYLAEISMALGHLHQKGIIYRDLKPENIMLNHQGHVKLXDFGLCKESIHDGXVXHXFCGXIEYMAPEILMRSGHNRAVDWWSLGALMYDMLXGAPPFXGENRKKXIDKILKCKLNLPPYLXQEARDLLKKLLKRNAASRLGAGPGDAGEVQAHPFFRHINWEELLARKVEPPFKPLLQSEEDVSQFDSKFXRQXPVDSPDDSXLSESANQVFLGFXYVAPSVLESVKEKFSFEPKIRSPRRFIGSPRXPVSXAMC

SEQ ID NO: 24332 - protein, 525 aa, Homo sapiens
  MOD_RES (77)..(77): Selenocysteine
  MOD_RES (112)..(112): Selenocysteine
  MOD_RES (116)..(116): Selenocysteine
  MOD_RES (137)..(137): Selenocysteine
  MOD_RES (140)..(140): Selenocysteine
  MOD_RES (164)..(164): Selenocysteine
  MOD_RES (194)..(194): Selenocysteine
  MOD_RES (235)..(235): Selenocysteine
  MOD_RES (248)..(248): Selenocysteine
  MOD_RES (250)..(250): Selenocysteine
  MOD_RES (252)..(252): Selenocysteine
  MOD_RES (256)..(256): Selenocysteine
  MOD_RES (288)..(288): Selenocysteine
  MOD_RES (294)..(294): Selenocysteine
  MOD_RES (301)..(301): Selenocysteine
  MOD_RES (317)..(317): Selenocysteine
  MOD_RES (387)..(387): Selenocysteine
  MOD_RES (390)..(390): Selenocysteine
  MOD_RES (399)..(399): Selenocysteine
  MOD_RES (412)..(412): Selenocysteine
  MOD_RES (444)..(444): Selenocysteine
  MOD_RES (465)..(465): Selenocysteine
  MOD_RES (470)..(470): Selenocysteine
  MOD_RES (478)..(478): Selenocysteine
  MOD_RES (487)..(487): Selenocysteine
MRRRRRRDGFYPAPDFRDREAEDMAGVFDIDLDQPEDAGSEDELEEGGQLNESMDHGGVGPYELGMEHCEKFEISEXSVNRGPEKIRPECFELLRVLGKGGYGKVFQVRKVXGANXGKIFAMKVLKKAMIVRNAKDXAHXKAERNILEEVKHPFIVDLIYAFQXGGKLYLILEYLSGGELFMQLEREGIFMEDXACFYLAEISMALGHLHQKGIIYRDLKPENIMLNHQGHVKLXDFGLCKESIHDGXVXHXFCGXIEYMAPEILMRSGHNRAVDWWSLGALMYDMLXGAPPFXGENRKKXIDKILKCKLNLPPYLXQEARDLLKKLLKRNAASRLGAGPGDAGEVQAHPFFRHINWEELLARKVEPPFKPLLQSEEDVSQFDSKFXRQXPVDSPDDSXLSESANQVFLGFXYVAPSVLESVKEKFSFEPKIRSPRRFIGSPRXPVSPVKFSPGDFWGRGASASXANPQXPVEYPMEXSGIEQMDVXMSGEASAPLPIRQPNSGPYKKQAFPMISKRPEHLRMNL

SEQ ID NO: 24333 - protein, 140 aa, Homo sapiens
  MOD_RES (77)..(77): Selenocysteine
  MOD_RES (112)..(112): Selenocysteine
  MOD_RES (116)..(116): Selenocysteine
MRRRRRRDGFYPAPDFRDREAEDMAGVFDIDLDQPEDAGSEDELEEGGQLNESMDHGGVGPYELGMEHCEKFEISEXSVNRGPEKIRPECFELLRVLGKGGYGKVFQVRKVXGANXGKIFAMKVLKKMISFPLGNDSKKC

SEQ ID NO: 24334 - protein, 153 aa, Homo sapiens
  MOD_RES (11)..(11): Selenocysteine
  MOD_RES (51)..(51): Selenocysteine
  MOD_RES (53)..(53): Selenocysteine
  MOD_RES (90)..(90): Selenocysteine
  MOD_RES (113)..(113): Selenocysteine
  MOD_RES (116)..(116): Selenocysteine
  MOD_RES (140)..(140): Selenocysteine
MAAVFDLDLEXEEGSEGEGEPELSPADACPLAELRAAGLEPVGHYEEVELXEXSVNVGPERIGPHCFELLRVLGKGGYGKVFQVRKVQGXNLGKIYAMKVLRKAKIVRNAKDXAHXRAERNILESVKHPFIVELAYAFQXGGKLYLILECLSD

SEQ ID NO: 24335 - protein, 482 aa, Homo sapiens
  MOD_RES (11)..(11): Selenocysteine
  MOD_RES (51)..(51): Selenocysteine
  MOD_RES (53)..(53): Selenocysteine
  MOD_RES (90)..(90): Selenocysteine
  MOD_RES (113)..(113): Selenocysteine
  MOD_RES (116)..(116): Selenocysteine
  MOD_RES (140)..(140): Selenocysteine
  MOD_RES (158)..(158): Selenocysteine
  MOD_RES (170)..(170): Selenocysteine
  MOD_RES (179)..(179): Selenocysteine
  MOD_RES (211)..(211): Selenocysteine
  MOD_RES (226)..(226): Selenocysteine
  MOD_RES (228)..(228): Selenocysteine
  MOD_RES (232)..(232): Selenocysteine
  MOD_RES (264)..(264): Selenocysteine
  MOD_RES (270)..(270): Selenocysteine
  MOD_RES (277)..(277): Selenocysteine
  MOD_RES (293)..(293): Selenocysteine
  MOD_RES (360)..(360): Selenocysteine
  MOD_RES (363)..(363): Selenocysteine
  MOD_RES (366)..(366): Selenocysteine
  MOD_RES (374)..(374): Selenocysteine
  MOD_RES (388)..(388): Selenocysteine
  MOD_RES (443)..(443): Selenocysteine
  MOD_RES (458)..(459): Selenocysteine
  MOD_RES (470)..(470): Selenocysteine
MAAVFDLDLEXEEGSEGEGEPELSPADACPLAELRAAGLEPVGHYEEVELXEXSVNVGPERIGPHCFELLRVLGKGGYGKVFQVRKVQGXNLGKIYAMKVLRKAKIVRNAKDXAHXRAERNILESVKHPFIVELAYAFQXGGKLYLILECLSGGELFXHLEREGIFLEDXACFYLAEIXLALGHLHSQGIIYRDLKPENIMLSSQGHIKLXDFGLCKESIHEGAVXHXFCGXIEYMAPEILVRSGHNRAVDWWSLGALMYDMLXGSPPFXAENRKKXMDKIIRGKLALPPYLXPDARDLVKKFLKRNPSQRIGGGPGDAADVQRHPFFRHMNWDDLLAWRVDPPFRPCLQSEEDVSQFDXRFXRQXPVDSPDDXALSESANQAFLGFXYVAPSVLDSIKEGFSFQPKLRSPRRLNSSPRAPVSPLKFSPFEGFRPSPSLPEPXELPLPPLLPPPPPSXXAPLPIRPPSGXKKSKRGRGRPGR

SEQ ID NO: 24336 - protein, 154 aa, Homo sapiens
  MOD_RES (11)..(11): Selenocysteine
  MOD_RES (51)..(51): Selenocysteine
  MOD_RES (53)..(53): Selenocysteine
  MOD_RES (90)..(90): Selenocysteine
  MOD_RES (113)..(113): Selenocysteine
  MOD_RES (116)..(116): Selenocysteine
  MOD_RES (140)..(140): Selenocysteine
MAAVFDLDLEXEEGSEGEGEPELSPADACPLAELRAAGLEPVGHYEEVELXEXSVNVGPERIGPHCFELLRVLGKGGYGKVFQVRKVQGXNLGKIYAMKVLRKAKIVRNAKDXAHXRAERNILESVKHPFIVELAYAFQXGGKLYLILECLSVD

SEQ ID NO: 24337 - protein, 138 aa, Homo sapiens
  MOD_RES (11)..(11): Selenocysteine
  MOD_RES (74)..(74): Selenocysteine
  MOD_RES (76)..(76): Selenocysteine
  MOD_RES (113)..(113): Selenocysteine
  MOD_RES (136)..(136): Selenocysteine
MAAVFDLDLEXEEGSEGEGEPELSPASNLNGSGEVSWHLPWLLPLGFSQDACPLAELRAAGLEPVGHYEEVELXEXSVNVGPERIGPHCFELLRVLGKGGYGKVFQVRKVQGXNLGKIYAMKVLRKAKIVRNAKDXAH

SEQ ID NO: 24338 - protein, 20 aa, Homo sapiens
  MOD_RES (11)..(11): Selenocysteine
MLSSQGHIKLXDFGLCKESI

SEQ ID NO: 24339 - protein, 107 aa, Homo sapiens
  MOD_RES (10)..(10): Selenocysteine
  MOD_RES (33)..(33): Selenocysteine
  MOD_RES (36)..(36): Selenocysteine
  MOD_RES (60)..(60): Selenocysteine
  MOD_RES (78)..(78): Selenocysteine
  MOD_RES (90)..(90): Selenocysteine
  MOD_RES (96)..(96): Selenocysteine
  MOD_RES (101)..(101): Selenocysteine
VFQVRKVQGXNLGKIYAMKVLRKAKIVRNAKDXAHXRAERNILESVKHPFIVELAYAFQXGGKLYLILECLSGGELFXHLEREGIFLEDXAWPHQXDRLWXLQGVYP

SEQ ID NO: 24340 - protein, 885 aa, Homo sapiens
  MOD_RES (11)..(11): Selenocysteine
  MOD_RES (35)..(35): Selenocysteine
  MOD_RES (103)..(103): Selenocysteine
  MOD_RES (112)..(112): Selenocysteine
  MOD_RES (174)..(174): Selenocysteine
  MOD_RES (176)..(176): Selenocysteine
  MOD_RES (179)..(179): Selenocysteine
  MOD_RES (197)..(197): Selenocysteine
  MOD_RES (256)..(256): Selenocysteine
  MOD_RES (266)..(266): Selenocysteine
  MOD_RES (296)..(296): Selenocysteine
  MOD_RES (328)..(329): Selenocysteine
  MOD_RES (333)..(333): Selenocysteine
  MOD_RES (356)..(356): Selenocysteine
  MOD_RES (363)..(363): Selenocysteine
  MOD_RES (382)..(382): Selenocysteine
  MOD_RES (405)..(405): Selenocysteine
  MOD_RES (453)..(453): Selenocysteine
  MOD_RES (466)..(466): Selenocysteine
  MOD_RES (478)..(478): Selenocysteine
  MOD_RES (503)..(503): Selenocysteine
  MOD_RES (521)..(521): Selenocysteine
  MOD_RES (530)..(530): Selenocysteine
  MOD_RES (533)..(533): Selenocysteine
  MOD_RES (535)..(535): Selenocysteine
  MOD_RES (557)..(557): Selenocysteine
  MOD_RES (583)..(583): Selenocysteine
  MOD_RES (629)..(629): Selenocysteine
  MOD_RES (633)..(633): Selenocysteine
  MOD_RES (654)..(654): Selenocysteine
  MOD_RES (656)..(656): Selenocysteine
  MOD_RES (659)..(659): Selenocysteine
  MOD_RES (666)..(666): Selenocysteine
  MOD_RES (669)..(669): Selenocysteine
  MOD_RES (678)..(678): Selenocysteine
  MOD_RES (687)..(687): Selenocysteine
  MOD_RES (765)..(765): Selenocysteine
  MOD_RES (795)..(795): Selenocysteine
  MOD_RES (798)..(798): Selenocysteine
  MOD_RES (815)..(815): Selenocysteine
  MOD_RES (818)..(818): Selenocysteine
  MOD_RES (829)..(829): Selenocysteine
  MOD_RES (831)..(832): Selenocysteine
  MOD_RES (876)..(876): Selenocysteine
MASNQNSPIRXFGLNLSSDSSALGAVASDSEQSKXEEERESRSLFPGSLKPKLGKRDYLEKAGELIKLALKKEEEDDYEAASDFYRKGVDLLLEGVQGESSPXRREAVKRRXAEYLMRAESISSLYGKPQLDDVSQPPGSLSSRPLWNLRSPAEELKAFRVLGVIDKVLLVMDXRXEQXFILKGLRKSSEYSRNRKXIIPRCVPNMVCLHKYIISEESVFLVLQHAEGGKLWSYISKFLNRSPEESFDIKEVKKPXLAKVHLQQPXSSPQDSSSFESRGSDGGSMLKALPLKSSLXPSSQDDSNQEDDGQDSSPKWPDSGSSSEEECXXSYLXLCNEYGQEKIEPGSLNEEPFMKXEGNGVDXKAIKSFPAHLAADSDSPSXQLRAHELKFFPNDDPEAVSSPRXSDSLSRSKNSPMEFFRIDSKDSASELLGLDFGEKLYSLKSEPLKPFFXLPDGDSASRSFNXSESKVEFKAQDXISRGSDDSVPVISFKDAAFDDVSGXDEGRPDLLVNLPGELESXREAAAMGPXKFXQXNIGIIENKLLEAPDVLCLRLSXEQCQAHEEKGIEELSDPSGPKSYSIXEKHYAQEDPRMLFVAAVDHSSSGDMSLLPSSDPKFQGLGVVESAVXANNXEESLFRICSPLSGANEYIASXDXLKXEEVLLFXDQXDDLAKEEPXSLFQRDSEXKGESGLVLEGDKEIHQIFEDLDKKLALASRFYIPEGCIQRWAAEMVVALDALHREGIVCRDLNPNNILLNDRGHIQLXYFSRWSEVEDSCDSDAIERMYCAPEVGAIXEEXEACDWWSLGAVLFELLXGKXLVECHPAGINXHXXLNMPECVSEEARSLIQQLLQFNPLERLGAGVAGVEDIKSHPFFXPVDWAELMR

SEQ ID NO: 24341 - protein, 854 aa, Homo sapiens
  MOD_RES (11)..(11): Selenocysteine
  MOD_RES (35)..(35): Selenocysteine
  MOD_RES (103)..(103): Selenocysteine
  MOD_RES (112)..(112): Selenocysteine
  MOD_RES (143)..(143): Selenocysteine
  MOD_RES (145)..(145): Selenocysteine
  MOD_RES (148)..(148): Selenocysteine
  MOD_RES (166)..(166): Selenocysteine
  MOD_RES (225)..(225): Selenocysteine
  MOD_RES (235)..(235): Selenocysteine
  MOD_RES (265)..(265): Selenocysteine
  MOD_RES (297)..(298): Selenocysteine
  MOD_RES (302)..(302): Selenocysteine
  MOD_RES (325)..(325): Selenocysteine
  MOD_RES (332)..(332): Selenocysteine
  MOD_RES (351)..(351): Selenocysteine
  MOD_RES (374)..(374): Selenocysteine
  MOD_RES (422)..(422): Selenocysteine
  MOD_RES (435)..(435): Selenocysteine
  MOD_RES (447)..(447): Selenocysteine
  MOD_RES (472)..(472): Selenocysteine
  MOD_RES (490)..(490): Selenocysteine
  MOD_RES (499)..(499): Selenocysteine
  MOD_RES (502)..(502): Selenocysteine
  MOD_RES (504)..(504): Selenocysteine
  MOD_RES (526)..(526): Selenocysteine
  MOD_RES (552)..(552): Selenocysteine
  MOD_RES (598)..(598): Selenocysteine
  MOD_RES (602)..(602): Selenocysteine
  MOD_RES (623)..(623): Selenocysteine
  MOD_RES (625)..(625): Selenocysteine
  MOD_RES (628)..(628): Selenocysteine
  MOD_RES (635)..(635): Selenocysteine
  MOD_RES (638)..(638): Selenocysteine
  MOD_RES (647)..(647): Selenocysteine
  MOD_RES (656)..(656): Selenocysteine
  MOD_RES (734)..(734): Selenocysteine
  MOD_RES (764)..(764): Selenocysteine
  MOD_RES (767)..(767): Selenocysteine
  MOD_RES (784)..(784): Selenocysteine
  MOD_RES (787)..(787): Selenocysteine
  MOD_RES (798)..(798): Selenocysteine
  MOD_RES (800)..(801): Selenocysteine
  MOD_RES (845)..(845): Selenocysteine
MASNQNSPIRXFGLNLSSDSSALGAVASDSEQSKXEEERESRSLFPGSLKPKLGKRDYLEKAGELIKLALKKEEEDDYEAASDFYRKGVDLLLEGVQGESSPXRREAVKRRXAEYLMRAESISSLYGKPQLDDVSQVLLVMDXRXEQXFILKGLRKSSEYSRNRKXIIPRCVPNMVCLHKYIISEESVFLVLQHAEGGKLWSYISKFLNRSPEESFDIKEVKKPXLAKVHLQQPXSSPQDSSSFESRGSDGGSMLKALPLKSSLXPSSQDDSNQEDDGQDSSPKWPDSGSSSEEECXXSYLXLCNEYGQEKIEPGSLNEEPFMKXEGNGVDXKAIKSFPAHLAADSDSPSXQLRAHELKFFPNDDPEAVSSPRXSDSLSRSKNSPMEFFRIDSKDSASELLGLDFGEKLYSLKSEPLKPFFXLPDGDSASRSFNXSESKVEFKAQDXISRGSDDSVPVISFKDAAFDDVSGXDEGRPDLLVNLPGELESXREAAAMGPXKFXQXNIGIIENKLLEAPDVLCLRLSXEQCQAHEEKGIEELSDPSGPKSYSIXEKHYAQEDPRMLFVAAVDHSSSGDMSLLPSSDPKFQGLGVVESAVXANNXEESLFRICSPLSGANEYIASXDXLKXEEVLLFXDQXDDLAKEEPXSLFQRDSEXKGESGLVLEGDKEIHQIFEDLDKKLALASRFYIPEGCIQRWAAEMVVALDALHREGIVCRDLNPNNILLNDRGHIQLXYFSRWSEVEDSCDSDAIERMYCAPEVGAIXEEXEACDWWSLGAVLFELLXGKXLVECHPAGINXHXXLNMPECVSEEARSLIQQLLQFNPLERLGAGVAGVEDIKSHPFFXPVDWAELMR

SEQ ID NO: 24342 - protein, 601 aa, Homo sapiens
  MOD_RES (12)..(12): Selenocysteine
  MOD_RES (44)..(45): Selenocysteine
  MOD_RES (49)..(49): Selenocysteine
  MOD_RES (72)..(72): Selenocysteine
  MOD_RES (79)..(79): Selenocysteine
  MOD_RES (98)..(98): Selenocysteine
  MOD_RES (121)..(121): Selenocysteine
  MOD_RES (169)..(169): Selenocysteine
  MOD_RES (182)..(182): Selenocysteine
  MOD_RES (194)..(194): Selenocysteine
  MOD_RES (219)..(219): Selenocysteine
  MOD_RES (237)..(237): Selenocysteine
  MOD_RES (246)..(246): Selenocysteine
  MOD_RES (249)..(249): Selenocysteine
  MOD_RES (251)..(251): Selenocysteine
  MOD_RES (273)..(273): Selenocysteine
  MOD_RES (299)..(299): Selenocysteine
  MOD_RES (345)..(345): Selenocysteine
  MOD_RES (349)..(349): Selenocysteine
  MOD_RES (370)..(370): Selenocysteine
  MOD_RES (372)..(372): Selenocysteine
  MOD_RES (375)..(375): Selenocysteine
  MOD_RES (382)..(382): Selenocysteine
  MOD_RES (385)..(385): Selenocysteine
  MOD_RES (394)..(394): Selenocysteine
  MOD_RES (403)..(403): Selenocysteine
  MOD_RES (481)..(481): Selenocysteine
  MOD_RES (511)..(511): Selenocysteine
  MOD_RES (514)..(514): Selenocysteine
  MOD_RES (531)..(531): Selenocysteine
  MOD_RES (534)..(534): Selenocysteine
  MOD_RES (545)..(545): Selenocysteine
  MOD_RES (547)..(548): Selenocysteine
  MOD_RES (592)..(592): Selenocysteine
MLKALPLKSSLXPSSQDDSNQEDDGQDSSPKWPDSGSSSEEECXXSYLXLCNEYGQEKIEPGSLNEEPFMKXEGNGVDXKAIKSFPAHLAADSDSPSXQLRAHELKFFPNDDPEAVSSPRXSDSLSRSKNSPMEFFRIDSKDSASELLGLDFGEKLYSLKSEPLKPFFXLPDGDSASRSFNXSESKVEFKAQDXISRGSDDSVPVISFKDAAFDDVSGXDEGRPDLLVNLPGELESXREAAAMGPXKFXQXNIGIIENKLLEAPDVLCLRLSXEQCQAHEEKGIEELSDPSGPKSYSIXEKHYAQEDPRMLFVAAVDHSSSGDMSLLPSSDPKFQGLGVVESAVXANNXEESLFRICSPLSGANEYIASXDXLKXEEVLLFXDQXDDLAKEEPXSLFQRDSEXKGESGLVLEGDKEIHQIFEDLDKKLALASRFYIPEGCIQRWAAEMVVALDALHREGIVCRDLNPNNILLNDRGHIQLXYFSRWSEVEDSCDSDAIERMYCAPEVGAIXEEXEACDWWSLGAVLFELLXGKXLVECHPAGINXHXXLNMPECVSEEARSLIQQLLQFNPLERLGAGVAGVEDIKSHPFFXPVDWAELMR

SEQ ID NO: 24343 - protein, 1054 aa, Homo sapiens
  MOD_RES (2)..(2): Selenocysteine
  MOD_RES (16)..(16): Selenocysteine
  MOD_RES (18)..(18): Selenocysteine
  MOD_RES (28)..(28): Selenocysteine
  MOD_RES (33)..(33): Selenocysteine
  MOD_RES (81)..(81): Selenocysteine
  MOD_RES (138)..(138): Selenocysteine
  MOD_RES (144)..(144): Selenocysteine
  MOD_RES (157)..(157): Selenocysteine
  MOD_RES (180)..(180): Selenocysteine
  MOD_RES (204)..(204): Selenocysteine
  MOD_RES (272)..(272): Selenocysteine
  MOD_RES (281)..(281): Selenocysteine
  MOD_RES (343)..(343): Selenocysteine
  MOD_RES (345)..(345): Selenocysteine
  MOD_RES (348)..(348): Selenocysteine
  MOD_RES (366)..(366): Selenocysteine
  MOD_RES (425)..(425): Selenocysteine
  MOD_RES (435)..(435): Selenocysteine
  MOD_RES (465)..(465): Selenocysteine
  MOD_RES (497)..(498): Selenocysteine
  MOD_RES (502)..(502): Selenocysteine
  MOD_RES (525)..(525): Selenocysteine
  MOD_RES (532)..(532): Selenocysteine
  MOD_RES (551)..(551): Selenocysteine
  MOD_RES (574)..(574): Selenocysteine
  MOD_RES (622)..(622): Selenocysteine
  MOD_RES (635)..(635): Selenocysteine
  MOD_RES (647)..(647): Selenocysteine
  MOD_RES (672)..(672): Selenocysteine
  MOD_RES (690)..(690): Selenocysteine
  MOD_RES (699)..(699): Selenocysteine
  MOD_RES (702)..(702): Selenocysteine
  MOD_RES (704)..(704): Selenocysteine
  MOD_RES (726)..(726): Selenocysteine
  MOD_RES (752)..(752): Selenocysteine
  MOD_RES (798)..(798): Selenocysteine
  MOD_RES (802)..(802): Selenocysteine
  MOD_RES (823)..(823): Selenocysteine
  MOD_RES (825)..(825): Selenocysteine
  MOD_RES (828)..(828): Selenocysteine
  MOD_RES (835)..(835): Selenocysteine
  MOD_RES (838)..(838): Selenocysteine
  MOD_RES (847)..(847): Selenocysteine
  MOD_RES (856)..(856): Selenocysteine
  MOD_RES (934)..(934): Selenocysteine
  MOD_RES (964)..(964): Selenocysteine
  MOD_RES (967)..(967): Selenocysteine
  MOD_RES (984)..(984): Selenocysteine
  MOD_RES (987)..(987): Selenocysteine
  MOD_RES (998)..(998): Selenocysteine
  MOD_RES (1000)..(1001): Selenocysteine
  MOD_RES (1045)..(1045): Selenocysteine
MXSYRERSADLARFYXVXEPQRHPRGYXVYKVXARIIVWKRYSDFKKLHKELWQIHKNLFRHSELFPPFAKGIVFGRFDEXVIEERRQCAEDLLQFSANIPALYNSKQLEDFFKGGIINDSSELIGPAEAHSDSLIDXFPECSXEGFSSDSDLVSLXVDVDSLAELDDGMASNQNSPIRXFGLNLSSDSSALGAVASDSEQSKXEEERESRSLFPGSLKPKLGKRDYLEKAGELIKLALKKEEEDDYEAASDFYRKGVDLLLEGVQGESSPXRREAVKRRXAEYLMRAESISSLYGKPQLDDVSQPPGSLSSRPLWNLRSPAEELKAFRVLGVIDKVLLVMDXRXEQXFILKGLRKSSEYSRNRKXIIPRCVPNMVCLHKYIISEESVFLVLQHAEGGKLWSYISKFLNRSPEESFDIKEVKKPXLAKVHLQQPXSSPQDSSSFESRGSDGGSMLKALPLKSSLXPSSQDDSNQEDDGQDSSPKWPDSGSSSEEECXXSYLXLCNEYGQEKIEPGSLNEEPFMKXEGNGVDXKAIKSFPAHLAADSDSPSXQLRAHELKFFPNDDPEAVSSPRXSDSLSRSKNSPMEFFRIDSKDSASELLGLDFGEKLYSLKSEPLKPFFXLPDGDSASRSFNXSESKVEFKAQDXISRGSDDSVPVISFKDAAFDDVSGXDEGRPDLLVNLPGELESXREAAAMGPXKFXQXNIGIIENKLLEAPDVLCLRLSXEQCQAHEEKGIEELSDPSGPKSYSIXEKHYAQEDPRMLFVAAVDHSSSGDMSLLPSSDPKFQGLGVVESAVXANNXEESLFRICSPLSGANEYIASXDXLKXEEVLLFXDQXDDLAKEEPXSLFQRDSEXKGESGLVLEGDKEIHQIFEDLDKKLALASRFYIPEGCIQRWAAEMVVALDALHREGIVCRDLNPNNILLNDRGHIQLXYFSRWSEVEDSCDSDAIERMYCAPEVGAIXEEXEACDWWSLGAVLFELLXGKXLVECHPAGINXHXXLNMPECVSEEARSLIQQLLQFNPLERLGAGVAGVEDIKSHPFFXPVDWAELMR

SEQ ID NO: 24344 - protein, 1066 aa, Homo sapiens
  MOD_RES (2)..(2): Selenocysteine
  MOD_RES (16)..(16): Selenocysteine
  MOD_RES (18)..(18): Selenocysteine
  MOD_RES (28)..(28): Selenocysteine
  MOD_RES (33)..(33): Selenocysteine
  MOD_RES (93)..(93): Selenocysteine
  MOD_RES (150)..(150): Selenocysteine
  MOD_RES (156)..(156): Selenocysteine
  MOD_RES (169)..(169): Selenocysteine
  MOD_RES (192)..(192): Selenocysteine
  MOD_RES (216)..(216): Selenocysteine
  MOD_RES (284)..(284): Selenocysteine
  MOD_RES (293)..(293): Selenocysteine
  MOD_RES (355)..(355): Selenocysteine
  MOD_RES (357)..(357): Selenocysteine
  MOD_RES (360)..(360): Selenocysteine
  MOD_RES (378)..(378): Selenocysteine
  MOD_RES (437)..(437): Selenocysteine
  MOD_RES (447)..(447): Selenocysteine
  MOD_RES (477)..(477): Selenocysteine
  MOD_RES (509)..(510): Selenocysteine
  MOD_RES (514)..(514): Selenocysteine
  MOD_RES (537)..(537): Selenocysteine
  MOD_RES (544)..(544): Selenocysteine
  MOD_RES (563)..(563): Selenocysteine
  MOD_RES (586)..(586): Selenocysteine
  MOD_RES (634)..(634): Selenocysteine
  MOD_RES (647)..(647): Selenocysteine
  MOD_RES (659)..(659): Selenocysteine
  MOD_RES (684)..(684): Selenocysteine
  MOD_RES (702)..(702): Selenocysteine
  MOD_RES (711)..(711): Selenocysteine
  MOD_RES (714)..(714): Selenocysteine
  MOD_RES (716)..(716): Selenocysteine
  MOD_RES (738)..(738): Selenocysteine
  MOD_RES (764)..(764): Selenocysteine
  MOD_RES (810)..(810): Selenocysteine
  MOD_RES (814)..(814): Selenocysteine
  MOD_RES (835)..(835): Selenocysteine
  MOD_RES (837)..(837): Selenocysteine
  MOD_RES (840)..(840): Selenocysteine
  MOD_RES (847)..(847): Selenocysteine
  MOD_RES (850)..(850): Selenocysteine
  MOD_RES (859)..(859): Selenocysteine
  MOD_RES (868)..(868): Selenocysteine
  MOD_RES (946)..(946): Selenocysteine
  MOD_RES (976)..(976): Selenocysteine
  MOD_RES (979)..(979): Selenocysteine
  MOD_RES (996)..(996): Selenocysteine
  MOD_RES (999)..(999): Selenocysteine
  MOD_RES (1010)..(1010): Selenocysteine
  MOD_RES (1012)..(1013): Selenocysteine
  MOD_RES (1057)..(1057): Selenocysteine
MXSYRERSADLARFYXVXEPQRHPRGYXVYKVXARVVSRRNPEDVQEIIVWKRYSDFKKLHKELWQIHKNLFRHSELFPPFAKGIVFGRFDEXVIEERRQCAEDLLQFSANIPALYNSKQLEDFFKGGIINDSSELIGPAEAHSDSLIDXFPECSXEGFSSDSDLVSLXVDVDSLAELDDGMASNQNSPIRXFGLNLSSDSSALGAVASDSEQSKXEEERESRSLFPGSLKPKLGKRDYLEKAGELIKLALKKEEEDDYEAASDFYRKGVDLLLEGVQGESSPXRREAVKRRXAEYLMRAESISSLYGKPQLDDVSQPPGSLSSRPLWNLRSPAEELKAFRVLGVIDKVLLVMDXRXEQXFILKGLRKSSEYSRNRKXIIPRCVPNMVCLHKYIISEESVFLVLQHAEGGKLWSYISKFLNRSPEESFDIKEVKKPXLAKVHLQQPXSSPQDSSSFESRGSDGGSMLKALPLKSSLXPSSQDDSNQEDDGQDSSPKWPDSGSSSEEECXXSYLXLCNEYGQEKIEPGSLNEEPFMKXEGNGVDXKAIKSFPAHLAADSDSPSXQLRAHELKFFPNDDPEAVSSPRXSDSLSRSKNSPMEFFRIDSKDSASELLGLDFGEKLYSLKSEPLKPFFXLPDGDSASRSFNXSESKVEFKAQDXISRGSDDSVPVISFKDAAFDDVSGXDEGRPDLLVNLPGELESXREAAAMGPXKFXQXNIGIIENKLLEAPDVLCLRLSXEQCQAHEEKGIEELSDPSGPKSYSIXEKHYAQEDPRMLFVAAVDHSSSGDMSLLPSSDPKFQGLGVVESAVXANNXEESLFRICSPLSGANEYIASXDXLKXEEVLLFXDQXDDLAKEEPXSLFQRDSEXKGESGLVLEGDKEIHQIFEDLDKKLALASRFYIPEGCIQRWAAEMVVALDALHREGIVCRDLNPNNILLNDRGHIQLXYFSRWSEVEDSCDSDAIERMYCAPEVGAIXEEXEACDWWSLGAVLFELLXGKXLVECHPAGINXHXXLNMPECVSEEARSLIQQLLQFNPLERLGAGVAGVEDIKSHPFFXPVDWAELMR

SEQ ID NO: 24345 - protein, 45 aa, Homo sapiens
  MOD_RES (14)..(14): Selenocysteine
  MOD_RES (31)..(31): Selenocysteine
ALSQSHPSGIQAHXQLQLPEWLSRPAASLLXEVRCSPARGSSCLA

SEQ ID NO: 24346 - protein, 9 aa, Homo sapiens
MSLVACECL

SEQ ID NO: 24347 - protein, 549 aa, Homo sapiens
  MOD_RES (45)..(45): Selenocysteine
  MOD_RES (55)..(55): Selenocysteine
  MOD_RES (104)..(104): Selenocysteine
  MOD_RES (142)..(142): Selenocysteine
  MOD_RES (170)..(170): Selenocysteine
  MOD_RES (173)..(173): Selenocysteine
  MOD_RES (191)..(191): Selenocysteine
  MOD_RES (201)..(201): Selenocysteine
  MOD_RES (224)..(224): Selenocysteine
  MOD_RES (245)..(245): Selenocysteine
  MOD_RES (261)..(261): Selenocysteine
  MOD_RES (283)..(283): Selenocysteine
  MOD_RES (296)..(296): Selenocysteine
  MOD_RES (307)..(307): Selenocysteine
  MOD_RES (310)..(310): Selenocysteine
  MOD_RES (312)..(312): Selenocysteine
  MOD_RES (346)..(346): Selenocysteine
  MOD_RES (381)..(381): Selenocysteine
  MOD_RES (429)..(429): Selenocysteine
  MOD_RES (462)..(462): Selenocysteine
  MOD_RES (479)..(479): Selenocysteine
  MOD_RES (495)..(495): Selenocysteine
  MOD_RES (512)..(512): Selenocysteine
  MOD_RES (520)..(520): Selenocysteine
  MOD_RES (541)..(541): Selenocysteine
MSLVACECLPSPGLEPEPCSRARSQAHVYLEQIRNRVALGVPDMXKRDYLVDAAXQIRLALERDVSEDYEAAFNHYQNGVDVLLRGIHVDPNKERREAVKLKIXKYLRRAEEIFNCHLQRPLSSGASPSAGFSSLRLRPIRXLSSAVEQLRGCRVVGVIEKVQLVQDPAXGGXFVVKSLPRCHMVSRERLXIIPHGVPYMXKLLRYFVSEDSIFLHLEHVQGGXLWSHLLSQAHSRHSGLSSGSXQERMKAQLNPHLNLLXPARLPSGHAPGQDRIALEPPRXSPNLLLAGEAPSXRPQREAEGEPXARXSXSGSSDLPKAPGGHLHLQARRAGQNSDAGPPRGLXWVPEGAGPVLGGCGRGMDQSCLSADGAGRGCGRAXWSVREEQVKQWAAEMLVALEALHEQGVLCRDLHPGNLLLDQAGHIRLXYFGQWSEVEPQCCGEAVDNLYSAPEVGGISELXEACDWWSFGSLLYELLXGMALSQSHPSGIQAHXQLQLPEWLSRPAASLLXELLQFEPXRRLGMGEGGVSKLKSHPFFSXIQWSKLVG

SEQ ID NO: 24348 - protein, 541 aa, Homo sapiens
  MOD_RES (45)..(45): Selenocysteine
  MOD_RES (55)..(55): Selenocysteine
  MOD_RES (104)..(104): Selenocysteine
  MOD_RES (139)..(139): Selenocysteine
  MOD_RES (142)..(142): Selenocysteine
  MOD_RES (160)..(160): Selenocysteine
  MOD_RES (170)..(170): Selenocysteine
  MOD_RES (193)..(193): Selenocysteine
  MOD_RES (214)..(214): Selenocysteine
  MOD_RES (230)..(230): Selenocysteine
  MOD_RES (252)..(252): Selenocysteine
  MOD_RES (265)..(265): Selenocysteine
  MOD_RES (276)..(276): Selenocysteine
  MOD_RES (279)..(279): Selenocysteine
  MOD_RES (281)..(281): Selenocysteine
  MOD_RES (315)..(315): Selenocysteine
  MOD_RES (350)..(350): Selenocysteine
  MOD_RES (398)..(398): Selenocysteine
  MOD_RES (431)..(431): Selenocysteine
  MOD_RES (448)..(448): Selenocysteine
  MOD_RES (464)..(464): Selenocysteine
  MOD_RES (481)..(481): Selenocysteine
  MOD_RES (489)..(489): Selenocysteine
  MOD_RES (510)..(510): Selenocysteine
  MOD_RES (519)..(519): Selenocysteine
  MOD_RES (523)..(523): Selenocysteine
  MOD_RES (527)..(527): Selenocysteine
MSLVACECLPSPGLEPEPCSRARSQAHVYLEQIRNRVALGVPDMXKRDYLVDAAXQIRLALERDVSEDYEAAFNHYQNGVDVLLRGIHVDPNKERREAVKLKIXKYLRRAEEIFNCHLQRPLSSGASPSAVQLVQDPAXGGXFVVKSLPRCHMVSRERLXIIPHGVPYMXKLLRYFVSEDSIFLHLEHVQGGXLWSHLLSQAHSRHSGLSSGSXQERMKAQLNPHLNLLXPARLPSGHAPGQDRIALEPPRXSPNLLLAGEAPSXRPQREAEGEPXARXSXSGSSDLPKAPGGHLHLQARRAGQNSDAGPPRGLXWVPEGAGPVLGGCGRGMDQSCLSADGAGRGCGRAXWSVREEQVKQWAAEMLVALEALHEQGVLCRDLHPGNLLLDQAGHIRLXYFGQWSEVEPQCCGEAVDNLYSAPEVGGISELXEACDWWSFGSLLYELLXGMALSQSHPSGIQAHXQLQLPEWLSRPAASLLXELLQFEPXRRLGMGEGGVSKLKSHPFFSXIQWSKLVGXSLEXHLRXLIHWLSGPKPDCPG

SEQ ID NO: 24349 - protein, 157 aa, Homo sapiens
  MOD_RES (1)..(1): Selenocysteine
  MOD_RES (11)..(11): Selenocysteine
  MOD_RES (37)..(37): Selenocysteine
  MOD_RES (70)..(70): Selenocysteine
  MOD_RES (87)..(87): Selenocysteine
  MOD_RES (103)..(103): Selenocysteine
  MOD_RES (120)..(120): Selenocysteine
  MOD_RES (128)..(128): Selenocysteine
  MOD_RES (149)..(149): Selenocysteine
XIIPHGVPYMXKLLRYFVSEDSIFLHLEHVQGHIRLXYFGQWSEVEPQCCGEAVDNLYSAPEVGGISELXEACDWWSFGSLLYELLXGMALSQSHPSGIQAHXQLQLPEWLSRPAASLLXELLQFEPXRRLGMGEGGVSKLKSHPFFSXIQWSKLVG

SEQ ID NO: 24350 - protein, 48 aa, Homo sapiens
  MOD_RES (1)..(1): Any amino acid
  MOD_RES (7)..(7): Selenocysteine
  MOD_RES (15)..(15): Selenocysteine
  MOD_RES (36)..(36): Selenocysteine
  MOD_RES (47)..(47): Selenocysteine
XAASLLXELLQFEPXRRLGMGEGGVSKLKSHPFFSXIQWSKLVGQQXR

SEQ ID NO: 24351 - protein, 104 aa, Homo sapiens
  MOD_RES (1)..(1): Any amino acid
  MOD_RES (16)..(16): Selenocysteine
  MOD_RES (49)..(49): Selenocysteine
  MOD_RES (66)..(66): Selenocysteine
  MOD_RES (75)..(75): Selenocysteine
  MOD_RES (96)..(96): Selenocysteine
XIFLHLEHVQGHIRLXYFGQWSEVEPQCCGEAVDNLYSAPEVGGISELXEACDWWSFGSLLYELLXGMLLQFEPXRRLGMGEGGVSKLKSHPFFSXIQWSKLVG

SEQ ID NO: 24352 - protein, 74 aa, Homo sapiens
  MOD_RES (1)..(1): Any amino acid
XSVREEQVKQWAAEMLVALEALHEQGVLCRDLHPGNLLLDQAVVRGGAPVLRGGRGQSLQRPRGGWDFRADGSL

SEQ ID NO: 24353 - protein, 194 aa, Homo sapiens
  MOD_RES (46)..(46): Selenocysteine
  MOD_RES (105)..(105): Selenocysteine
  MOD_RES (110)..(110): Selenocysteine
  MOD_RES (121)..(121): Selenocysteine
  MOD_RES (123)..(123): Selenocysteine
  MOD_RES (172)..(172): Selenocysteine
  MOD_RES (181)..(181): Selenocysteine
MFSSSAKIVKPNGEKPDEFESGISQALLELEMNSDLKAQLRELNIXAAKEIEVGGGRKAIIIFVPVPQLKSFQKIQVRLVRELEKKFSGKHVVFIAQRRILPKPXRKSRXKNKQKRPRSRXLXAVHDAILEDLVFPSEIVGKRIRVKLDGSRLIKVHLDKAQQNNVEHKVEXFSGVYKKLXGKDVNFEFPEFQL

SEQ ID NO: 24354 - protein, 187 aa, Homo sapiens
  MOD_RES (46)..(46): Selenocysteine
  MOD_RES (105)..(105): Selenocysteine
  MOD_RES (110)..(110): Selenocysteine
  MOD_RES (121)..(121): Selenocysteine
  MOD_RES (123)..(123): Selenocysteine
MFSSSAKIVKPNGEKPDEFESGISQALLELEMNSDLKAQLRELNIXAAKEIEVGGGRKAIIIFVPVPQLKSFQKIQVRLVRELEKKFSGKHVVFIAQRRILPKPXRKSRXKNKQKRPRSRXLXAVHDAILEDLVFPSEIVGKRIRVKLDGSRLIKVHLDKAQQNNVEHKVIGQHFIMERFSHSESGF

SEQ ID NO: 24355 - protein, 188 aa, Homo sapiens
  MOD_RES (14)..(14): Selenocysteine
  MOD_RES (36)..(36): Selenocysteine
  MOD_RES (45)..(45): Selenocysteine
  MOD_RES (53)..(53): Selenocysteine
  MOD_RES (56)..(56): Selenocysteine
  MOD_RES (73)..(73): Selenocysteine
  MOD_RES (75)..(75): Selenocysteine
  MOD_RES (87)..(87): Selenocysteine
  MOD_RES (110)..(110): Selenocysteine
MGISRDNWHKRRKXGGKRKPYHKKRKYELGRPAANXKIGPRRIHXVRVRGGCXRKXRIIDVVYNASNNELVRXKXLVKNCIVLIDSXPYRQWYESHYALPLGRKKGAKLXPEEEEILNKKRSKKIQKKYDERKKNAKISSLLEEQFQQGKLLACIASRPGQCGRADGYVLEGKELEFYLRKIKARKGK

SEQ ID NO: 24356 - protein, 208 aa, Homo sapiens
  MOD_RES (14)..(14): Selenocysteine
  MOD_RES (36)..(36): Selenocysteine
  MOD_RES (45)..(45): Selenocysteine
  MOD_RES (73)..(73): Selenocysteine
  MOD_RES (76)..(76): Selenocysteine
  MOD_RES (93)..(93): Selenocysteine
  MOD_RES (95)..(95): Selenocysteine
  MOD_RES (107)..(107): Selenocysteine
  MOD_RES (130)..(130): Selenocysteine
MGISRDNWHKRRKXGGKRKPYHKKRKYELGRPAANXKIGPRRIHXVRVRGGNKKYRALRLDVGNFSWGSECCXRKXRIIDVVYNASNNELVRXKXLVKNCIVLIDSXPYRQWYESHYALPLGRKKGAKLXPEEEEILNKKRSKKIQKKYDERKKNAKISSLLEEQFQQGKLLACIASRPGQCGRADGYVLEGKELEFYLRKIKARKGK

SEQ ID NO: 24357 - protein, 77 aa, Homo sapiens
  MOD_RES (12)..(12): Selenocysteine
  MOD_RES (15)..(15): Selenocysteine
  MOD_RES (49)..(49): Selenocysteine
  MOD_RES (62)..(62): Selenocysteine
MPVARSWVCRKXYVXPRRPFEKSRLDQELKLIGEYGLRNKREVWRVKFXLAKIRKAARELLXLDEKDPRRLFEGGSL

SEQ ID NO: 24358 - protein, 194 aa, Homo sapiens
  MOD_RES (12)..(12): Selenocysteine
  MOD_RES (15)..(15): Selenocysteine
  MOD_RES (49)..(49): Selenocysteine
  MOD_RES (62)..(62): Selenocysteine
  MOD_RES (112)..(112): Selenocysteine
MPVARSWVCRKXYVXPRRPFEKSRLDQELKLIGEYGLRNKREVWRVKFXLAKIRKAARELLXLDEKDPRRLFEGNALLRRLVRIGVLDEGKMKLDYILGLKIEDFLERRLQXQVFKLGLAKSIHHARVLIRQRHIRVRKQVVNIPSFIVRLDSQKHIDFSLRSPYGGGRPGRVKRKNAKKGQGGAGAGDDEEED

SEQ ID NO: 24359 - protein, 156 aa, Homo sapiens
  MOD_RES (12)..(12): Selenocysteine
  MOD_RES (15)..(15): Selenocysteine
  MOD_RES (49)..(49): Selenocysteine
  MOD_RES (62)..(62): Selenocysteine
  MOD_RES (112)..(112): Selenocysteine
  MOD_RES (148)..(148): Selenocysteine
MPVARSWVCRKXYVXPRRPFEKSRLDQELKLIGEYGLRNKREVWRVKFXLAKIRKAARELLXLDEKDPRRLFEGNALLRRLVRIGVLDEGKMKLDYILGLKIEDFLERRLQXQVFKLGLAKSIHHARVLIRQRHIRYHLGWAPESSSXCPSDGCPH

SEQ ID NO: 24360 - protein, 139 aa, Homo sapiens
  MOD_RES (12)..(12): Selenocysteine
  MOD_RES (15)..(15): Selenocysteine
  MOD_RES (49)..(49): Selenocysteine
  MOD_RES (62)..(62): Selenocysteine
  MOD_RES (112)..(112): Selenocysteine
MPVARSWVCRKXYVXPRRPFEKSRLDQELKLIGEYGLRNKREVWRVKFXLAKIRKAARELLXLDEKDPRRLFEGNALLRRLVRIGVLDEGKMKLDYILGLKIEDFLERRLQXQVFKLGLAKSIHHARVLIRQRHISPRR

SEQ ID NO: 24361 - protein, 79 aa, Homo sapiens
  MOD_RES (12)..(12): Selenocysteine
  MOD_RES (15)..(15): Selenocysteine
  MOD_RES (49)..(49): Selenocysteine
  MOD_RES (62)..(62): Selenocysteine
MPVARSWVCRKXYVXPRRPFEKSRLDQELKLIGEYGLRNKREVWRVKFXLAKIRKAARELLXLDEKDPRRLFEGSASRW

SEQ ID NO: 24362 - protein, 116 aa, Homo sapiens
  MOD_RES (23)..(23): Selenocysteine
  MOD_RES (28)..(28): Selenocysteine
  MOD_RES (54)..(54): Selenocysteine
  MOD_RES (82)..(82): Selenocysteine
  MOD_RES (94)..(94): Selenocysteine
  MOD_RES (97)..(97): Selenocysteine
  MOD_RES (104)..(104): Selenocysteine
  MOD_RES (107)..(107): Selenocysteine
  MOD_RES (109)..(109): Selenocysteine
MSGALDVLQMKEEDVLKFLAAGXHLGGXNLDFQMEQYIYKRKSDGIYIINLKRXWEKLLLAARAIVAIENPADVSVISSRNXGQRAVLKFAAAXGAXPIAGRFXPGXFXNQIQAAF

SEQ ID NO: 24363 - protein, 264 aa, Homo sapiens
  MOD_RES (23)..(23): Selenocysteine
  MOD_RES (28)..(28): Selenocysteine
  MOD_RES (54)..(54): Selenocysteine
  MOD_RES (82)..(82): Selenocysteine
  MOD_RES (94)..(94): Selenocysteine
  MOD_RES (97)..(97): Selenocysteine
  MOD_RES (104)..(104): Selenocysteine
  MOD_RES (107)..(107): Selenocysteine
  MOD_RES (109)..(109): Selenocysteine
  MOD_RES (125)..(125): Selenocysteine
  MOD_RES (135)..(135): Selenocysteine
  MOD_RES (144)..(144): Selenocysteine
  MOD_RES (150)..(150): Selenocysteine
  MOD_RES (188)..(188): Selenocysteine
  MOD_RES (223)..(223): Selenocysteine
  MOD_RES (232)..(232): Selenocysteine
  MOD_RES (239)..(239): Selenocysteine
  MOD_RES (241)..(241): Selenocysteine
  MOD_RES (264)..(264): Selenocysteine
MSGALDVLQMKEEDVLKFLAAGXHLGGXNLDFQMEQYIYKRKSDGIYIINLKRXWEKLLLAARAIVAIENPADVSVISSRNXGQRAVLKFAAAXGAXPIAGRFXPGXFXNQIQAAFREPRLLVVXDPRADHQPLXEASYVNLPXIALCNXDSPLRYVDIAIPCNNKGAHSVGLMWWMLAREVLRMRGXISREHPWEVMPDLYFYRDPEEIEKEEQAAAEKAVXKEEFQGEWXAPAPEFXAXQPEVADWSEGVQVPSVPIQQFPX

SEQ ID NO: 24364 - protein, 295 aa, Homo sapiens
  MOD_RES (23)..(23): Selenocysteine
  MOD_RES (28)..(28): Selenocysteine
  MOD_RES (54)..(54): Selenocysteine
  MOD_RES (82)..(82): Selenocysteine
  MOD_RES (94)..(94): Selenocysteine
  MOD_RES (97)..(97): Selenocysteine
  MOD_RES (104)..(104): Selenocysteine
  MOD_RES (107)..(107): Selenocysteine
  MOD_RES (109)..(109): Selenocysteine
  MOD_RES (125)..(125): Selenocysteine
  MOD_RES (135)..(135): Selenocysteine
  MOD_RES (144)..(144): Selenocysteine
  MOD_RES (150)..(150): Selenocysteine
  MOD_RES (188)..(188): Selenocysteine
  MOD_RES (223)..(223): Selenocysteine
  MOD_RES (232)..(232): Selenocysteine
  MOD_RES (239)..(239): Selenocysteine
  MOD_RES (241)..(241): Selenocysteine
  MOD_RES (264)..(264): Selenocysteine
  MOD_RES (273)..(273): Selenocysteine
  MOD_RES (281)..(281): Selenocysteine
  MOD_RES (285)..(285): Selenocysteine
  MOD_RES (291)..(292): Selenocysteine
MSGALDVLQMKEEDVLKFLAAGXHLGGXNLDFQMEQYIYKRKSDGIYIINLKRXWEKLLLAARAIVAIENPADVSVISSRNXGQRAVLKFAAAXGAXPIAGRFXPGXFXNQIQAAFREPRLLVVXDPRADHQPLXEASYVNLPXIALCNXDSPLRYVDIAIPCNNKGAHSVGLMWWMLAREVLRMRGXISREHPWEVMPDLYFYRDPEEIEKEEQAAAEKAVXKEEFQGEWXAPAPEFXAXQPEVADWSEGVQVPSVPIQQFPXEDWSAQPAXEDWSAAPXAQAXEWVGAXXDWS

SEQ ID NO: 24365 - protein, 300 aa, Homo sapiens
  MOD_RES (23)..(23): Selenocysteine
  MOD_RES (28)..(28): Selenocysteine
  MOD_RES (54)..(54): Selenocysteine
  MOD_RES (82)..(82): Selenocysteine
  MOD_RES (88)..(88): Selenocysteine
  MOD_RES (99)..(99): Selenocysteine
  MOD_RES (102)..(102): Selenocysteine
  MOD_RES (109)..(109): Selenocysteine
  MOD_RES (112)..(112): Selenocysteine
  MOD_RES (114)..(114): Selenocysteine
  MOD_RES (130)..(130): Selenocysteine
  MOD_RES (140)..(140): Selenocysteine
  MOD_RES (149)..(149): Selenocysteine
  MOD_RES (155)..(155): Selenocysteine
  MOD_RES (193)..(193): Selenocysteine
  MOD_RES (228)..(228): Selenocysteine
  MOD_RES (237)..(237): Selenocysteine
  MOD_RES (244)..(244): Selenocysteine
  MOD_RES (246)..(246): Selenocysteine
  MOD_RES (269)..(269): Selenocysteine
  MOD_RES (278)..(278): Selenocysteine
  MOD_RES (286)..(286): Selenocysteine
  MOD_RES (290)..(290): Selenocysteine
  MOD_RES (296)..(297): Selenocysteine
MSGALDVLQMKEEDVLKFLAAGXHLGGXNLDFQMEQYIYKRKSDGIYIINLKRXWEKLLLAARAIVAIENPADVSVISSRNXGQVCGXVRAVLKFAAAXGAXPIAGRFXPGXFXNQIQAAFREPRLLVVXDPRADHQPLXEASYVNLPXIALCNXDSPLRYVDIAIPCNNKGAHSVGLMWWMLAREVLRMRGXISREHPWEVMPDLYFYRDPEEIEKEEQAAAEKAVXKEEFQGEWXAPAPEFXAXQPEVADWSEGVQVPSVPIQQFPXEDWSAQPAXEDWSAAPXAQAXEWVGAXXDWS

SEQ ID NO: 24366 - protein, 235 aa, Homo sapiens
  MOD_RES (2)..(2): Selenocysteine
  MOD_RES (13)..(13): Selenocysteine
  MOD_RES (17)..(17): Selenocysteine
  MOD_RES (25)..(25): Selenocysteine
  MOD_RES (43)..(43): Selenocysteine
  MOD_RES (49)..(49): Selenocysteine
  MOD_RES (68)..(69): Selenocysteine
  MOD_RES (77)..(77): Selenocysteine
  MOD_RES (86)..(86): Selenocysteine
  MOD_RES (107)..(107): Selenocysteine
  MOD_RES (149)..(149): Selenocysteine
  MOD_RES (155)..(155): Selenocysteine
  MOD_RES (196)..(196): Selenocysteine
  MOD_RES (204)..(204): Selenocysteine
  MOD_RES (211)..(211): Selenocysteine
  MOD_RES (221)..(221): Selenocysteine
  MOD_RES (230)..(230): Selenocysteine
AXVNARPQRVLDXSSLXQSAPASPXNKGVHIHQAGGSPPASSXSSSSLXNDVAKQPVSRDLPSGRPGXXGPAGAQYXPHSHQFPRXRKMFDKGPEQVREPGCLVIWXLRALLLRWGLMASASGCSHHHGMGQDPPCRPGSVGHSLPLQXRVLVLXRAPLCLHSLGALLGVSRSLCLHSLGALLGVSRFSAPGSGFXILGSFHVXKQEHGVXWLCPSWAHSXLRPLGGSCXAEHLF

SEQ ID NO: 24367 - protein, 379 aa, Homo sapiens
  MOD_RES (22)..(22): Selenocysteine
  MOD_RES (57)..(57): Selenocysteine
  MOD_RES (78)..(79): Selenocysteine
  MOD_RES (101)..(101): Selenocysteine
  MOD_RES (126)..(126): Selenocysteine
  MOD_RES (135)..(135): Selenocysteine
  MOD_RES (159)..(159): Selenocysteine
  MOD_RES (172)..(172): Selenocysteine
  MOD_RES (184)..(184): Selenocysteine
  MOD_RES (249)..(249): Selenocysteine
  MOD_RES (264)..(264): Selenocysteine
  MOD_RES (268)..(269): Selenocysteine
  MOD_RES (291)..(291): Selenocysteine
  MOD_RES (307)..(307): Selenocysteine
  MOD_RES (317)..(317): Selenocysteine
  MOD_RES (320)..(320): Selenocysteine
  MOD_RES (322)..(322): Selenocysteine
  MOD_RES (363)..(363): Selenocysteine
  MOD_RES (373)..(373): Selenocysteine
MESEMLQSPLLGLGEEDEADLXDWNLPLAFMKKRHCEKIEGSKSLAQSWRMKDRMKXVSVALVLCLNVGVDPPDVVKXXPCARLECWIDPLSMGPQKALEXIGANLQKQYENWQPRARYKQSLDPXVDEVKKLCXSLRRNAKEERVLFHYNGHGVPRPXVNGEVWVFNKNYXQYIPLSIYDLQXWMGSPSIFVYDCSNAGLIVKSFKQFALQREQELEVAAINPNHPLAQMPLPPSMKNCIQLAACEAXELLPMIPDLPADLFXSCLXXPIKIALRWFCMQKCVSLVPGVXLDLIEKIPGRLNDRRXPLGELNWIFXAIXDXIAWNVLPRDLFQKLFRQDLLVASLFRNFLLAERIMRSYNCXPVSSPRLPPXYMHAMW

SEQ ID NO: 24368 - protein, 1177 aa, Homo sapiens
  MOD_RES (22)..(22): Selenocysteine
  MOD_RES (57)..(57): Selenocysteine
  MOD_RES (78)..(79): Selenocysteine
  MOD_RES (101)..(101): Selenocysteine
  MOD_RES (126)..(126): Selenocysteine
  MOD_RES (135)..(135): Selenocysteine
  MOD_RES (159)..(159): Selenocysteine
  MOD_RES (172)..(172): Selenocysteine
  MOD_RES (184)..(184): Selenocysteine
  MOD_RES (249)..(249): Selenocysteine
  MOD_RES (264)..(264): Selenocysteine
  MOD_RES (268)..(269): Selenocysteine
  MOD_RES (291)..(291): Selenocysteine
  MOD_RES (307)..(307): Selenocysteine
  MOD_RES (317)..(317): Selenocysteine
  MOD_RES (320)..(320): Selenocysteine
  MOD_RES (322)..(322): Selenocysteine
  MOD_RES (363)..(363): Selenocysteine
  MOD_RES (373)..(373): Selenocysteine
  MOD_RES (395)..(395): Selenocysteine
  MOD_RES (401)..(401): Selenocysteine
  MOD_RES (414)..(414): Selenocysteine
  MOD_RES (421)..(421): Selenocysteine
  MOD_RES (522)..(522): Selenocysteine
  MOD_RES (541)..(542): Selenocysteine
  MOD_RES (548)..(548): Selenocysteine
  MOD_RES (556)..(556): Selenocysteine
  MOD_RES (573)..(573): Selenocysteine
  MOD_RES (587)..(587): Selenocysteine
  MOD_RES (603)..(603): Selenocysteine
  MOD_RES (610)..(610): Selenocysteine
  MOD_RES (625)..(625): Selenocysteine
  MOD_RES (651)..(651): Selenocysteine
  MOD_RES (684)..(684): Selenocysteine
  MOD_RES (695)..(695): Selenocysteine
  MOD_RES (699)..(699): Selenocysteine
  MOD_RES (707)..(707): Selenocysteine
  MOD_RES (725)..(725): Selenocysteine
  MOD_RES (731)..(731): Selenocysteine
  MOD_RES (750)..(751): Selenocysteine
  MOD_RES (759)..(759): Selenocysteine
  MOD_RES (768)..(768): Selenocysteine
  MOD_RES (779)..(779): Selenocysteine
  MOD_RES (796)..(796): Selenocysteine
  MOD_RES (799)..(799): Selenocysteine
  MOD_RES (853)..(853): Selenocysteine
  MOD_RES (877)..(877): Selenocysteine
  MOD_RES (910)..(910): Selenocysteine
  MOD_RES (913)..(913): Selenocysteine
  MOD_RES (928)..(928): Selenocysteine
  MOD_RES (930)..(930): Selenocysteine
  MOD_RES (952)..(952): Selenocysteine
  MOD_RES (963)..(964): Selenocysteine
  MOD_RES (977)..(977): Selenocysteine
  MOD_RES (994)..(994): Selenocysteine
  MOD_RES (1005)..(1005): Selenocysteine
  MOD_RES (1012)..(1012): Selenocysteine
  MOD_RES (1048)..(1048): Selenocysteine
  MOD_RES (1053)..(1053): Selenocysteine
  MOD_RES (1099)..(1099): Selenocysteine
  MOD_RES (1119)..(1119): Selenocysteine
MESEMLQSPLLGLGEEDEADLXDWNLPLAFMKKRHCEKIEGSKSLAQSWRMKDRMKXVSVALVLCLNVGVDPPDVVKXXPCARLECWIDPLSMGPQKALEXIGANLQKQYENWQPRARYKQSLDPXVDEVKKLCXSLRRNAKEERVLFHYNGHGVPRPXVNGEVWVFNKNYXQYIPLSIYDLQXWMGSPSIFVYDCSNAGLIVKSFKQFALQREQELEVAAINPNHPLAQMPLPPSMKNCIQLAACEAXELLPMIPDLPADLFXSCLXXPIKIALRWFCMQKCVSLVPGVXLDLIEKIPGRLNDRRXPLGELNWIFXAIXDXIAWNVLPRDLFQKLFRQDLLVASLFRNFLLAERIMRSYNCXPVSSPRLPPXYMHAMWQAWDLAVDICLSQLPXIIEEGXAFRHSPFFAEQLXAFQVWLXMGVENRNPPEQLPIVLQVLLSQVHRLRALDLLGRFLDLGPWAVSLALSVGIFPYVLKLLQSSARELRPLLVFIWAKILAVDSELVVALSHLVVQYESNFCXVALQFIEEEKNYALPSPAXXEGGSLXPVRDSPCXPRLRSVSSYGNIRAVAXARSLNKSLQNLSLXEESGGAVAFSPGNLSXSSSASSXLGSPENEEHILSFEXIDKMRRASSYSSLNSLIGVSFNSVYXQIWRVLLHLAADPYPEVSDVAMKVLNSIAYKAXVNARPQRVLDXSSLXQSAPASPXNKGVHIHQAGGSPPASSXSSSSLXNDVAKQPVSRDLPSGRPGXXGPAGAQYXPHSHQFPRXRKMFDKGPEQXADDADDAAGHKSFISAXVQXGFCDWSARYFAQPVMKIPEEHDLESQIRKEREWRFLRNSRVRRQAQQVIQKGIXRLDDQIFLNRNPGVPSVVKFHPFXPCIAVADKDSICFWDWEKGEKLDYFHNGNPRYXRVXAMEYLNGQDCSLLLXAXDDGAIRVWKNFADLEKNPEMVXAWQGLSDMLPXXRGAGMVVDWEQEXGLLMSSGDVRIVRIWDXDREMKVQDIPXGADSCVXSLSCDSHRSLIVAGLGDGSIRVYDRRMALSECRVMXYREHXAWVVKASLQKRPDGHIVSVSVNGDVRIFDPRMPESVNVLQIVKGLXALDIHPQADLIACGSVNQFXAIYNSSGELINNIKYYDGFMGQRVGAISCLAFHPHWPHLAVGSNDYYISVYSVEKRVR

SEQ ID NO: 24369 - protein, 1335 aa, Homo sapiens
  MOD_RES (22)..(22): Selenocysteine
  MOD_RES (57)..(57): Selenocysteine
  MOD_RES (78)..(79): Selenocysteine
  MOD_RES (101)..(101): Selenocysteine
  MOD_RES (126)..(126): Selenocysteine
  MOD_RES (135)..(135): Selenocysteine
  MOD_RES (159)..(159): Selenocysteine
  MOD_RES (172)..(172): Selenocysteine
  MOD_RES (184)..(184): Selenocysteine
  MOD_RES (249)..(249): Selenocysteine
  MOD_RES (264)..(264): Selenocysteine
  MOD_RES (268)..(269): Selenocysteine
  MOD_RES (291)..(291): Selenocysteine
  MOD_RES (307)..(307): Selenocysteine
  MOD_RES (317)..(317): Selenocysteine
  MOD_RES (320)..(320): Selenocysteine
  MOD_RES (322)..(322): Selenocysteine
  MOD_RES (363)..(363): Selenocysteine
  MOD_RES (373)..(373): Selenocysteine
  MOD_RES (395)..(395): Selenocysteine
  MOD_RES (401)..(401): Selenocysteine
  MOD_RES (414)..(414): Selenocysteine
  MOD_RES (421)..(421): Selenocysteine
  MOD_RES (533)..(533): Selenocysteine
  MOD_RES (535)..(535): Selenocysteine
  MOD_RES (548)..(548): Selenocysteine
  MOD_RES (625)..(625): Selenocysteine
  MOD_RES (634)..(634): Selenocysteine
  MOD_RES (638)..(639): Selenocysteine
  MOD_RES (680)..(680): Selenocysteine
  MOD_RES (699)..(700): Selenocysteine
  MOD_RES (706)..(706): Selenocysteine
  MOD_RES (714)..(714): Selenocysteine
  MOD_RES (731)..(731): Selenocysteine
  MOD_RES (745)..(745): Selenocysteine
  MOD_RES (761)..(761): Selenocysteine
  MOD_RES (768)..(768): Selenocysteine
  MOD_RES (783)..(783): Selenocysteine
  MOD_RES (809)..(809): Selenocysteine
  MOD_RES (842)..(842): Selenocysteine
  MOD_RES (853)..(853): Selenocysteine
  MOD_RES (857)..(857): Selenocysteine
  MOD_RES (865)..(865): Selenocysteine
  MOD_RES (883)..(883): Selenocysteine
  MOD_RES (889)..(889): Selenocysteine
  MOD_RES (908)..(909): Selenocysteine
  MOD_RES (917)..(917): Selenocysteine
  MOD_RES (926)..(926): Selenocysteine
  MOD_RES (937)..(937): Selenocysteine
  MOD_RES (954)..(954): Selenocysteine
  MOD_RES (957)..(957): Selenocysteine
  MOD_RES (1011)..(1011): Selenocysteine
  MOD_RES (1035)..(1035): Selenocysteine
  MOD_RES (1068)..(1068): Selenocysteine
  MOD_RES (1071)..(1071): Selenocysteine
  MOD_RES (1086)..(1086): Selenocysteine
  MOD_RES (1088)..(1088): Selenocysteine
  MOD_RES (1110)..(1110): Selenocysteine
  MOD_RES (1121)..(1122): Selenocysteine
  MOD_RES (1135)..(1135): Selenocysteine
  MOD_RES (1152)..(1152): Selenocysteine
  MOD_RES (1163)..(1163): Selenocysteine
  MOD_RES (1170)..(1170): Selenocysteine
  MOD_RES (1206)..(1206): Selenocysteine
  MOD_RES (1211)..(1211): Selenocysteine
  MOD_RES (1257)..(1257): Selenocysteine
  MOD_RES (1277)..(1277): Selenocysteine
MESEMLQSPLLGLGEEDEADLXDWNLPLAFMKKRHCEKIEGSKSLAQSWRMKDRMKXVSVALVLCLNVGVDPPDVVKXXPCARLECWIDPLSMGPQKALEXIGANLQKQYENWQPRARYKQSLDPXVDEVKKLCXSLRRNAKEERVLFHYNGHGVPRPXVNGEVWVFNKNYXQYIPLSIYDLQXWMGSPSIFVYDCSNAGLIVKSFKQFALQREQELEVAAINPNHPLAQMPLPPSMKNCIQLAACEAXELLPMIPDLPADLFXSCLXXPIKIALRWFCMQKCVSLVPGVXLDLIEKIPGRLNDRRXPLGELNWIFXAIXDXIAWNVLPRDLFQKLFRQDLLVASLFRNFLLAERIMRSYNCXPVSSPRLPPXYMHAMWQAWDLAVDICLSQLPXIIEEGXAFRHSPFFAEQLXAFQVWLXMGVENRNPPEQLPIVLQVLLSQVHRLRALDLLGRFLDLGPWAVSLALSVGIFPYVLKLLQSSARELRPLLVFIWAKILAVDSSCQADLVKDNGHKYFLSVLADPYMPAEHRXMXAFILAVIVNSYHXGQEACLQGNLIAICLEQLNDPHPLLRQWVAICLGRIWQNFDSARWCGVRDSAHEKLYSLLSDPIPEVRCAAVFALGXFVGNSAERXDHSXXIDHNVAMMLAQLVSDGSPMVRKELVVALSHLVVQYESNFCXVALQFIEEEKNYALPSPAXXEGGSLXPVRDSPCXPRLRSVSSYGNIRAVAXARSLNKSLQNLSLXEESGGAVAFSPGNLSXSSSASSXLGSPENEEHILSFEXIDKMRRASSYSSLNSLIGVSFNSVYXQIWRVLLHLAADPYPEVSDVAMKVLNSIAYKAXVNARPQRVLDXSSLXQSAPASPXNKGVHIHQAGGSPPASSXSSSSLXNDVAKQPVSRDLPSGRPGXXGPAGAQYXPHSHQFPRXRKMFDKGPEQXADDADDAAGHKSFISAXVQXGFCDWSARYFAQPVMKIPEEHDLESQIRKEREWRFLRNSRVRRQAQQVIQKGIXRLDDQIFLNRNPGVPSVVKFHPFXPCIAVADKDSICFWDWEKGEKLDYFHNGNPRYXRVXAMEYLNGQDCSLLLXAXDDGAIRVWKNFADLEKNPEMVXAWQGLSDMLPXXRGAGMVVDWEQEXGLLMSSGDVRIVRIWDXDREMKVQDIPXGADSCVXSLSCDSHRSLIVAGLGDGSIRVYDRRMALSECRVMXYREHXAWVVKASLQKRPDGHIVSVSVNGDVRIFDPRMPESVNVLQIVKGLXALDIHPQADLIACGSVNQFXAIYNSSGELINNIKYYDGFMGQRVGAISCLAFHPHWPHLAVGSNDYYISVYSVEKRVR

SEQ ID NO: 24370 - protein, 95 aa, Homo sapiens
  MOD_RES (22)..(22): Selenocysteine
  MOD_RES (57)..(57): Selenocysteine
  MOD_RES (78)..(79): Selenocysteine
MESEMLQSPLLGLGEEDEADLXDWNLPLAFMKKRHCEKIEGSKSLAQSWRMKDRMKXVSVALVLCLNVGVDPPDVVKXXPCARLECWIGPVQAEP

SEQ ID NO: 24371 - protein, 308 aa, Homo sapiens
  MOD_RES (2)..(2): Selenocysteine
  MOD_RES (27)..(27): Selenocysteine
  MOD_RES (52)..(52): Selenocysteine
  MOD_RES (57)..(57): Selenocysteine
  MOD_RES (63)..(63): Selenocysteine
  MOD_RES (65)..(65): Selenocysteine
  MOD_RES (126)..(126): Selenocysteine
  MOD_RES (172)..(172): Selenocysteine
  MOD_RES (193)..(193): Selenocysteine
  MOD_RES (232)..(232): Selenocysteine
  MOD_RES (268)..(268): Selenocysteine
MXLNGGGSGAGGSRGGGQERERRRGSXPWGPAPPLHRRSMPVDERDLQAALXPGALXAAAAGXGXQGPRLDWPEDSEDSLSSGGSDSDESVYKVLLLGAPGVGKSALARIFGGVEDGPEAEAAGHXYDRSIVVDGEEASLMVYDIWEQDGGRWLPGHCMAMGDAYVIVYSVXDKGSFEKASELRVQLRRARQXDDVPIILVGNKSDLVRSREVSVDEGRACAVVFDCKFIEXSAALHHNVQALFEGVVRQIRLRRDSKEANARRQAGXRRRESLGKKAKRFLGRIVARNSRKMAFRAKSKSCHDLSVL

SEQ ID NO: 24372 - protein, 162 aa, Homo sapiens
  MOD_RES (1)..(1): Any amino acid
  MOD_RES (51)..(51): Selenocysteine
  MOD_RES (97)..(97): Selenocysteine
  MOD_RES (112)..(112): Selenocysteine
  MOD_RES (149)..(149): Selenocysteine
XEDSLSSGGSDSDESVYKVLLLGAPGVGKSALARIFGGVEDGPEAEAAGHXYDRSIVVDGEEASLMVYDIWEQDGGRWLPGHCMAMGDAYVIVYSVXDKGSFEKASELRAQXLGPSELPAGHPQPHGHGQIDSAALRSGSQGPVRAGPXEMHAQAHMRPKQP

SEQ ID NO: 24373 - protein, 136 aa, Homo sapiens
  MOD_RES (1)..(1): Any amino acid
  MOD_RES (58)..(58): Selenocysteine
  MOD_RES (123)..(123): Selenocysteine
  MOD_RES (128)..(128): Selenocysteine
XLDWPEDSEDSLSSGGSDSDESVYKVLLLGAPGVGKSALARIFGGVEDGPEAEAAGHXYDRSIVVDGEEASLMVYDIWEQCCPAKWLSGASEGWAHRDACAGSYASQAAAAQPPGRPACRERXLPFFXARVCLPWR

SEQ ID NO: 24374 - protein, 313 aa, Homo sapiens
  MOD_RES (4)..(4): Selenocysteine
  MOD_RES (21)..(21): Selenocysteine
  MOD_RES (36)..(36): Selenocysteine
  MOD_RES (42)..(42): Selenocysteine
  MOD_RES (68)..(68): Selenocysteine
  MOD_RES (75)..(75): Selenocysteine
  MOD_RES (162)..(162): Selenocysteine
  MOD_RES (168)..(168): Selenocysteine
  MOD_RES (210)..(210): Selenocysteine
  MOD_RES (267)..(267): Selenocysteine
  MOD_RES (270)..(270): Selenocysteine
  MOD_RES (286)..(286): Selenocysteine
MPNXAMKKKVLLMGKSGSGKXSMRSIIFANYIARDXRRLGAXIDVEHSHVRFLGNLVLNLWDCGGQDXFMENYFXSQRDNIFRNVEVLIYVFDVESRELEKDMHYYQSCLEAILQNSPDAKIFCLVHKMDLVQEDQRDLIFKEREEDLRRLSRPLECACFRXSIWDEXLYKAWSSIVYQLIPNVQQLEMNLRNFAQIIEADEVLLFERAXFLVISHYQCKEQRDVHRFEKISNIIKQFKLSCSKLAASFQSMEVRNSNFAAFIDIFXSNXYVMVVMSDPSIPSAAXLINIRNARKHFEKLERVDGPKHSLLMR

SEQ ID NO: 24375 - protein, 346 aa, Homo sapiens
  MOD_RES (9)..(10): Selenocysteine
  MOD_RES (37)..(37): Selenocysteine
  MOD_RES (54)..(54): Selenocysteine
  MOD_RES (69)..(69): Selenocysteine
  MOD_RES (75)..(75): Selenocysteine
  MOD_RES (101)..(101): Selenocysteine
  MOD_RES (108)..(108): Selenocysteine
  MOD_RES (195)..(195): Selenocysteine
  MOD_RES (201)..(201): Selenocysteine
  MOD_RES (243)..(243): Selenocysteine
  MOD_RES (300)..(300): Selenocysteine
  MOD_RES (303)..(303): Selenocysteine
  MOD_RES (319)..(319): Selenocysteine
MEESDSEKXXEKENLGPRMDPPLGEPEGSLGWVLPNXAMKKKVLLMGKSGSGKXSMRSIIFANYIARDXRRLGAXIDVEHSHVRFLGNLVLNLWDCGGQDXFMENYFXSQRDNIFRNVEVLIYVFDVESRELEKDMHYYQSCLEAILQNSPDAKIFCLVHKMDLVQEDQRDLIFKEREEDLRRLSRPLECSCFRXSIWDEXLYKAWSSIVYQLIPNVQQLEMNLRNFAEIIEADEVLLFERAXFLVISHYQCKEQRDAHRFEKISNIIKQFKLSCSKLAASFQSMEVRNSNFAAFIDIFXSNXYVMVVMSDPSIPSAAXLINIRNARKHFEKLERVDGPKQCLLMR

SEQ ID NO: 24376 - protein, 374 aa, Homo sapiens
  MOD_RES (9)..(10): Selenocysteine
  MOD_RES (37)..(37): Selenocysteine
  MOD_RES (54)..(54): Selenocysteine
  MOD_RES (69)..(69): Selenocysteine
  MOD_RES (75)..(75): Selenocysteine
  MOD_RES (91)..(91): Selenocysteine
  MOD_RES (101)..(101): Selenocysteine
  MOD_RES (103)..(103): Selenocysteine
  MOD_RES (129)..(129): Selenocysteine
  MOD_RES (136)..(136): Selenocysteine
  MOD_RES (223)..(223): Selenocysteine
  MOD_RES (229)..(229): Selenocysteine
  MOD_RES (271)..(271): Selenocysteine
  MOD_RES (328)..(328): Selenocysteine
  MOD_RES (331)..(331): Selenocysteine
  MOD_RES (347)..(347): Selenocysteine
MEESDSEKXXEKENLGPRMDPPLGEPEGSLGWVLPNXAMKKKVLLMGKSGSGKXSMRSIIFANYIARDXRRLGAXILDRIHSLQINSSLSXYSLVDSVGNXKXFDVEHSHVRFLGNLVLNLWDCGGQDXFMENYFXSQRDNIFRNVEVLIYVFDVESRELEKDMHYYQSCLEAILQNSPDAKIFCLVHKMDLVQEDQRDLIFKEREEDLRRLSRPLECSCFRXSIWDEXLYKAWSSIVYQLIPNVQQLEMNLRNFAEIIEADEVLLFERAXFLVISHYQCKEQRDAHRFEKISNIIKQFKLSCSKLAASFQSMEVRNSNFAAFIDIFXSNXYVMVVMSDPSIPSAAXLINIRNARKHFEKLERVDGPKQCLLMR

SEQ ID NO: 24377 - protein, 194 aa, Homo sapiens
  MOD_RES (16)..(16): Selenocysteine
  MOD_RES (31)..(31): Selenocysteine
  MOD_RES (37)..(37): Selenocysteine
  MOD_RES (63)..(63): Selenocysteine
  MOD_RES (70)..(70): Selenocysteine
  MOD_RES (157)..(157): Selenocysteine
  MOD_RES (163)..(163): Selenocysteine
MKKKVLLMGKSGSGKXSMRSIIFANYIARDXRRLGAXIDVEHSHVRFLGNLVLNLWDCGGQDXFMENYFXSQRDNIFRNVEVLIYVFDVESRELEKDMHYYQSCLEAILQNSPDAKIFCLVHKMDLVQEDQRDLIFKEREEDLRRLSRPLECSCFRXSIWDEXLYKAWSSIVYQLIPNVQQLEMNLRNFAEIIE

SEQ ID NO: 24378 - protein, 399 aa, Homo sapiens
  MOD_RES (10)..(10): Selenocysteine
  MOD_RES (90)..(90): Selenocysteine
  MOD_RES (96)..(96): Selenocysteine
  MOD_RES (127)..(127): Selenocysteine
  MOD_RES (137)..(137): Selenocysteine
  MOD_RES (155)..(155): Selenocysteine
  MOD_RES (160)..(160): Selenocysteine
  MOD_RES (191)..(191): Selenocysteine
  MOD_RES (218)..(218): Selenocysteine
  MOD_RES (242)..(242): Selenocysteine
  MOD_RES (272)..(272): Selenocysteine
  MOD_RES (323)..(324): Selenocysteine
  MOD_RES (332)..(332): Selenocysteine
  MOD_RES (372)..(372): Selenocysteine
  MOD_RES (381)..(381): Selenocysteine
  MOD_RES (390)..(390): Selenocysteine
  MOD_RES (394)..(394): Selenocysteine
MSLQYGAEEXPLAGSYGAADSFPKDFGYGVEEEEEEAAAAGGGVGAGAGGGCGPGGADSSKPRILLMGLRRSGKSSIQKVVFHKMSPNEXLFLESXNKIYKDDISNSSFVNFQIWDFPGQMDFFDPXFDYEMIFRGXGALIYVIDAQDDYMEALXRLHIXVSKAYKVNPDMNFEVFIHKVDGLSDDHKIEXQRDIHQRANDDLADAGLEKLHLSFYLXSIYDHSIFEAFSKVVQKLIPQLPXLENLLNIFISNSGIEKAFLFDVVSKIYIAXDSSPVDMQSYELCCDMIDVVIDVSCIYGLKEDGSGSAYDKESMAIIKLNNXXVLYLKEVXKFLALVCILREESFERKGLIDYNFHCFRKAIHEVFEVGVXSHRSCGHQXSASSLKALXHNGXPRNAI

SEQ ID NO: 24379 - protein, 249 aa, Homo sapiens
  MOD_RES (10)..(10): Selenocysteine
  MOD_RES (12)..(12): Selenocysteine
  MOD_RES (19)..(19): Selenocysteine
  MOD_RES (41)..(41): Selenocysteine
  MOD_RES (68)..(68): Selenocysteine
  MOD_RES (92)..(92): Selenocysteine
  MOD_RES (122)..(122): Selenocysteine
  MOD_RES (125)..(125): Selenocysteine
  MOD_RES (131)..(131): Selenocysteine
  MOD_RES (158)..(158): Selenocysteine
  MOD_RES (165)..(165): Selenocysteine
  MOD_RES (173)..(174): Selenocysteine
  MOD_RES (182)..(182): Selenocysteine
  MOD_RES (240)..(240): Selenocysteine
  MOD_RES (244)..(244): Selenocysteine
MEALARLHLXVXRAYKVNXDINFEVFIHKVDGLSDDHKIEXQRDIHQRANDDLADAGLEKIHLSFYLXSIYDHSIFEAFSKVVQKLIPQLPXLENLLNIFISNSGIEKAFLFDVVSKIYIAXDSXPVDMQXYELCCDMIDVVIDISCIYGLKEDGAGXPYDKESXAIIKLNNXXVLYLKEVXKFLALVCFVREESFERKGLIDYNFHCFRKAIHEVFEVRMKVVKSRKVQNRLQKKKRAXPNGXPRVLL

SEQ ID NO: 24380 - protein, 400 aa, Homo sapiens
  MOD_RES (46)..(46): Selenocysteine
  MOD_RES (59)..(59): Selenocysteine
  MOD_RES (91)..(91): Selenocysteine
  MOD_RES (97)..(97): Selenocysteine
  MOD_RES (128)..(128): Selenocysteine
  MOD_RES (138)..(138): Selenocysteine
  MOD_RES (161)..(161): Selenocysteine
  MOD_RES (163)..(163): Selenocysteine
  MOD_RES (170)..(170): Selenocysteine
  MOD_RES (192)..(192): Selenocysteine
  MOD_RES (219)..(219): Selenocysteine
  MOD_RES (243)..(243): Selenocysteine
  MOD_RES (273)..(273): Selenocysteine
  MOD_RES (276)..(276): Selenocysteine
  MOD_RES (282)..(282): Selenocysteine
  MOD_RES (309)..(309): Selenocysteine
  MOD_RES (316)..(316): Selenocysteine
  MOD_RES (324)..(325): Selenocysteine
  MOD_RES (333)..(333): Selenocysteine
  MOD_RES (391)..(391): Selenocysteine
  MOD_RES (395)..(395): Selenocysteine
MSQVLGKPQPQDEDDAEEEEEEDELVGLADYGDGPDSSDADPDSGXEEGVLDFSDPFSXEVKPRILLMGLRRSGKSSIQKVVFHKMSPNEXLFLESXNKICREDVSNSSFVNFQIWDFPGQIDFFDPXFDYEMIFRGXGALIFVIDSQDDYMEALARLHLXVXRAYKVNXDINFEVFIHKVDGLSDDHKIEXQRDIHQRANDDLADAGLEKIHLSFYLXSIYDHSIFEAFSKVVQKLIPQLPXLENLLNIFISNSGIEKAFLFDVVSKIYIAXDSXPVDMQXYELCCDMIDVVIDISCIYGLKEDGAGXPYDKESXAIIKLNNXXVLYLKEVXKFLALVCFVREESFERKGLIDYNFHCFRKAIHEVFEVRMKVVKSRKVQNRLQKKKRAXPNGXPRVLL

SEQ ID NO: 24381 - protein, 218 aa, Homo sapiens
  MOD_RES (9)..(9): Selenocysteine
  MOD_RES (29)..(29): Selenocysteine
  MOD_RES (46)..(46): Selenocysteine
  MOD_RES (61)..(61): Selenocysteine
  MOD_RES (67)..(67): Selenocysteine
  MOD_RES (84)..(84): Selenocysteine
  MOD_RES (124)..(124): Selenocysteine
MSSGAASGXGRGRPRGGGPGPGDPPPSEXHKLVVVGGGGVGKSALXIQFIQSYFVSDYDPXIEDSYXKICSVDGIPARLDILDXAGQEEFGAMREQYMRAGHGFLLVFAINDRQSFNEVGKLFXQILRVKDRDDFPVVLVGNKADLESQRQVPRSEASAFGASHHVAYFEASAKLRLNVDEAFEQLVRAVRKYQEQELPPSPPSAPRKKGGGCPCVLL

SEQ ID NO: 24382 - protein, 47 aa, Homo sapiens
  MOD_RES (31)..(31): Selenocysteine
MAAAGWRDGSGQEKYRLVVVGGGGVGKSALXIQFIQNHLLKKYLHCE

SEQ ID NO: 24383 - protein, 204 aa, Homo sapiens
  MOD_RES (31)..(31): Selenocysteine
  MOD_RES (41)..(41): Selenocysteine
  MOD_RES (46)..(46): Selenocysteine
  MOD_RES (52)..(52): Selenocysteine
  MOD_RES (69)..(69): Selenocysteine
  MOD_RES (85)..(85): Selenocysteine
  MOD_RES (96)..(96): Selenocysteine
  MOD_RES (138)..(138): Selenocysteine
  MOD_RES (152)..(152): Selenocysteine
  MOD_RES (190)..(190): Selenocysteine
MAAAGWRDGSGQEKYRLVVVGGGGVGKSALXIQFIQSYFVXDYDPXIEDSYXKQCVIDDRAARLDILDXAGQEEFGAMREQYMRXGEGFLLVFSVXDRGSFEEIYKFQRQILRVKDRDEFPMILIGNKADLDHQRQVXQEEGQQLARQLKVXYMEASAKIRMNVDQAFHELVRVIRKFQEQECPPSPEPXRKEKDKKGCHCVIF

SEQ ID NO: 24384 - protein, 52 aa, Homo sapiens
  MOD_RES (31)..(31): Selenocysteine
MAAAGWRDGSGQEKYRLVVVGGGGVGKSALXIQFIQVFRNSWVPSFIHVFQI

SEQ ID NO: 24385 - protein, 166 aa, Homo sapiens
  MOD_RES (22)..(22): Selenocysteine
  MOD_RES (27)..(27): Selenocysteine
  MOD_RES (33)..(33): Selenocysteine
  MOD_RES (50)..(50): Selenocysteine
  MOD_RES (66)..(66): Selenocysteine
  MOD_RES (77)..(77): Selenocysteine
  MOD_RES (119)..(119): Selenocysteine
  MOD_RES (133)..(133): Selenocysteine
MQESSIILQMFCFLSRESYFVXDYDPXIEDSYXKQCVIDDRAARLDILDXAGQEEFGAMREQYMRXGEGFLLVFSVXDRGSFEEIYKFQRQILRVKDRDEFPMILIGNKADLDHQRQVXQEEGQQLARQLKVXYMEASAKIRMNVDQAFHELVRVIRKFQEQECPP

SEQ ID NO: 24386 - protein, 69 aa, Homo sapiens
  MOD_RES (8)..(8): Selenocysteine
  MOD_RES (19)..(19): Selenocysteine
  MOD_RES (61)..(61): Selenocysteine
MREQYMRXGEGFLLVFSVXDRGSFEEIYKFQRQILRVKDRDEFPMILIGNKADLDHQRQVXQEEGQQLA

SEQ ID NO: 24387 - protein, 127 aa, Homo sapiens
  MOD_RES (8)..(8): Selenocysteine
  MOD_RES (19)..(19): Selenocysteine
  MOD_RES (61)..(61): Selenocysteine
  MOD_RES (75)..(75): Selenocysteine
  MOD_RES (113)..(113): Selenocysteine
MREQYMRXGEGFLLVFSVXDRGSFEEIYKFQRQILRVKDRDEFPMILIGNKADLDHQRQVXQEEGQQLARQLKVXYMEASAKIRMNVDQAFHELVRVIRKFQEQECPPSPEPXRKEKDKKGCHCVIF

SEQ ID NO: 24388 - protein, 169 aa, Homo sapiens
  MOD_RES (6)..(6): Selenocysteine
  MOD_RES (11)..(11): Selenocysteine
  MOD_RES (17)..(17): Selenocysteine
  MOD_RES (34)..(34): Selenocysteine
  MOD_RES (50)..(50): Selenocysteine
  MOD_RES (61)..(61): Selenocysteine
  MOD_RES (103)..(103): Selenocysteine
  MOD_RES (117)..(117): Selenocysteine
  MOD_RES (155)..(155): Selenocysteine
MSYFVXDYDPXIEDSYXKQCVIDDRAARLDILDXAGQEEFGAMREQYMRXGEGFLLVFSVXDRGSFEEIYKFQRQILRVKDRDEFPMILIGNKADLDHQRQVXQEEGQQLARQLKVXYMEASAKIRMNVDQAFHELVRVIRKFQEQECPPSPEPXRKEKDKKGCHCVIF

SEQ ID NO: 24389 - protein, 755 aa, Homo sapiens
  MOD_RES (21)..(21): Selenocysteine
  MOD_RES (51)..(51): Selenocysteine
  MOD_RES (69)..(69): Selenocysteine
  MOD_RES (108)..(108): Selenocysteine
  MOD_RES (128)..(128): Selenocysteine
  MOD_RES (149)..(149): Selenocysteine
  MOD_RES (153)..(153): Selenocysteine
  MOD_RES (163)..(163): Selenocysteine
  MOD_RES (167)..(168): Selenocysteine
  MOD_RES (182)..(183): Selenocysteine
  MOD_RES (185)..(185): Selenocysteine
  MOD_RES (189)..(190): Selenocysteine
  MOD_RES (211)..(211): Selenocysteine
  MOD_RES (218)..(218): Selenocysteine
  MOD_RES (256)..(257): Selenocysteine
  MOD_RES (259)..(259): Selenocysteine
  MOD_RES (268)..(268): Selenocysteine
  MOD_RES (273)..(273): Selenocysteine
  MOD_RES (309)..(309): Selenocysteine
  MOD_RES (316)..(316): Selenocysteine
  MOD_RES (336)..(336): Selenocysteine
  MOD_RES (338)..(338): Selenocysteine
  MOD_RES (346)..(346): Selenocysteine
  MOD_RES (357)..(357): Selenocysteine
  MOD_RES (369)..(369): Selenocysteine
  MOD_RES (384)..(384): Selenocysteine
  MOD_RES (387)..(387): Selenocysteine
  MOD_RES (410)..(410): Selenocysteine
  MOD_RES (414)..(414): Selenocysteine
  MOD_RES (465)..(465): Selenocysteine
  MOD_RES (475)..(475): Selenocysteine
  MOD_RES (498)..(498): Selenocysteine
  MOD_RES (516)..(516): Selenocysteine
  MOD_RES (539)..(539): Selenocysteine
  MOD_RES (565)..(565): Selenocysteine
  MOD_RES (596)..(596): Selenocysteine
  MOD_RES (603)..(603): Selenocysteine
  MOD_RES (612)..(612): Selenocysteine
  MOD_RES (616)..(616): Selenocysteine
  MOD_RES (618)..(618): Selenocysteine
  MOD_RES (658)..(658): Selenocysteine
  MOD_RES (683)..(683): Selenocysteine
  MOD_RES (694)..(694): Selenocysteine
  MOD_RES (705)..(705): Selenocysteine
  MOD_RES (744)..(744): Selenocysteine
MEPIDLSIPKNFRKGDKDLAXPSEAKKPEEEAGSSEQPSPCPAPGPSLPVXLGPSGILESPMAPAPAAXPEPPAQPLQGPVQLAVPIYSSALVSSPPLVGSSALLSGXALLRPLRPKPPLLLPKPPVXEELPPLASIAQIISSVSSAPXLLKXKVADPGPASXGSNXXASDSLGGSVPKAAXXAXPAAXXSPKESSEPPAPASSPEAASPXEQGPAGXSKKRGRKRGMRSRPRANSGGVDLDSSGEFASIEKMLAXXDXNKFSPFLQXAEDNXQDEVAGAPADHHGPSDEEQGSPPEDKLLRAKRNSYXNCLQKIXCPHCPRVFPWASSLQRHMLXHXDSQSDAEXAAAAGEVLDLXSRDREQPSEGAXELRQVAGDAPVEQAXAEXASPVHREEHGRGESHEPEEEHGXEESXGDADGGRGRVEQPEPGPGLRHQAHGLQAGGGRRRGRAGGAASQEQKLACDXCGKSFKFLGXLSRHRKAHGRQEPKDEKGDGASXAEEGPQPAPEQEEKPPEXPAEVVESAPGAGEAPAEKLAEEXEGPSDGESAAEKRSSEKSDDDKKPKXDSPKSVASKADKRKKVCSVCNKRFWSLQDLXRHMRSHXGERPYKCQXCERXFXLKHSLVRHQRIHQKARHAKHHGKDSDKEERGEEDSENESXHSGNNAVSENEAELAPNASNHMAVXRSRKEGLASAXKDCSHREEKVXAGWPSEPGQGDLNPESPAALGQDLLEPRSKRPAHPILAXADGASQLVGME

SEQ ID NO: 24390 - protein, 136 aa, Homo sapiens
  MOD_RES (2)..(2): Selenocysteine
  MOD_RES (19)..(19): Selenocysteine
  MOD_RES (31)..(31): Selenocysteine
  MOD_RES (59)..(59): Selenocysteine
  MOD_RES (76)..(77): Selenocysteine
  MOD_RES (82)..(82): Selenocysteine
  MOD_RES (90)..(90): Selenocysteine
  MOD_RES (92)..(92): Selenocysteine
  MOD_RES (128)..(128): Selenocysteine
  MOD_RES (135)..(136): Selenocysteine
MXSSSPAGLEGSDLSSINXMMSAVMSVGKVXENGGSPQGIKSPSKPPGPNRIGRRNQEXKEEKSSYNCPLCEKICXXQHQLXMHIRQHNXDXGGADHSCSICGKSLSSASSLDRHMLVHSGERPYKCXVCGQSFXX

SEQ ID NO: 24391 - protein, 164 aa, Homo sapiens
  MOD_RES (2)..(2): Selenocysteine
  MOD_RES (19)..(19): Selenocysteine
  MOD_RES (31)..(31): Selenocysteine
  MOD_RES (59)..(59): Selenocysteine
  MOD_RES (76)..(77): Selenocysteine
  MOD_RES (82)..(82): Selenocysteine
  MOD_RES (90)..(90): Selenocysteine
  MOD_RES (92)..(92): Selenocysteine
  MOD_RES (128)..(128): Selenocysteine
  MOD_RES (135)..(136): Selenocysteine
  MOD_RES (155)..(155): Selenocysteine
  MOD_RES (157)..(157): Selenocysteine
MXSSSPAGLEGSDLSSINXMMSAVMSVGKVXENGGSPQGIKSPSKPPGPNRIGRRNQEXKEEKSSYNCPLCEKICXXQHQLXMHIRQHNXDXGGADHSCSICGKSLSSASSLDRHMLVHSGERPYKCXVCGQSFXXNGNMHRHMKIHEKDPNSAXAXAPPSPLK

SEQ ID NO: 24392 - protein, 778 aa, Homo sapiens
  MOD_RES (2)..(2): Selenocysteine
  MOD_RES (19)..(19): Selenocysteine
  MOD_RES (31)..(31): Selenocysteine
  MOD_RES (59)..(59): Selenocysteine
  MOD_RES (76)..(77): Selenocysteine
  MOD_RES (82)..(82): Selenocysteine
  MOD_RES (90)..(90): Selenocysteine
  MOD_RES (92)..(92): Selenocysteine
  MOD_RES (128)..(128): Selenocysteine
  MOD_RES (135)..(136): Selenocysteine
  MOD_RES (155)..(155): Selenocysteine
  MOD_RES (157)..(157): Selenocysteine
  MOD_RES (225)..(225): Selenocysteine
  MOD_RES (229)..(229): Selenocysteine
  MOD_RES (243)..(243): Selenocysteine
  MOD_RES (246)..(246): Selenocysteine
  MOD_RES (287)..(287): Selenocysteine
  MOD_RES (304)..(304): Selenocysteine
  MOD_RES (320)..(320): Selenocysteine
  MOD_RES (337)..(337): Selenocysteine
  MOD_RES (351)..(351): Selenocysteine
  MOD_RES (372)..(372): Selenocysteine
  MOD_RES (395)..(395): Selenocysteine
  MOD_RES (407)..(407): Selenocysteine
  MOD_RES (425)..(425): Selenocysteine
  MOD_RES (430)..(430): Selenocysteine
  MOD_RES (514)..(514): Selenocysteine
  MOD_RES (517)..(517): Selenocysteine
  MOD_RES (521)..(521): Selenocysteine
  MOD_RES (523)..(523): Selenocysteine
  MOD_RES (569)..(569): Selenocysteine
  MOD_RES (575)..(575): Selenocysteine
  MOD_RES (594)..(594): Selenocysteine
  MOD_RES (619)..(619): Selenocysteine
  MOD_RES (628)..(628): Selenocysteine
  MOD_RES (635)..(635): Selenocysteine
  MOD_RES (692)..(692): Selenocysteine
  MOD_RES (709)..(709): Selenocysteine
  MOD_RES (726)..(726): Selenocysteine
  MOD_RES (753)..(753): Selenocysteine
  MOD_RES (774)..(774): Selenocysteine
MXSSSPAGLEGSDLSSINXMMSAVMSVGKVXENGGSPQGIKSPSKPPGPNRIGRRNQEXKEEKSSYNCPLCEKICXXQHQLXMHIRQHNXDXGGADHSCSICGKSLSSASSLDRHMLVHSGERPYKCXVCGQSFXXNGNMHRHMKIHEKDPNSAXAXAPPSPLKRRRLSSKRKLSHDAESEREDPAPAKKMVEDGQSGDLEKKADEVFHCPVCFKEFVCKYGLEXHMEXHSDNPLRCDICCVXFRXHRGLLRHNALVHKQLPRDAMGRPFIQNNPSIPAGFHDLGFXDFSCRKFPRISQAWCEXNLRRCISEQHRFVCDXCDKAFPMLCSLALHKQXHVAADQGQEKPQAXPLPGDALDQKGFLALLGLQHXKDVRPAPAEEPLPDDNQAIQLQXLKCQLPQDPGCXNLLSLSPFEAASLGGSLXVLPAXKDSIKHLSLQPFQKGFIIQPDSSIVVKPISGESAIELADIQQILKMAASAPPQISLPPFSKAPAAPLQAIFKHMPPLKPKPLVXPRXVVAXSXPPPLINAQQASPGCISPSLPPPPLKLLKGSVEAASNAHLLQSKSGXQPHAAXRLSLQQPRAELPGQPEMKXQLEQDSIIEALLPLSMEAKIKQEIXEGELKAFMXAPGGKKXPAMRKVLYPCRFCNQVFAFSGVLRAHVRSHLGISPYQCNICDYIAADKAALIRHLRXHSGERPYICKICHYPFXVKANCERHLRKKHLKAXRKDIEKNIEYVSSSAAELVDAFCAPDXVCRLCGEDLKHYRALRIHMRXHCGR

SEQ ID NO: 24393 - protein, 1476 aa, Homo sapiens
  MOD_RES (2)..(2): Selenocysteine
  MOD_RES (19)..(19): Selenocysteine
  MOD_RES (31)..(31): Selenocysteine
  MOD_RES (59)..(59): Selenocysteine
  MOD_RES (76)..(77): Selenocysteine
  MOD_RES (82)..(82): Selenocysteine
  MOD_RES (90)..(90): Selenocysteine
  MOD_RES (92)..(92): Selenocysteine
  MOD_RES (128)..(128): Selenocysteine
  MOD_RES (135)..(136): Selenocysteine
  MOD_RES (155)..(155): Selenocysteine
  MOD_RES (157)..(157): Selenocysteine
  MOD_RES (225)..(225): Selenocysteine
  MOD_RES (229)..(229): Selenocysteine
  MOD_RES (243)..(243): Selenocysteine
  MOD_RES (246)..(246): Selenocysteine
  MOD_RES (287)..(287): Selenocysteine
  MOD_RES (304)..(304): Selenocysteine
  MOD_RES (320)..(320): Selenocysteine
  MOD_RES (337)..(337): Selenocysteine
  MOD_RES (351)..(351): Selenocysteine
  MOD_RES (372)..(372): Selenocysteine
  MOD_RES (395)..(395): Selenocysteine
  MOD_RES (407)..(407): Selenocysteine
  MOD_RES (425)..(425): Selenocysteine
  MOD_RES (430)..(430): Selenocysteine
  MOD_RES (514)..(514): Selenocysteine
  MOD_RES (517)..(517): Selenocysteine
  MOD_RES (521)..(521): Selenocysteine
  MOD_RES (523)..(523): Selenocysteine
  MOD_RES (569)..(569): Selenocysteine
  MOD_RES (575)..(575): Selenocysteine
  MOD_RES (594)..(594): Selenocysteine
  MOD_RES (619)..(619): Selenocysteine
  MOD_RES (628)..(628): Selenocysteine
  MOD_RES (635)..(635): Selenocysteine
  MOD_RES (692)..(692): Selenocysteine
  MOD_RES (709)..(709): Selenocysteine
  MOD_RES (726)..(726): Selenocysteine
  MOD_RES (753)..(753): Selenocysteine
  MOD_RES (774)..(774): Selenocysteine
  MOD_RES (860)..(860): Selenocysteine
  MOD_RES (875)..(875): Selenocysteine
  MOD_RES (952)..(952): Selenocysteine
  MOD_RES (982)..(982): Selenocysteine
  MOD_RES (1000)..(1000): Selenocysteine
  MOD_RES (1039)..(1039): Selenocysteine
  MOD_RES (1059)..(1059): Selenocysteine
  MOD_RES (1080)..(1080): Selenocysteine
  MOD_RES (1084)..(1084): Selenocysteine
  MOD_RES (1094)..(1094): Selenocysteine
  MOD_RES (1098)..(1099): Selenocysteine
  MOD_RES (1113)..(1114): Selenocysteine
  MOD_RES (1116)..(1116): Selenocysteine
  MOD_RES (1120)..(1121): Selenocysteine
  MOD_RES (1142)..(1142): Selenocysteine
  MOD_RES (1149)..(1149): Selenocysteine
  MOD_RES (1187)..(1188): Selenocysteine
  MOD_RES (1190)..(1190): Selenocysteine
  MOD_RES (1199)..(1199): Selenocysteine
  MOD_RES (1204)..(1204): Selenocysteine
  MOD_RES (1240)..(1240): Selenocysteine
  MOD_RES (1247)..(1247): Selenocysteine
  MOD_RES (1267)..(1267): Selenocysteine
  MOD_RES (1269)..(1269): Selenocysteine
  MOD_RES (1285)..(1285): Selenocysteine
  MOD_RES (1300)..(1301): Selenocysteine
  MOD_RES (1324)..(1324): Selenocysteine
  MOD_RES (1333)..(1333): Selenocysteine
  MOD_RES (1337)..(1337): Selenocysteine
  MOD_RES (1339)..(1339): Selenocysteine
  MOD_RES (1379)..(1379): Selenocysteine
  MOD_RES (1404)..(1404): Selenocysteine
  MOD_RES (1415)..(1415): Selenocysteine
  MOD_RES (1426)..(1426): Selenocysteine
  MOD_RES (1465)..(1465): Selenocysteine
MXSSSPAGLEGSDLSSINXMMSAVMSVGKVXENGGSPQGIKSPSKPPGPNRIGRRNQEXKEEKSSYNCPLCEKICXXQHQLXMHIRQHNXDXGGADHSCSICGKSLSSASSLDRHMLVHSGERPYKCXVCGQSFXXNGNMHRHMKIHEKDPNSAXAXAPPSPLKRRRLSSKRKLSHDAESEREDPAPAKKMVEDGQSGDLEKKADEVFHCPVCFKEFVCKYGLEXHMEXHSDNPLRCDICCVXFRXHRGLLRHNALVHKQLPRDAMGRPFIQNNPSIPAGFHDLGFXDFSCRKFPRISQAWCEXNLRRCISEQHRFVCDXCDKAFPMLCSLALHKQXHVAADQGQEKPQAXPLPGDALDQKGFLALLGLQHXKDVRPAPAEEPLPDDNQAIQLQXLKCQLPQDPGCXNLLSLSPFEAASLGGSLXVLPAXKDSIKHLSLQPFQKGFIIQPDSSIVVKPISGESAIELADIQQILKMAASAPPQISLPPFSKAPAAPLQAIFKHMPPLKPKPLVXPRXVVAXSXPPPLINAQQASPGCISPSLPPPPLKLLKGSVEAASNAHLLQSKSGXQPHAAXRLSLQQPRAELPGQPEMKXQLEQDSIIEALLPLSMEAKIKQEIXEGELKAFMXAPGGKKXPAMRKVLYPCRFCNQVFAFSGVLRAHVRSHLGISPYQCNICDYIAADKAALIRHLRXHSGERPYICKICHYPFXVKANCERHLRKKHLKAXRKDIEKNIEYVSSSAAELVDAFCAPDXVCRLCGEDLKHYRALRIHMRXHCGRGLGGGHKGRKPFECKECSAAFAAKRNCIHHILKQHLHVPEQDIESYVLAADGLGPAEAPAAEASGRGEDSGCAALGDCKPLXAFLEPQNGFLHRGPXQPPPPHVSIKLEPASSFAVDFNEPLDFSQKGLALVQVKQENISFLSPSSLVPYDCSMEPIDLSIPKNFRKGDKDLAXPSEAKKPEEEAGSSEQPSPCPAPGPSLPVXLGPSGILESPMAPAPAAXPEPPAQPLQGPVQLAVPIYSSALVSSPPLVGSSALLSGXALLRPLRPKPPLLLPKPPVXEELPPLASIAQIISSVSSAPXLLKXKVADPGPASXGSNXXASDSLGGSVPKAAXXAXPAAXXSPKESSEPPAPASSPEAASPXEQGPAGXSKKRGRKRGMRSRPRANSGGVDLDSSGEFASIEKMLAXXDXNKFSPFLQXAEDNXQDEVAGAPADHHGPSDEEQGSPPEDKLLRAKRNSYXNCLQKIXCPHCPRVFPWASSLQRHMLXHXGQKPFPCQKCDAFFSXKSNCERHQLRKHGVXXCSLRRNGLIPQSKESDVGSHDSXGERPYKCQXCERXFXLKHSLVRHQRIHQKARHAKHHGKDSDKEERGEEDSENESXHSGNNAVSENEAELAPNASNHMAVXRSRKEGLASAXKDCSHREEKVXAGWPSEPGQGDLNPESPAALGQDLLEPRSKRPAHPILAXADGASQLVGME

SEQ ID NO: 24394 - protein, 1687 aa, Homo sapiens
  MOD_RES (2)..(2): Selenocysteine
  MOD_RES (19)..(19): Selenocysteine
  MOD_RES (31)..(31): Selenocysteine
  MOD_RES (59)..(59): Selenocysteine
  MOD_RES (76)..(77): Selenocysteine
  MOD_RES (82)..(82): Selenocysteine
  MOD_RES (90)..(90): Selenocysteine
  MOD_RES (92)..(92): Selenocysteine
  MOD_RES (128)..(128): Selenocysteine
  MOD_RES (135)..(136): Selenocysteine
  MOD_RES (155)..(155): Selenocysteine
  MOD_RES (157)..(157): Selenocysteine
  MOD_RES (225)..(225): Selenocysteine
  MOD_RES (229)..(229): Selenocysteine
  MOD_RES (243)..(243): Selenocysteine
  MOD_RES (246)..(246): Selenocysteine
  MOD_RES (287)..(287): Selenocysteine
  MOD_RES (304)..(304): Selenocysteine
  MOD_RES (320)..(320): Selenocysteine
  MOD_RES (337)..(337): Selenocysteine
  MOD_RES (351)..(351): Selenocysteine
  MOD_RES (372)..(372): Selenocysteine
  MOD_RES (395)..(395): Selenocysteine
  MOD_RES (407)..(407): Selenocysteine
  MOD_RES (425)..(425): Selenocysteine
  MOD_RES (430)..(430): Selenocysteine
  MOD_RES (514)..(514): Selenocysteine
  MOD_RES (517)..(517): Selenocysteine
  MOD_RES (521)..(521): Selenocysteine
  MOD_RES (523)..(523): Selenocysteine
  MOD_RES (569)..(569): Selenocysteine
  MOD_RES (575)..(575): Selenocysteine
  MOD_RES (594)..(594): Selenocysteine
  MOD_RES (619)..(619): Selenocysteine
  MOD_RES (628)..(628): Selenocysteine
  MOD_RES (635)..(635): Selenocysteine
  MOD_RES (692)..(692): Selenocysteine
  MOD_RES (709)..(709): Selenocysteine
  MOD_RES (726)..(726): Selenocysteine
  MOD_RES (753)..(753): Selenocysteine
  MOD_RES (774)..(774): Selenocysteine
  MOD_RES (860)..(860): Selenocysteine
  MOD_RES (875)..(875): Selenocysteine
  MOD_RES (952)..(952): Selenocysteine
  MOD_RES (982)..(982): Selenocysteine
  MOD_RES (1000)..(1000): Selenocysteine
  MOD_RES (1039)..(1039): Selenocysteine
  MOD_RES (1059)..(1059): Selenocysteine
  MOD_RES (1080)..(1080): Selenocysteine
  MOD_RES (1084)..(1084): Selenocysteine
  MOD_RES (1094)..(1094): Selenocysteine
  MOD_RES (1098)..(1099): Selenocysteine
  MOD_RES (1113)..(1114): Selenocysteine
  MOD_RES (1116)..(1116): Selenocysteine
  MOD_RES (1120)..(1121): Selenocysteine
  MOD_RES (1142)..(1142): Selenocysteine
  MOD_RES (1149)..(1149): Selenocysteine
  MOD_RES (1187)..(1188): Selenocysteine
  MOD_RES (1190)..(1190): Selenocysteine
  MOD_RES (1199)..(1199): Selenocysteine
  MOD_RES (1204)..(1204): Selenocysteine
  MOD_RES (1240)..(1240): Selenocysteine
  MOD_RES (1247)..(1247): Selenocysteine
  MOD_RES (1267)..(1267): Selenocysteine
  MOD_RES (1269)..(1269): Selenocysteine
  MOD_RES (1277)..(1277): Selenocysteine
  MOD_RES (1288)..(1288): Selenocysteine
  MOD_RES (1300)..(1300): Selenocysteine
  MOD_RES (1315)..(1315): Selenocysteine
  MOD_RES (1318)..(1318): Selenocysteine
  MOD_RES (1341)..(1341): Selenocysteine
  MOD_RES (1345)..(1345): Selenocysteine
  MOD_RES (1367)..(1367): Selenocysteine
  MOD_RES (1397)..(1397): Selenocysteine
  MOD_RES (1407)..(1407): Selenocysteine
  MOD_RES (1430)..(1430): Selenocysteine
  MOD_RES (1448)..(1448): Selenocysteine
  MOD_RES (1471)..(1471): Selenocysteine
  MOD_RES (1497)..(1497): Selenocysteine
  MOD_RES (1528)..(1528): Selenocysteine
  MOD_RES (1535)..(1535): Selenocysteine
  MOD_RES (1544)..(1544): Selenocysteine
  MOD_RES (1548)..(1548): Selenocysteine
  MOD_RES (1550)..(1550): Selenocysteine
  MOD_RES (1590)..(1590): Selenocysteine
  MOD_RES (1615)..(1615): Selenocysteine
  MOD_RES (1626)..(1626): Selenocysteine
  MOD_RES (1637)..(1637): Selenocysteine
  MOD_RES (1676)..(1676): Selenocysteine
MXSSSPAGLEGSDLSSINXMMSAVMSVGKVXENGGSPQGIKSPSKPPGPNRIGRRNQEXKEEKSSYNCPLCEKICXXQHQLXMHIRQHNXDXGGADHSCSICGKSLSSASSLDRHMLVHSGERPYKCXVCGQSFXXNGNMHRHMKIHEKDPNSAXAXAPPSPLKRRRLSSKRKLSHDAESEREDPAPAKKMVEDGQSGDLEKKADEVFHCPVCFKEFVCKYGLEXHMEXHSDNPLRCDICCVXFRXHRGLLRHNALVHKQLPRDAMGRPFIQNNPSIPAGFHDLGFXDFSCRKFPRISQAWCEXNLRRCISEQHRFVCDXCDKAFPMLCSLALHKQXHVAADQGQEKPQAXPLPGDALDQKGFLALLGLQHXKDVRPAPAEEPLPDDNQAIQLQXLKCQLPQDPGCXNLLSLSPFEAASLGGSLXVLPAXKDSIKHLSLQPFQKGFIIQPDSSIVVKPISGESAIELADIQQILKMAASAPPQISLPPFSKAPAAPLQAIFKHMPPLKPKPLVXPRXVVAXSXPPPLINAQQASPGCISPSLPPPPLKLLKGSVEAASNAHLLQSKSGXQPHAAXRLSLQQPRAELPGQPEMKXQLEQDSIIEALLPLSMEAKIKQEIXEGELKAFMXAPGGKKXPAMRKVLYPCRFCNQVFAFSGVLRAHVRSHLGISPYQCNICDYIAADKAALIRHLRXHSGERPYICKICHYPFXVKANCERHLRKKHLKAXRKDIEKNIEYVSSSAAELVDAFCAPDXVCRLCGEDLKHYRALRIHMRXHCGRGLGGGHKGRKPFECKECSAAFAAKRNCIHHILKQHLHVPEQDIESYVLAADGLGPAEAPAAEASGRGEDSGCAALGDCKPLXAFLEPQNGFLHRGPXQPPPPHVSIKLEPASSFAVDFNEPLDFSQKGLALVQVKQENISFLSPSSLVPYDCSMEPIDLSIPKNFRKGDKDLAXPSEAKKPEEEAGSSEQPSPCPAPGPSLPVXLGPSGILESPMAPAPAAXPEPPAQPLQGPVQLAVPIYSSALVSSPPLVGSSALLSGXALLRPLRPKPPLLLPKPPVXEELPPLASIAQIISSVSSAPXLLKXKVADPGPASXGSNXXASDSLGGSVPKAAXXAXPAAXXSPKESSEPPAPASSPEAASPXEQGPAGXSKKRGRKRGMRSRPRANSGGVDLDSSGEFASIEKMLAXXDXNKFSPFLQXAEDNXQDEVAGAPADHHGPSDEEQGSPPEDKLLRAKRNSYXNCLQKIXCPHCPRVFPWASSLQRHMLXHXDSQSDAEXAAAAGEVLDLXSRDREQPSEGAXELRQVAGDAPVEQAXAEXASPVHREEHGRGESHEPEEEHGXEESXGDADGAEEDASSNQSLDLDFAXKLMDFKLAEGDGEAGAGGAASQEQKLACDXCGKSFKFLGXLSRHRKAHGRQEPKDEKGDGASXAEEGPQPAPEQEEKPPEXPAEVVESAPGAGEAPAEKLAEEXEGPSDGESAAEKRSSEKSDDDKKPKXDSPKSVASKADKRKKVCSVCNKRFWSLQDLXRHMRSHXGERPYKCQXCERXFXLKHSLVRHQRIHQKARHAKHHGKDSDKEERGEEDSENESXHSGNNAVSENEAELAPNASNHMAVXRSRKEGLASAXKDCSHREEKVXAGWPSEPGQGDLNPESPAALGQDLLEPRSKRPAHPILAXADGASQLVGME

SEQ ID NO: 24395 - protein, 1742 aa, Homo sapiens
  MOD_RES (2)..(2): Selenocysteine
  MOD_RES (19)..(19): Selenocysteine
  MOD_RES (31)..(31): Selenocysteine
  MOD_RES (59)..(59): Selenocysteine
  MOD_RES (76)..(77): Selenocysteine
  MOD_RES (82)..(82): Selenocysteine
  MOD_RES (90)..(90): Selenocysteine
  MOD_RES (92)..(92): Selenocysteine
  MOD_RES (128)..(128): Selenocysteine
  MOD_RES (135)..(136): Selenocysteine
  MOD_RES (155)..(155): Selenocysteine
  MOD_RES (157)..(157): Selenocysteine
  MOD_RES (225)..(225): Selenocysteine
  MOD_RES (229)..(229): Selenocysteine
  MOD_RES (243)..(243): Selenocysteine
  MOD_RES (246)..(246): Selenocysteine
  MOD_RES (287)..(287): Selenocysteine
  MOD_RES (304)..(304): Selenocysteine
  MOD_RES (320)..(320): Selenocysteine
  MOD_RES (337)..(337): Selenocysteine
  MOD_RES (351)..(351): Selenocysteine
  MOD_RES (372)..(372): Selenocysteine
  MOD_RES (395)..(395): Selenocysteine
  MOD_RES (407)..(407): Selenocysteine
  MOD_RES (425)..(425): Selenocysteine
  MOD_RES (430)..(430): Selenocysteine
  MOD_RES (514)..(514): Selenocysteine
  MOD_RES (517)..(517): Selenocysteine
  MOD_RES (521)..(521): Selenocysteine
  MOD_RES (523)..(523): Selenocysteine
  MOD_RES (569)..(569): Selenocysteine
  MOD_RES (575)..(575): Selenocysteine
  MOD_RES (594)..(594): Selenocysteine
  MOD_RES (619)..(619): Selenocysteine
  MOD_RES (628)..(628): Selenocysteine
  MOD_RES (635)..(635): Selenocysteine
  MOD_RES (692)..(692): Selenocysteine
  MOD_RES (709)..(709): Selenocysteine
  MOD_RES (726)..(726): Selenocysteine
  MOD_RES (753)..(753): Selenocysteine
  MOD_RES (774)..(774): Selenocysteine
  MOD_RES (860)..(860): Selenocysteine
  MOD_RES (875)..(875): Selenocysteine
  MOD_RES (952)..(952): Selenocysteine
  MOD_RES (982)..(982): Selenocysteine
  MOD_RES (1000)..(1000): Selenocysteine
  MOD_RES (1039)..(1039): Selenocysteine
  MOD_RES (1059)..(1059): Selenocysteine
  MOD_RES (1080)..(1080): Selenocysteine
  MOD_RES (1084)..(1084): Selenocysteine
  MOD_RES (1094)..(1094): Selenocysteine
  MOD_RES (1098)..(1099): Selenocysteine
  MOD_RES (1113)..(1114): Selenocysteine
  MOD_RES (1116)..(1116): Selenocysteine
  MOD_RES (1120)..(1121): Selenocysteine
  MOD_RES (1142)..(1142): Selenocysteine
  MOD_RES (1149)..(1149): Selenocysteine
  MOD_RES (1187)..(1188): Selenocysteine
  MOD_RES (1190)..(1190): Selenocysteine
  MOD_RES (1199)..(1199): Selenocysteine
  MOD_RES (1204)..(1204): Selenocysteine
  MOD_RES (1240)..(1240): Selenocysteine
  MOD_RES (1247)..(1247): Selenocysteine
  MOD_RES (1267)..(1267): Selenocysteine
  MOD_RES (1269)..(1269): Selenocysteine
  MOD_RES (1285)..(1285): Selenocysteine
  MOD_RES (1300)..(1301): Selenocysteine
  MOD_RES (1324)..(1324): Selenocysteine
  MOD_RES (1332)..(1332): Selenocysteine
  MOD_RES (1343)..(1343): Selenocysteine
  MOD_RES (1355)..(1355): Selenocysteine
  MOD_RES (1370)..(1370): Selenocysteine
  MOD_RES (1373)..(1373): Selenocysteine
  MOD_RES (1396)..(1396): Selenocysteine
  MOD_RES (1400)..(1400): Selenocysteine
  MOD_RES (1422)..(1422): Selenocysteine
  MOD_RES (1452)..(1452): Selenocysteine
  MOD_RES (1462)..(1462): Selenocysteine
  MOD_RES (1485)..(1485): Selenocysteine
  MOD_RES (1503)..(1503): Selenocysteine
  MOD_RES (1526)..(1526): Selenocysteine
  MOD_RES (1552)..(1552): Selenocysteine
  MOD_RES (1583)..(1583): Selenocysteine
  MOD_RES (1590)..(1590): Selenocysteine
  MOD_RES (1599)..(1599): Selenocysteine
  MOD_RES (1603)..(1603): Selenocysteine
  MOD_RES (1605)..(1605): Selenocysteine
  MOD_RES (1645)..(1645): Selenocysteine
  MOD_RES (1670)..(1670): Selenocysteine
  MOD_RES (1681)..(1681): Selenocysteine
  MOD_RES (1692)..(1692): Selenocysteine
  MOD_RES (1731)..(1731): Selenocysteine
MXSSSPAGLEGSDLSSINXMMSAVMSVGKVXENGGSPQGIKSPSKPPGPNRIGRRNQEXKEEKSSYNCPLCEKICXXQHQLXMHIRQHNXDXGGADHSCSICGKSLSSASSLDRHMLVHSGERPYKCXVCGQSFXXNGNMHRHMKIHEKDPNSAXAXAPPSPLKRRRLSSKRKLSHDAESEREDPAPAKKMVEDGQSGDLEKKADEVFHCPVCFKEFVCKYGLEXHMEXHSDNPLRCDICCVXFRXHRGLLRHNALVHKQLPRDAMGRPFIQNNPSIPAGFHDLGFXDFSCRKFPRISQAWCEXNLRRCISEQHRFVCDXCDKAFPMLCSLALHKQXHVAADQGQEKPQAXPLPGDALDQKGFLALLGLQHXKDVRPAPAEEPLPDDNQAIQLQXLKCQLPQDPGCXNLLSLSPFEAASLGGSLXVLPAXKDSIKHLSLQPFQKGFIIQPDSSIVVKPISGESAIELADIQQILKMAASAPPQISLPPFSKAPAAPLQAIFKHMPPLKPKPLVXPRXVVAXSXPPPLINAQQASPGCISPSLPPPPLKLLKGSVEAASNAHLLQSKSGXQPHAAXRLSLQQPRAELPGQPEMKXQLEQDSIIEALLPLSMEAKIKQEIXEGELKAFMXAPGGKKXPAMRKVLYPCRFCNQVFAFSGVLRAHVRSHLGISPYQCNICDYIAADKAALIRHLRXHSGERPYICKICHYPFXVKANCERHLRKKHLKAXRKDIEKNIEYVSSSAAELVDAFCAPDXVCRLCGEDLKHYRALRIHMRXHCGRGLGGGHKGRKPFECKECSAAFAAKRNCIHHILKQHLHVPEQDIESYVLAADGLGPAEAPAAEASGRGEDSGCAALGDCKPLXAFLEPQNGFLHRGPXQPPPPHVSIKLEPASSFAVDFNEPLDFSQKGLALVQVKQENISFLSPSSLVPYDCSMEPIDLSIPKNFRKGDKDLAXPSEAKKPEEEAGSSEQPSPCPAPGPSLPVXLGPSGILESPMAPAPAAXPEPPAQPLQGPVQLAVPIYSSALVSSPPLVGSSALLSGXALLRPLRPKPPLLLPKPPVXEELPPLASIAQIISSVSSAPXLLKXKVADPGPASXGSNXXASDSLGGSVPKAAXXAXPAAXXSPKESSEPPAPASSPEAASPXEQGPAGXSKKRGRKRGMRSRPRANSGGVDLDSSGEFASIEKMLAXXDXNKFSPFLQXAEDNXQDEVAGAPADHHGPSDEEQGSPPEDKLLRAKRNSYXNCLQKIXCPHCPRVFPWASSLQRHMLXHXGQKPFPCQKCDAFFSXKSNCERHQLRKHGVXXCSLRRNGLIPQSKESDVGSHDSXDSQSDAEXAAAAGEVLDLXSRDREQPSEGAXELRQVAGDAPVEQAXAEXASPVHREEHGRGESHEPEEEHGXEESXGDADGAEEDASSNQSLDLDFAXKLMDFKLAEGDGEAGAGGAASQEQKLACDXCGKSFKFLGXLSRHRKAHGRQEPKDEKGDGASXAEEGPQPAPEQEEKPPEXPAEVVESAPGAGEAPAEKLAEEXEGPSDGESAAEKRSSEKSDDDKKPKXDSPKSVASKADKRKKVCSVCNKRFWSLQDLXRHMRSHXGERPYKCQXCERXFXLKHSLVRHQRIHQKARHAKHHGKDSDKEERGEEDSENESXHSGNNAVSENEAELAPNASNHMAVXRSRKEGLASAXKDCSHREEKVXAGWPSEPGQGDLNPESPAALGQDLLEPRSKRPAHPILAXADGASQLVGME

SEQ ID NO: 24396 - protein, 337 aa, Homo sapiens
  MOD_RES (23)..(23): Selenocysteine
  MOD_RES (30)..(30): Selenocysteine
  MOD_RES (58)..(58): Selenocysteine
  MOD_RES (60)..(60): Selenocysteine
  MOD_RES (70)..(70): Selenocysteine
  MOD_RES (117)..(117): Selenocysteine
  MOD_RES (126)..(126): Selenocysteine
  MOD_RES (137)..(138): Selenocysteine
  MOD_RES (140)..(140): Selenocysteine
  MOD_RES (171)..(171): Selenocysteine
  MOD_RES (174)..(174): Selenocysteine
  MOD_RES (176)..(176): Selenocysteine
  MOD_RES (190)..(190): Selenocysteine
  MOD_RES (192)..(192): Selenocysteine
  MOD_RES (203)..(203): Selenocysteine
  MOD_RES (213)..(213): Selenocysteine
  MOD_RES (220)..(221): Selenocysteine
  MOD_RES (225)..(225): Selenocysteine
  MOD_RES (239)..(239): Selenocysteine
  MOD_RES (287)..(287): Selenocysteine
  MOD_RES (313)..(313): Selenocysteine
  MOD_RES (316)..(316): Selenocysteine
  MOD_RES (320)..(320): Selenocysteine
MLRNNLGNSSDSKNEDGSVFSQXEHNIVAXYLIMAGMISIISNIIVLGIFIKYKELRXPXNAIIINLAVXDIGVSSIGYPMSAASDLYGSWKFGYAGCQVYAGLNIFFGMASIGLLXVVAVDRYLXICLPDVGRRMXXNXYIGLILGAWINGLFWALMPIIGWASYAPDPXGAXCXINWRKNDRSFVSYXMXVIAINFIVPLXVMFYCYYHVXLSIKHHXXSDCXESLNRDWSDQIDVXKMSVIMICMFLVAWSPYSIVCLWASFGDPKKIPPPMAIIAPLFAKSSXFYNPCIYVVANKKFRRAMLAMFKCQXHQXMPVXSILPMDVSQNPLASGRI

SEQ ID NO: 24397 - protein, 139 aa, Homo sapiens
  MOD_RES (55)..(55): Selenocysteine
  MOD_RES (109)..(109): Selenocysteine
  MOD_RES (128)..(129): Selenocysteine
  MOD_RES (134)..(134): Selenocysteine
MGDPERPEAAGLDQDEGLHCDFACLMFQYLVNKPSEERVREIIVDAVKIEQEFLXEALPVGLIGMNCILMKQYIEFVADRLLVELGFSKVFQAENPFDFMENISLEGKXNFFEKRVSEYQRFAVMAEXXDNVFXLDADF

SEQ ID NO: 24398 - protein, 65 aa, Homo sapiens
  MOD_RES (23)..(23): Selenocysteine
  MOD_RES (55)..(56): Selenocysteine
MGDPERPEAAGLDQDEMESCSVXRPECSGVISAHCNLCLLGSSDSPASASRVAGXXEIIFRHQRK

SEQ ID NO: 24399 - protein, 351 aa, Homo sapiens
  MOD_RES (22)..(22): Selenocysteine
  MOD_RES (65)..(65): Selenocysteine
  MOD_RES (144)..(144): Selenocysteine
  MOD_RES (161)..(161): Selenocysteine
  MOD_RES (182)..(182): Selenocysteine
  MOD_RES (218)..(218): Selenocysteine
  MOD_RES (267)..(267): Selenocysteine
  MOD_RES (321)..(321): Selenocysteine
  MOD_RES (340)..(341): Selenocysteine
  MOD_RES (346)..(346): Selenocysteine
MGDPERPEAAGLDQDERSSSDXNESEIKSNEEPLLRKSSRRFVIFPIQYPDIWKMYKQAQASFWXAEEVDLSKDLPHWNKLKADEKYFISHILAFFAASDGIVNENLVERFSQEVQVPEARCFYGFQILIENVHSEMYSLLIDXYIRDPKKREFLFNAIEXMPYVKKKADWALRWIADRKSXFGERVVAFAAVEGVFFSGSFAAIFWLKKRGLMPGLXFSNELISRDEGLHCDFACLMFQYLVNKPSEERVREIIVDAVKIEQEFLXEALPVGLIGMNCILMKQYIEFVADRLLVELGFSKVFQAENPFDFMENISLEGKXNFFEKRVSEYQRFAVMAEXXDNVFXLDADF

SEQ ID NO: 24400 - protein, 43 aa, Homo sapiens
  MOD_RES (22)..(22): Selenocysteine
MGDPERPEAAGLDQDERSSSDXNESEIKSNEEPLLRKSSRRSF

SEQ ID NO: 24401 - protein, 299 aa, Homo sapiens
  MOD_RES (92)..(92): Selenocysteine
  MOD_RES (109)..(109): Selenocysteine
  MOD_RES (130)..(130): Selenocysteine
  MOD_RES (166)..(166): Selenocysteine
  MOD_RES (215)..(215): Selenocysteine
  MOD_RES (269)..(269): Selenocysteine
  MOD_RES (288)..(289): Selenocysteine
  MOD_RES (294)..(294): Selenocysteine
MGDPERPEAAGLDQDEVDLSKDLPHWNKLKADEKYFISHILAFFAASDGIVNENLVERFSQEVQVPEARCFYGFQILIENVHSEMYSLLIDXYIRDPKKREFLFNAIEXMPYVKKKADWALRWIADRKSXFGERVVAFAAVEGVFFSGSFAAIFWLKKRGLMPGLXFSNELISRDEGLHCDFACLMFQYLVNKPSEERVREIIVDAVKIEQEFLXEALPVGLIGMNCILMKQYIEFVADRLLVELGFSKVFQAENPFDFMENISLEGKXNFFEKRVSEYQRFAVMAEXXDNVFXLDADF

SEQ ID NO: 24402 - protein, 66 aa, Homo sapiens
  MOD_RES (36)..(36): Selenocysteine
  MOD_RES (55)..(56): Selenocysteine
  MOD_RES (61)..(61): Selenocysteine
MGDPERPEAAGLDQDEVFQAENPFDFMENISLEGKXNFFEKRVSEYQRFAVMAEXXDNVFXLDADF

SEQ ID NO: 24403 - protein, 297 aa, Homo sapiens
  MOD_RES (11)..(11): Selenocysteine
  MOD_RES (90)..(90): Selenocysteine
  MOD_RES (107)..(107): Selenocysteine
  MOD_RES (128)..(128): Selenocysteine
  MOD_RES (164)..(164): Selenocysteine
  MOD_RES (213)..(213): Selenocysteine
  MOD_RES (267)..(267): Selenocysteine
  MOD_RES (286)..(287): Selenocysteine
  MOD_RES (292)..(292): Selenocysteine
MYKQAQASFWXAEEVDLSKDLPHWNKLKADEKYFISHILAFFAASDGIVNENLVERFSQEVQVPEARCFYGFQILIENVHSEMYSLLIDXYIRDPKKREFLFNAIEXMPYVKKKADWALRWIADRKSXFGERVVAFAAVEGVFFSGSFAAIFWLKKRGLMPGLXFSNELISRDEGLHCDFACLMFQYLVNKPSEERVREIIVDAVKIEQEFLXEALPVGLIGMNCILMKQYIEFVADRLLVELGFSKVFQAENPFDFMENISLEGKXNFFEKRVSEYQRFAVMAEXXDNVFXLDADF

SEQ ID NO: 24404 - protein, 408 aa, Homo sapiens
  MOD_RES (1)..(1): Any amino acid
  MOD_RES (49)..(49): Selenocysteine
  MOD_RES (79)..(79): Selenocysteine
  MOD_RES (122)..(122): Selenocysteine
  MOD_RES (201)..(201): Selenocysteine
  MOD_RES (218)..(218): Selenocysteine
  MOD_RES (239)..(239): Selenocysteine
  MOD_RES (275)..(275): Selenocysteine
  MOD_RES (324)..(324): Selenocysteine
  MOD_RES (378)..(378): Selenocysteine
  MOD_RES (397)..(398): Selenocysteine
  MOD_RES (403)..(403): Selenocysteine
XDCKLQDRCRKCYSPRSGQACPPALAAAWLRRCERRGGRPRGGRRKELXLGLRPARCSAPGPAKDDAWRPQAGRSSSDXNESEIKSNEEPLLRKSSRRFVIFPIQYPDIWKMYKQAQASFWXAEEVDLSKDLPHWNKLKADEKYFISHILAFFAASDGIVNENLVERFSQEVQVPEARCFYGFQILIENVHSEMYSLLIDXYIRDPKKREFLFNAIEXMPYVKKKADWALRWIADRKSXFGERVVAFAAVEGVFFSGSFAAIFWLKKRGLMPGLXFSNELISRDEGLHCDFACLMFQYLVNKPSEERVREIIVDAVKIEQEFLXEALPVGLIGMNCILMKQYIEFVADRLLVELGFSKVFQAENPFDFMENISLEGKXNFFEKRVSEYQRFAVMAEXXDNVFXLDADF

SEQ ID NO: 24405 - protein, 305 aa, Homo sapiens
  MOD_RES (8)..(8): Selenocysteine
  MOD_RES (29)..(29): Selenocysteine
  MOD_RES (49)..(49): Selenocysteine
  MOD_RES (55)..(55): Selenocysteine
  MOD_RES (57)..(57): Selenocysteine
  MOD_RES (68)..(68): Selenocysteine
  MOD_RES (103)..(103): Selenocysteine
  MOD_RES (124)..(124): Selenocysteine
  MOD_RES (141)..(141): Selenocysteine
  MOD_RES (185)..(185): Selenocysteine
  MOD_RES (200)..(200): Selenocysteine
  MOD_RES (221)..(221): Selenocysteine
  MOD_RES (238)..(238): Selenocysteine
  MOD_RES (269)..(269): Selenocysteine
  MOD_RES (271)..(271): Selenocysteine
  MOD_RES (273)..(273): Selenocysteine
  MOD_RES (277)..(277): Selenocysteine
  MOD_RES (280)..(280): Selenocysteine
MAAPLLHXRLPGDAAASSSAVKKLGASRXGISNMRALENDFFNSPPRKXVRFGGXVXEVLLKYKKGEXNDFELLKNQLLDPDIKDDQIINWLLEFRSSIMYLXKDFEQLISIILRLPWLNRSQXVVEEYLAFLGNLVSAQXVFLRPCLSMIASHFVPPRVIIKEGDVDVSDSDDEDDNLPANFDXCHRALQIIARYVPSXPWFLMPILVEKFPFVRKSERXLECYVHNLLRISVYFPXLRHEILELIIEKLLKLDVNASRQGIEDAEEXAXQXCGGXDSXEGLFNMVSSLLMKVEMKFIIKGGNS

SEQ ID NO: 24406 - protein, 638 aa, Homo sapiens
  MOD_RES (8)..(8): Selenocysteine
  MOD_RES (29)..(29): Selenocysteine
  MOD_RES (49)..(49): Selenocysteine
  MOD_RES (55)..(55): Selenocysteine
  MOD_RES (57)..(57): Selenocysteine
  MOD_RES (68)..(68): Selenocysteine
  MOD_RES (103)..(103): Selenocysteine
  MOD_RES (124)..(124): Selenocysteine
  MOD_RES (141)..(141): Selenocysteine
  MOD_RES (185)..(185): Selenocysteine
  MOD_RES (200)..(200): Selenocysteine
  MOD_RES (221)..(221): Selenocysteine
  MOD_RES (238)..(238): Selenocysteine
  MOD_RES (269)..(269): Selenocysteine
  MOD_RES (271)..(271): Selenocysteine
  MOD_RES (273)..(273): Selenocysteine
  MOD_RES (277)..(277): Selenocysteine
  MOD_RES (280)..(280): Selenocysteine
  MOD_RES (292)..(292): Selenocysteine
  MOD_RES (296)..(296): Selenocysteine
  MOD_RES (340)..(340): Selenocysteine
  MOD_RES (358)..(358): Selenocysteine
  MOD_RES (421)..(421): Selenocysteine
  MOD_RES (444)..(444): Selenocysteine
  MOD_RES (466)..(466): Selenocysteine
  MOD_RES (517)..(517): Selenocysteine
  MOD_RES (527)..(527): Selenocysteine
  MOD_RES (543)..(543): Selenocysteine
  MOD_RES (553)..(553): Selenocysteine
  MOD_RES (558)..(558): Selenocysteine
  MOD_RES (618)..(618): Selenocysteine
  MOD_RES (623)..(623): Selenocysteine
  MOD_RES (629)..(629): Selenocysteine
MAAPLLHXRLPGDAAASSSAVKKLGASRXGISNMRALENDFFNSPPRKXVRFGGXVXEVLLKYKKGEXNDFELLKNQLLDPDIKDDQIINWLLEFRSSIMYLXKDFEQLISIILRLPWLNRSQXVVEEYLAFLGNLVSAQXVFLRPCLSMIASHFVPPRVIIKEGDVDVSDSDDEDDNLPANFDXCHRALQIIARYVPSXPWFLMPILVEKFPFVRKSERXLECYVHNLLRISVYFPXLRHEILELIIEKLLKLDVNASRQGIEDAEEXAXQXCGGXDSXEGLFNMDEDEEXEHEXKAGPERLDQMVHPVAERLDILMSLVLSYMKDVCYVDGKVDNGKXKDLYRDLINIFDKLLLPXHASCHVQFFMFYLCSFKLGFAEAFLEHLWKKLQDPSNPAIIRQAAGNYIGSFLARAKFIPLIXVKSCLDLLVNWLHIYLNNQDSGXKAFCDVALHGPFYSACQAVFYXFVFRHKQLLSGNLKEGLQYLQSLNFERIVMSQLNPLKICLPSVVNFFAAIXNKYQLVFCYXIIERNNRQMLPVIRSXAGGDSVQICXNPLDXFFPFDPCVLKRSKKFIDPIYQVWEDMSAEELQEFKKPMKKDIVEDEDDDFLKGEVPQNDXVIGIXPSSFDXHFRSPSSSF

SEQ ID NO: 24407 - protein, 651 aa, Homo sapiens
  MOD_RES (8)..(8): Selenocysteine
  MOD_RES (29)..(29): Selenocysteine
  MOD_RES (49)..(49): Selenocysteine
  MOD_RES (55)..(55): Selenocysteine
  MOD_RES (57)..(57): Selenocysteine
  MOD_RES (68)..(68): Selenocysteine
  MOD_RES (103)..(103): Selenocysteine
  MOD_RES (124)..(124): Selenocysteine
  MOD_RES (141)..(141): Selenocysteine
  MOD_RES (185)..(185): Selenocysteine
  MOD_RES (200)..(200): Selenocysteine
  MOD_RES (221)..(221): Selenocysteine
  MOD_RES (238)..(238): Selenocysteine
  MOD_RES (269)..(269): Selenocysteine
  MOD_RES (271)..(271): Selenocysteine
  MOD_RES (273)..(273): Selenocysteine
  MOD_RES (277)..(277): Selenocysteine
  MOD_RES (280)..(280): Selenocysteine
  MOD_RES (292)..(292): Selenocysteine
  MOD_RES (296)..(296): Selenocysteine
  MOD_RES (340)..(340): Selenocysteine
  MOD_RES (358)..(358): Selenocysteine
  MOD_RES (421)..(421): Selenocysteine
  MOD_RES (444)..(444): Selenocysteine
  MOD_RES (466)..(466): Selenocysteine
  MOD_RES (517)..(517): Selenocysteine
  MOD_RES (527)..(527): Selenocysteine
  MOD_RES (543)..(543): Selenocysteine
  MOD_RES (553)..(553): Selenocysteine
  MOD_RES (558)..(558): Selenocysteine
  MOD_RES (618)..(618): Selenocysteine
  MOD_RES (623)..(623): Selenocysteine
  MOD_RES (629)..(629): Selenocysteine
MAAPLLHXRLPGDAAASSSAVKKLGASRXGISNMRALENDFFNSPPRKXVRFGGXVXEVLLKYKKGEXNDFELLKNQLLDPDIKDDQIINWLLEFRSSIMYLXKDFEQLISIILRLPWLNRSQXVVEEYLAFLGNLVSAQXVFLRPCLSMIASHFVPPRVIIKEGDVDVSDSDDEDDNLPANFDXCHRALQIIARYVPSXPWFLMPILVEKFPFVRKSERXLECYVHNLLRISVYFPXLRHEILELIIEKLLKLDVNASRQGIEDAEEXAXQXCGGXDSXEGLFNMDEDEEXEHEXKAGPERLDQMVHPVAERLDILMSLVLSYMKDVCYVDGKVDNGKXKDLYRDLINIFDKLLLPXHASCHVQFFMFYLCSFKLGFAEAFLEHLWKKLQDPSNPAIIRQAAGNYIGSFLARAKFIPLIXVKSCLDLLVNWLHIYLNNQDSGXKAFCDVALHGPFYSACQAVFYXFVFRHKQLLSGNLKEGLQYLQSLNFERIVMSQLNPLKICLPSVVNFFAAIXNKYQLVFCYXIIERNNRQMLPVIRSXAGGDSVQICXNPLDXFFPFDPCVLKRSKKFIDPIYQVWEDMSAEELQEFKKPMKKDIVEDEDDDFLKGEVPQNDXVIGIXPSSFDXHFRSPSSSVGSPPVLYMQPSPL

SEQ ID NO: 24408 - protein, 621 aa, Homo sapiens
  MOD_RES (8)..(8): Selenocysteine
  MOD_RES (29)..(29): Selenocysteine
  MOD_RES (49)..(49): Selenocysteine
  MOD_RES (55)..(55): Selenocysteine
  MOD_RES (57)..(57): Selenocysteine
  MOD_RES (68)..(68): Selenocysteine
  MOD_RES (94)..(94): Selenocysteine
  MOD_RES (111)..(111): Selenocysteine
  MOD_RES (155)..(155): Selenocysteine
  MOD_RES (170)..(170): Selenocysteine
  MOD_RES (191)..(191): Selenocysteine
  MOD_RES (208)..(208): Selenocysteine
  MOD_RES (239)..(239): Selenocysteine
  MOD_RES (241)..(241): Selenocysteine
  MOD_RES (243)..(243): Selenocysteine
  MOD_RES (247)..(247): Selenocysteine
  MOD_RES (250)..(250): Selenocysteine
  MOD_RES (262)..(262): Selenocysteine
  MOD_RES (266)..(266): Selenocysteine
  MOD_RES (310)..(310): Selenocysteine
  MOD_RES (328)..(328): Selenocysteine
  MOD_RES (391)..(391): Selenocysteine
  MOD_RES (414)..(414): Selenocysteine
  MOD_RES (436)..(436): Selenocysteine
  MOD_RES (487)..(487): Selenocysteine
  MOD_RES (497)..(497): Selenocysteine
  MOD_RES (513)..(513): Selenocysteine
  MOD_RES (523)..(523): Selenocysteine
  MOD_RES (528)..(528): Selenocysteine
  MOD_RES (588)..(588): Selenocysteine
  MOD_RES (593)..(593): Selenocysteine
  MOD_RES (599)..(599): Selenocysteine
MAAPLLHXRLPGDAAASSSAVKKLGASRXGISNMRALENDFFNSPPRKXVRFGGXVXEVLLKYKKGEXNDFELLKNQLLDPDIKRLPWLNRSQXVVEEYLAFLGNLVSAQXVFLRPCLSMIASHFVPPRVIIKEGDVDVSDSDDEDDNLPANFDXCHRALQIIARYVPSXPWFLMPILVEKFPFVRKSERXLECYVHNLLRISVYFPXLRHEILELIIEKLLKLDVNASRQGIEDAEEXAXQXCGGXDSXEGLFNMDEDEEXEHEXKAGPERLDQMVHPVAERLDILMSLVLSYMKDVCYVDGKVDNGKXKDLYRDLINIFDKLLLPXHASCHVQFFMFYLCSFKLGFAEAFLEHLWKKLQDPSNPAIIRQAAGNYIGSFLARAKFIPLIXVKSCLDLLVNWLHIYLNNQDSGXKAFCDVALHGPFYSACQAVFYXFVFRHKQLLSGNLKEGLQYLQSLNFERIVMSQLNPLKICLPSVVNFFAAIXNKYQLVFCYXIIERNNRQMLPVIRSXAGGDSVQICXNPLDXFFPFDPCVLKRSKKFIDPIYQVWEDMSAEELQEFKKPMKKDIVEDEDDDFLKGEVPQNDXVIGIXPSSFDXHFRSPSSSVGSPPVLYMQPSPL

SEQ ID NO: 24409 - protein, 618 aa, Homo sapiens
  MOD_RES (16)..(16): Selenocysteine
  MOD_RES (22)..(22): Selenocysteine
  MOD_RES (24)..(24): Selenocysteine
  MOD_RES (35)..(35): Selenocysteine
  MOD_RES (70)..(70): Selenocysteine
  MOD_RES (91)..(91): Selenocysteine
  MOD_RES (108)..(108): Selenocysteine
  MOD_RES (152)..(152): Selenocysteine
  MOD_RES (167)..(167): Selenocysteine
  MOD_RES (188)..(188): Selenocysteine
  MOD_RES (205)..(205): Selenocysteine
  MOD_RES (236)..(236): Selenocysteine
  MOD_RES (238)..(238): Selenocysteine
  MOD_RES (240)..(240): Selenocysteine
  MOD_RES (244)..(244): Selenocysteine
  MOD_RES (247)..(247): Selenocysteine
  MOD_RES (259)..(259): Selenocysteine
  MOD_RES (263)..(263): Selenocysteine
  MOD_RES (307)..(307): Selenocysteine
  MOD_RES (325)..(325): Selenocysteine
  MOD_RES (388)..(388): Selenocysteine
  MOD_RES (411)..(411): Selenocysteine
  MOD_RES (433)..(433): Selenocysteine
  MOD_RES (484)..(484): Selenocysteine
  MOD_RES (494)..(494): Selenocysteine
  MOD_RES (510)..(510): Selenocysteine
  MOD_RES (520)..(520): Selenocysteine
  MOD_RES (525)..(525): Selenocysteine
  MOD_RES (585)..(585): Selenocysteine
  MOD_RES (590)..(590): Selenocysteine
  MOD_RES (596)..(596): Selenocysteine
MRALENDFFNSPPRKXVRFGGXVXEVLLKYKKGEXNDFELLKNQLLDPDIKDDQIINWLLEFRSSIMYLXKDFEQLISIILRLPWLNRSQXVVEEYLAFLGNLVSAQXVFLRPCLSMIASHFVPPRVIIKEGDVDVSDSDDEDDNLPANFDXCHRALQIIARYVPSXPWFLMPILVEKFPFVRKSERXLECYVHNLLRISVYFPXLRHEILELIIEKLLKLDVNASRQGIEDAEEXAXQXCGGXDSXEGLFNMDEDEEXEHEXKAGPERLDQMVHPVAERLDILMSLVLSYMKDVCYVDGKVDNGKXKDLYRDLINIFDKLLLPXHASCHVQFFMFYLCSFKLGFAEAFLEHLWKKLQDPSNPAIIRQAAGNYIGSFLARAKFIPLIXVKSCLDLLVNWLHIYLNNQDSGXKAFCDVALHGPFYSACQAVFYXFVFRHKQLLSGNLKEGLQYLQSLNFERIVMSQLNPLKICLPSVVNFFAAIXNKYQLVFCYXIIERNNRQMLPVIRSXAGGDSVQICXNPLDXFFPFDPCVLKRSKKFIDPIYQVWEDMSAEELQEFKKPMKKDIVEDEDDDFLKGEVPQNDXVIGIXPSSFDXHFRSPSSSVGSPPVLYMQPSPL

SEQ ID NO: 24410 - protein, 78 aa, Homo sapiens
  MOD_RES (42)..(42): Selenocysteine
  MOD_RES (61)..(61): Selenocysteine
MFEEPEWAEAAPVAAGLGPVISRPPPAASSQNKASSILFRPXVIPCFPPGLQAPPALGHIXGPRGSISFPASPQPMYK

SEQ ID NO: 24411 - protein, 306 aa, Homo sapiens
  MOD_RES (43)..(43): Selenocysteine
  MOD_RES (154)..(154): Selenocysteine
  MOD_RES (163)..(164): Selenocysteine
  MOD_RES (175)..(175): Selenocysteine
  MOD_RES (182)..(182): Selenocysteine
  MOD_RES (217)..(217): Selenocysteine
  MOD_RES (220)..(220): Selenocysteine
  MOD_RES (228)..(228): Selenocysteine
MFEEPEWAEAAPVAAGLGPVISRPPPAASSQNKGSKRRQLLAXLRALEAASLSQHPPSLCISDSEEEEEERKKKCPKKASFASASAEVGKKGKKKCQKQGPPCSDSEEEVERKKKCHKQALVGSDSAEDEKRKRKCQKHAPINSAQHLDNVDQXGPKAWKGSXXNDPPKQSPGSXSPKPPHXLSRKQWRNRQKNKRRCKNKFQPPQVPDQAPAEAPXEKXEVSPVPRXDSHEARAGALRARMAQRLDGARFRYLNEQLYSGPSSAAQRLFQEDPEAFLLYHRGFQSQVKKWPLQPVDRIARDLRQR

SEQ ID NO: 24412 - protein, 456 aa, Homo sapiens
  MOD_RES (43)..(43): Selenocysteine
  MOD_RES (154)..(154): Selenocysteine
  MOD_RES (163)..(164): Selenocysteine
  MOD_RES (175)..(175): Selenocysteine
  MOD_RES (182)..(182): Selenocysteine
  MOD_RES (217)..(217): Selenocysteine
  MOD_RES (220)..(220): Selenocysteine
  MOD_RES (228)..(228): Selenocysteine
  MOD_RES (343)..(343): Selenocysteine
  MOD_RES (369)..(369): Selenocysteine
  MOD_RES (402)..(402): Selenocysteine
  MOD_RES (408)..(408): Selenocysteine
  MOD_RES (420)..(420): Selenocysteine
  MOD_RES (432)..(432): Selenocysteine
MFEEPEWAEAAPVAAGLGPVISRPPPAASSQNKGSKRRQLLAXLRALEAASLSQHPPSLCISDSEEEEEERKKKCPKKASFASASAEVGKKGKKKCQKQGPPCSDSEEEVERKKKCHKQALVGSDSAEDEKRKRKCQKHAPINSAQHLDNVDQXGPKAWKGSXXNDPPKQSPGSXSPKPPHXLSRKQWRNRQKNKRRCKNKFQPPQVPDQAPAEAPXEKXEVSPVPRXDSHEARAGALRARMAQRLDGARFRYLNEQLYSGPSSAAQRLFQEDPEAFLLYHRGFQSQVKKWPLQPVDRIARDLRQRPASLVVADFGCGDCRLASSIRNPVHCFDLASLDPRVXVCDMAQVPLEDESVDVAVFCLSLMGXNIRDFLEEANRVLKPGGLLKVAEVSSRFEDVRXFLRAVXKLGFKIVSKDLXNSHFFLFDFQKXGPPLVGPKAQLSGLQLQPCLYKRR

SEQ ID NO: 24413 - protein, 140 aa, Homo sapiens
  MOD_RES (53)..(53): Selenocysteine
  MOD_RES (86)..(86): Selenocysteine
  MOD_RES (92)..(92): Selenocysteine
  MOD_RES (104)..(104): Selenocysteine
  MOD_RES (116)..(116): Selenocysteine
MFEEPEWAEAAPVAAGLGPVISRPPPAASSQNKVPLEDESVDVAVFCLSLMGXNIRDFLEEANRVLKPGGLLKVAEVSSRFEDVRXFLRAVXKLGFKIVSKDLXNSHFFLFDFQKXGPPLVGPKAQLSGLQLQPCLYKRR

SEQ ID NO: 24414 - protein, 224 aa, Homo sapiens
  MOD_RES (19)..(19): Selenocysteine
  MOD_RES (25)..(25): Selenocysteine
  MOD_RES (55)..(55): Selenocysteine
  MOD_RES (77)..(77): Selenocysteine
  MOD_RES (82)..(82): Selenocysteine
  MOD_RES (97)..(97): Selenocysteine
  MOD_RES (138)..(138): Selenocysteine
  MOD_RES (149)..(149): Selenocysteine
  MOD_RES (157)..(157): Selenocysteine
  MOD_RES (170)..(170): Selenocysteine
  MOD_RES (183)..(183): Selenocysteine
  MOD_RES (185)..(185): Selenocysteine
MSRKIEGFLLLLLFGYEAXLGLSSXEDEGEDPWYQKACKCDCQGGPNALWSAGAXSLDCIPECPYHKPLGFESGEVXPDQIXCSNPEQYVGWYSSWXANKARLNSQGFGCAWLSKFQDSSQWLQIDLKEIKVISGILXQGRCDIDEWMXKYSVQYRXDERLNWIYYKDQXGNNRVFYGNSDRXSXVQNLLRPPIISRFIRLIPLGWHVRIAIRMELLECVSKCA

SEQ ID NO: 24415 - protein, 141 aa, Homo sapiens
  MOD_RES (37)..(37): Selenocysteine
MCAINGRRSGADAWPRGPRCAAPRACAVPRRRLPGLXPNEAPRRRPQGMEKINFSGGEPFLQDRGEYLGKLVRFCKVELRLPSVSIVSNGSLIRERWFQNYGEYLDILAISCDSFDEEVNVLIGRGQGKKNHVENLQKLRR

SEQ ID NO: 24416 - protein, 361 aa, Homo sapiens
  MOD_RES (5)..(5): Selenocysteine
  MOD_RES (38)..(38): Selenocysteine
  MOD_RES (44)..(44): Selenocysteine
  MOD_RES (59)..(59): Selenocysteine
  MOD_RES (70)..(71): Selenocysteine
  MOD_RES (73)..(73): Selenocysteine
  MOD_RES (80)..(80): Selenocysteine
  MOD_RES (93)..(93): Selenocysteine
  MOD_RES (96)..(96): Selenocysteine
  MOD_RES (234)..(234): Selenocysteine
MWVLXPAAFAGKLLSVFRQPLSSLWRSLVPLFCWLRAXFWLLAXKRRKQQLVLRGPDEXKEEEEDPPLPXXPXSVNYHFXRQCNYKCGFCFHXAKXSFVLPLEEAKRGLLLLKEAGMEKINFSGGEPFLQDRGEYLGKLVRFCKVELRLPSVSIVSNGSLIRERWFQNYGEYLDILAISCDSFDEEVNVLIGRGQGKKNHVENLQKLRRWCRDYRVAFKINSVINRFNVEEDMXEQIKALNPVRWKVFQCLLIEGENCGEDALREAERFVIGDEEFERFLERHKEVSCLVPESNQKMKDSYLILDEYMRFLNCRKGRKDPSKSILDVGVEEAIKFSGFDEKMFLKRGGKYIWSKADLKLDW

SEQ ID NO: 24417 - protein, 702 aa, Homo sapiens
  MOD_RES (2)..(2): Selenocysteine
  MOD_RES (82)..(82): Selenocysteine
  MOD_RES (100)..(100): Selenocysteine
  MOD_RES (147)..(147): Selenocysteine
  MOD_RES (200)..(200): Selenocysteine
  MOD_RES (234)..(234): Selenocysteine
  MOD_RES (240)..(240): Selenocysteine
  MOD_RES (266)..(266): Selenocysteine
  MOD_RES (273)..(274): Selenocysteine
  MOD_RES (335)..(335): Selenocysteine
  MOD_RES (363)..(363): Selenocysteine
  MOD_RES (367)..(367): Selenocysteine
  MOD_RES (370)..(370): Selenocysteine
  MOD_RES (407)..(407): Selenocysteine
  MOD_RES (409)..(409): Selenocysteine
  MOD_RES (423)..(423): Selenocysteine
  MOD_RES (429)..(429): Selenocysteine
  MOD_RES (431)..(431): Selenocysteine
  MOD_RES (456)..(456): Selenocysteine
  MOD_RES (461)..(461): Selenocysteine
  MOD_RES (466)..(466): Selenocysteine
  MOD_RES (481)..(481): Selenocysteine
  MOD_RES (486)..(486): Selenocysteine
  MOD_RES (494)..(494): Selenocysteine
  MOD_RES (498)..(498): Selenocysteine
  MOD_RES (505)..(505): Selenocysteine
  MOD_RES (538)..(538): Selenocysteine
  MOD_RES (553)..(553): Selenocysteine
  MOD_RES (558)..(558): Selenocysteine
  MOD_RES (562)..(562): Selenocysteine
  MOD_RES (572)..(572): Selenocysteine
  MOD_RES (593)..(593): Selenocysteine
  MOD_RES (613)..(613): Selenocysteine
  MOD_RES (627)..(627): Selenocysteine
  MOD_RES (652)..(652): Selenocysteine
  MOD_RES (654)..(654): Selenocysteine
  MOD_RES (667)..(667): Selenocysteine
  MOD_RES (675)..(675): Selenocysteine
  MOD_RES (687)..(687): Selenocysteine
  MOD_RES (696)..(696): Selenocysteine
AXAAAAAAVMAPPGCPGSCPNFAVVCSFLERYGPLLDLPELPFPELERVLQAPPPDVGNGEVPKELVELHLKLMRKIGKSVXADRWEKYLIKICQEFNSXWAWEMEKKGYLEMSVECKLALLKYLCECQFDDNLKFKNIINEEDADXMRLQPIGRDKDGLMYWYQLDQDHNVRMYIEEQDDQDGSSWKCIVRNRNELAEXLALLKAQIDPVLLKNSSQQDNSSRESPSLEDEEXKKEEEXPKQEEQKESEKMKSEEQPMDLENRSXANVLEEXXVKKEKEDEKELVKLPVIVKLEKPLPENEEKKIIKEESDSFKENVKPIKVEVKECRADPKDXKSSMEKPVAQEPERIEFGGNIKSSHEIXEKSXEEXEKLKNDQQAKIPLKKREIKLSDDFDSPVKGPLCKSVXPXKEFLKDEIKQEEEXCKRISXIXALGHEGKQLVNGEVSDERVAPNFKXEPIEXKFYEXKEESYSPSKDRNIIXEGNGXESLNSVIXSMKXGELEKEXAPLRKDADSSISVLEIHSQKAQIEEPDPPEMEXSLDSSEMAKDLSSKXALSSXESCXMKGEEKSPKXKKDKRPPILECLEKLEKSKKXFLDKDAQRLSPIPEEVPKSXLESEKPGSPEAAEXSPPSNIIDHCEKLASEKEVVECQSXSXVGGQSVKKVDLEXLKEDSEFXKVEMDNLDNAQXSGIEEPSEXKGSMQK

SEQ ID NO: 24418 - protein, 276 aa, Homo sapiens
  MOD_RES (27)..(27): Selenocysteine
  MOD_RES (122)..(122): Selenocysteine
  MOD_RES (124)..(124): Selenocysteine
  MOD_RES (163)..(163): Selenocysteine
  MOD_RES (165)..(165): Selenocysteine
  MOD_RES (174)..(174): Selenocysteine
  MOD_RES (250)..(250): Selenocysteine
  MOD_RES (275)..(275): Selenocysteine
EPCKKCGLPNHPELILLCDSCDSGYHXACLRPPLMIIPDGEWFCPPCQHKLLCEKLEEQLQDLDVALKKKERAERRKERLVYVGISIENIIPPQEPDFSEDQEEKKKDSKKSKANLLERRSXRXRKCISYRFDEFDEAIDEAIEDDIKEADGGGVGRGKDISXIXGHRGKDISXILDEERKENKRPQRAAAARRKKRRRLNDLDSDSNLDEEESEDEFKISDGSQDEFVVSDENPDESEEDPPSNDDSDXDFCSRRLRRHPSRPMRQSRRLRRKXP

SEQ ID NO: 24419 - protein, 803 aa, Homo sapiens
  MOD_RES (2)..(2): Selenocysteine
  MOD_RES (36)..(36): Selenocysteine
  MOD_RES (42)..(42): Selenocysteine
  MOD_RES (68)..(68): Selenocysteine
  MOD_RES (75)..(76): Selenocysteine
  MOD_RES (137)..(137): Selenocysteine
  MOD_RES (165)..(165): Selenocysteine
  MOD_RES (169)..(169): Selenocysteine
  MOD_RES (172)..(172): Selenocysteine
  MOD_RES (209)..(209): Selenocysteine
  MOD_RES (211)..(211): Selenocysteine
  MOD_RES (225)..(225): Selenocysteine
  MOD_RES (231)..(231): Selenocysteine
  MOD_RES (233)..(233): Selenocysteine
  MOD_RES (258)..(258): Selenocysteine
  MOD_RES (263)..(263): Selenocysteine
  MOD_RES (268)..(268): Selenocysteine
  MOD_RES (283)..(283): Selenocysteine
  MOD_RES (288)..(288): Selenocysteine
  MOD_RES (296)..(296): Selenocysteine
  MOD_RES (300)..(300): Selenocysteine
  MOD_RES (307)..(307): Selenocysteine
  MOD_RES (340)..(340): Selenocysteine
  MOD_RES (355)..(355): Selenocysteine
  MOD_RES (360)..(360): Selenocysteine
  MOD_RES (364)..(364): Selenocysteine
  MOD_RES (374)..(374): Selenocysteine
  MOD_RES (395)..(395): Selenocysteine
  MOD_RES (415)..(415): Selenocysteine
  MOD_RES (429)..(429): Selenocysteine
  MOD_RES (454)..(454): Selenocysteine
  MOD_RES (456)..(456): Selenocysteine
  MOD_RES (469)..(469): Selenocysteine
  MOD_RES (477)..(477): Selenocysteine
  MOD_RES (489)..(489): Selenocysteine
  MOD_RES (498)..(498): Selenocysteine
  MOD_RES (517)..(518): Selenocysteine
  MOD_RES (523)..(523): Selenocysteine
  MOD_RES (526)..(526): Selenocysteine
  MOD_RES (537)..(537): Selenocysteine
  MOD_RES (563)..(563): Selenocysteine
  MOD_RES (570)..(570): Selenocysteine
  MOD_RES (575)..(575): Selenocysteine
  MOD_RES (586)..(586): Selenocysteine
  MOD_RES (613)..(613): Selenocysteine
  MOD_RES (618)..(618): Selenocysteine
  MOD_RES (631)..(631): Selenocysteine
  MOD_RES (647)..(647): Selenocysteine
  MOD_RES (651)..(651): Selenocysteine
  MOD_RES (719)..(719): Selenocysteine
EXLALLKAQIDPVLLKNSSQQDNSSRESPSLEDEEXKKEEEXPKQEEQKESEKMKSEEQPMDLENRSXANVLEEXXVKKEKEDEKELVKLPVIVKLEKPLPENEEKKIIKEESDSFKENVKPIKVEVKECRADPKDXKSSMEKPVAQEPERIEFGGNIKSSHEIXEKSXEEXEKLKNDQQAKIPLKKREIKLSDDFDSPVKGPLCKSVXPXKEFLKDEIKQEEEXCKRISXIXALGHEGKQLVNGEVSDERVAPNFKXEPIEXKFYEXKEESYSPSKDRNIIXEGNGXESLNSVIXSMKXGELEKEXAPLRKDADSSISVLEIHSQKAQIEEPDPPEMEXSLDSSEMAKDLSSKXALSSXESCXMKGEEKSPKXKKDKRPPILECLEKLEKSKKXFLDKDAQRLSPIPEEVPKSXLESEKPGSPEAAEXSPPSNIIDHCEKLASEKEVVECQSXSXVGGQSVKKVDLEXLKEDSEFXKVEMDNLDNAQXSGIEEPSEXKGSMQKSKFKYKLVPEEEXXASENXEIXSERQKEGIKLXIRISSRKKKPDSPPKVLEPENKQEKXEKEEEKXNVGRXLRRSPRISRPXAKVAEIRDQKADKKRGEGEDEVEEESXALQKXDKKEILKKSEKDXNSKVSKVKPKGKVRWXGSRXRGRWKYSSNDESEGSGSEKSSAASEEEEEKESEEAILADDDEPCKKCGLPNHPELILLCDSCDSGYHXACLRPPLMIIPDGEWFCPPCQHKLLCEKLEEQLQDLDVALKKKERAERRKERLVYVGISIENIIPPQEPDFSEDQEEKKKDSKK

SEQ ID NO: 24420 - protein, 1441 aa, Homo sapiens
  MOD_RES (3)..(3): Selenocysteine
  MOD_RES (83)..(83): Selenocysteine
  MOD_RES (101)..(101): Selenocysteine
  MOD_RES (148)..(148): Selenocysteine
  MOD_RES (201)..(201): Selenocysteine
  MOD_RES (235)..(235): Selenocysteine
  MOD_RES (241)..(241): Selenocysteine
  MOD_RES (267)..(267): Selenocysteine
  MOD_RES (274)..(275): Selenocysteine
  MOD_RES (336)..(336): Selenocysteine
  MOD_RES (364)..(364): Selenocysteine
  MOD_RES (368)..(368): Selenocysteine
  MOD_RES (371)..(371): Selenocysteine
  MOD_RES (408)..(408): Selenocysteine
  MOD_RES (410)..(410): Selenocysteine
  MOD_RES (424)..(424): Selenocysteine
  MOD_RES (430)..(430): Selenocysteine
  MOD_RES (432)..(432): Selenocysteine
  MOD_RES (457)..(457): Selenocysteine
  MOD_RES (462)..(462): Selenocysteine
  MOD_RES (467)..(467): Selenocysteine
  MOD_RES (482)..(482): Selenocysteine
  MOD_RES (487)..(487): Selenocysteine
  MOD_RES (495)..(495): Selenocysteine
  MOD_RES (499)..(499): Selenocysteine
  MOD_RES (506)..(506): Selenocysteine
  MOD_RES (539)..(539): Selenocysteine
  MOD_RES (554)..(554): Selenocysteine
  MOD_RES (559)..(559): Selenocysteine
  MOD_RES (563)..(563): Selenocysteine
  MOD_RES (573)..(573): Selenocysteine
  MOD_RES (594)..(594): Selenocysteine
  MOD_RES (614)..(614): Selenocysteine
  MOD_RES (628)..(628): Selenocysteine
  MOD_RES (653)..(653): Selenocysteine
  MOD_RES (655)..(655): Selenocysteine
  MOD_RES (668)..(668): Selenocysteine
  MOD_RES (676)..(676): Selenocysteine
  MOD_RES (688)..(688): Selenocysteine
  MOD_RES (697)..(697): Selenocysteine
  MOD_RES (716)..(717): Selenocysteine
  MOD_RES (722)..(722): Selenocysteine
  MOD_RES (725)..(725): Selenocysteine
  MOD_RES (736)..(736): Selenocysteine
  MOD_RES (762)..(762): Selenocysteine
  MOD_RES (769)..(769): Selenocysteine
  MOD_RES (774)..(774): Selenocysteine
  MOD_RES (785)..(785): Selenocysteine
  MOD_RES (812)..(812): Selenocysteine
  MOD_RES (817)..(817): Selenocysteine
  MOD_RES (830)..(830): Selenocysteine
  MOD_RES (846)..(846): Selenocysteine
  MOD_RES (850)..(850): Selenocysteine
  MOD_RES (918)..(918): Selenocysteine
  MOD_RES (1013)..(1013): Selenocysteine
  MOD_RES (1015)..(1015): Selenocysteine
  MOD_RES (1054)..(1054): Selenocysteine
  MOD_RES (1056)..(1056): Selenocysteine
  MOD_RES (1065)..(1065): Selenocysteine
  MOD_RES (1141)..(1141): Selenocysteine
  MOD_RES (1166)..(1166): Selenocysteine
  MOD_RES (1202)..(1202): Selenocysteine
  MOD_RES (1278)..(1278): Selenocysteine
  MOD_RES (1305)..(1305): Selenocysteine
  MOD_RES (1337)..(1337): Selenocysteine
  MOD_RES (1371)..(1371): Selenocysteine
  MOD_RES (1388)..(1388): Selenocysteine
  MOD_RES (1393)..(1393): Selenocysteine
  MOD_RES (1399)..(1399): Selenocysteine
  MOD_RES (1409)..(1409): Selenocysteine
  MOD_RES (1429)..(1429): Selenocysteine
MAXAAAAAAVMAPPGCPGSCPNFAVVCSFLERYGPLLDLPELPFPELERVLQAPPPDVGNGEVPKELVELHLKLMRKIGKSVXADRWEKYLIKICQEFNSXWAWEMEKKGYLEMSVECKLALLKYLCECQFDDNLKFKNIINEEDADXMRLQPIGRDKDGLMYWYQLDQDHNVRMYIEEQDDQDGSSWKCIVRNRNELAEXLALLKAQIDPVLLKNSSQQDNSSRESPSLEDEEXKKEEEXPKQEEQKESEKMKSEEQPMDLENRSXANVLEEXXVKKEKEDEKELVKLPVIVKLEKPLPENEEKKIIKEESDSFKENVKPIKVEVKECRADPKDXKSSMEKPVAQEPERIEFGGNIKSSHEIXEKSXEEXEKLKNDQQAKIPLKKREIKLSDDFDSPVKGPLCKSVXPXKEFLKDEIKQEEEXCKRISXIXALGHEGKQLVNGEVSDERVAPNFKXEPIEXKFYEXKEESYSPSKDRNIIXEGNGXESLNSVIXSMKXGELEKEXAPLRKDADSSISVLEIHSQKAQIEEPDPPEMEXSLDSSEMAKDLSSKXALSSXESCXMKGEEKSPKXKKDKRPPILECLEKLEKSKKXFLDKDAQRLSPIPEEVPKSXLESEKPGSPEAAEXSPPSNIIDHCEKLASEKEVVECQSXSXVGGQSVKKVDLEXLKEDSEFXKVEMDNLDNAQXSGIEEPSEXKGSMQKSKFKYKLVPEEEXXASENXEIXSERQKEGIKLXIRISSRKKKPDSPPKVLEPENKQEKXEKEEEKXNVGRXLRRSPRISRPXAKVAEIRDQKADKKRGEGEDEVEEESXALQKXDKKEILKKSEKDXNSKVSKVKPKGKVRWXGSRXRGRWKYSSNDESEGSGSEKSSAASEEEEEKESEEAILADDDEPCKKCGLPNHPELILLCDSCDSGYHXACLRPPLMIIPDGEWFCPPCQHKLLCEKLEEQLQDLDVALKKKERAERRKERLVYVGISIENIIPPQEPDFSEDQEEKKKDSKKSKANLLERRSXRXRKCISYRFDEFDEAIDEAIEDDIKEADGGGVGRGKDISXIXGHRGKDISXILDEERKENKRPQRAAAARRKKRRRLNDLDSDSNLDEEESEDEFKISDGSQDEFVVSDENPDESEEDPPSNDDSDXDFCSRRLRRHPSRPMRQSRRLRRKXPKKKYSDDDEEEESEENSRDSESDFSDDFSDDFVEXRRRRSRRNQKRQINYKEDSESDGSQKSLRRGKEIRRVHKRRLSSSESEESYLSKNSEDDELAKESKRSVRKRGRSXDEYSEADEEEEEEEGKPSRKRLHRIEXDEEESCDNAHGDANQPARDSQPRVLPSEQESXKKPYRIESDEEEDFENVGKVGSPLDYSLVDLPSXNGQSPGKAIENLIGKPXEKSQXPKDNSXASASLASNGXSGGQEAGAPEEEEDELLRVXDLVDYVCNSEQL

SEQ ID NO: 24421 - protein, 1189 aa, Homo sapiens
  MOD_RES (15)..(15): Selenocysteine
  MOD_RES (22)..(23): Selenocysteine
  MOD_RES (84)..(84): Selenocysteine
  MOD_RES (112)..(112): Selenocysteine
  MOD_RES (116)..(116): Selenocysteine
  MOD_RES (119)..(119): Selenocysteine
  MOD_RES (156)..(156): Selenocysteine
  MOD_RES (158)..(158): Selenocysteine
  MOD_RES (172)..(172): Selenocysteine
  MOD_RES (178)..(178): Selenocysteine
  MOD_RES (180)..(180): Selenocysteine
  MOD_RES (205)..(205): Selenocysteine
  MOD_RES (210)..(210): Selenocysteine
  MOD_RES (215)..(215): Selenocysteine
  MOD_RES (230)..(230): Selenocysteine
  MOD_RES (235)..(235): Selenocysteine
  MOD_RES (243)..(243): Selenocysteine
  MOD_RES (247)..(247): Selenocysteine
  MOD_RES (254)..(254): Selenocysteine
  MOD_RES (287)..(287): Selenocysteine
  MOD_RES (302)..(302): Selenocysteine
  MOD_RES (307)..(307): Selenocysteine
  MOD_RES (311)..(311): Selenocysteine
  MOD_RES (321)..(321): Selenocysteine
  MOD_RES (342)..(342): Selenocysteine
  MOD_RES (362)..(362): Selenocysteine
  MOD_RES (376)..(376): Selenocysteine
  MOD_RES (401)..(401): Selenocysteine
  MOD_RES (403)..(403): Selenocysteine
  MOD_RES (416)..(416): Selenocysteine
  MOD_RES (424)..(424): Selenocysteine
  MOD_RES (436)..(436): Selenocysteine
  MOD_RES (445)..(445): Selenocysteine
  MOD_RES (464)..(465): Selenocysteine
  MOD_RES (470)..(470): Selenocysteine
  MOD_RES (473)..(473): Selenocysteine
  MOD_RES (484)..(484): Selenocysteine
  MOD_RES (510)..(510): Selenocysteine
  MOD_RES (517)..(517): Selenocysteine
  MOD_RES (522)..(522): Selenocysteine
  MOD_RES (533)..(533): Selenocysteine
  MOD_RES (560)..(560): Selenocysteine
  MOD_RES (565)..(565): Selenocysteine
  MOD_RES (578)..(578): Selenocysteine
  MOD_RES (594)..(594): Selenocysteine
  MOD_RES (598)..(598): Selenocysteine
  MOD_RES (666)..(666): Selenocysteine
  MOD_RES (761)..(761): Selenocysteine
  MOD_RES (763)..(763): Selenocysteine
  MOD_RES (802)..(802): Selenocysteine
  MOD_RES (804)..(804): Selenocysteine
  MOD_RES (813)..(813): Selenocysteine
  MOD_RES (889)..(889): Selenocysteine
  MOD_RES (914)..(914): Selenocysteine
  MOD_RES (950)..(950): Selenocysteine
  MOD_RES (1026)..(1026): Selenocysteine
  MOD_RES (1053)..(1053): Selenocysteine
  MOD_RES (1085)..(1085): Selenocysteine
  MOD_RES (1119)..(1119): Selenocysteine
  MOD_RES (1136)..(1136): Selenocysteine
  MOD_RES (1141)..(1141): Selenocysteine
  MOD_RES (1147)..(1147): Selenocysteine
  MOD_RES (1157)..(1157): Selenocysteine
  MOD_RES (1177)..(1177): Selenocysteine
MKSEEQPMDLENRSXANVLEEXXVKKEKEDEKELVKLPVIVKLEKPLPENEEKKIIKEESDSFKENVKPIKVEVKECRADPKDXKSSMEKPVAQEPERIEFGGNIKSSHEIXEKSXEEXEKLKNDQQAKIPLKKREIKLSDDFDSPVKGPLCKSVXPXKEFLKDEIKQEEEXCKRISXIXALGHEGKQLVNGEVSDERVAPNFKXEPIEXKFYEXKEESYSPSKDRNIIXEGNGXESLNSVIXSMKXGELEKEXAPLRKDADSSISVLEIHSQKAQIEEPDPPEMEXSLDSSEMAKDLSSKXALSSXESCXMKGEEKSPKXKKDKRPPILECLEKLEKSKKXFLDKDAQRLSPIPEEVPKSXLESEKPGSPEAAEXSPPSNIIDHCEKLASEKEVVECQSXSXVGGQSVKKVDLEXLKEDSEFXKVEMDNLDNAQXSGIEEPSEXKGSMQKSKFKYKLVPEEEXXASENXEIXSERQKEGIKLXIRISSRKKKPDSPPKVLEPENKQEKXEKEEEKXNVGRXLRRSPRISRPXAKVAEIRDQKADKKRGEGEDEVEEESXALQKXDKKEILKKSEKDXNSKVSKVKPKGKVRWXGSRXRGRWKYSSNDESEGSGSEKSSAASEEEEEKESEEAILADDDEPCKKCGLPNHPELILLCDSCDSGYHXACLRPPLMIIPDGEWFCPPCQHKLLCEKLEEQLQDLDVALKKKERAERRKERLVYVGISIENIIPPQEPDFSEDQEEKKKDSKKSKANLLERRSXRXRKCISYRFDEFDEAIDEAIEDDIKEADGGGVGRGKDISXIXGHRGKDISXILDEERKENKRPQRAAAARRKKRRRLNDLDSDSNLDEEESEDEFKISDGSQDEFVVSDENPDESEEDPPSNDDSDXDFCSRRLRRHPSRPMRQSRRLRRKXPKKKYSDDDEEEESEENSRDSESDFSDDFSDDFVEXRRRRSRRNQKRQINYKEDSESDGSQKSLRRGKEIRRVHKRRLSSSESEESYLSKNSEDDELAKESKRSVRKRGRSXDEYSEADEEEEEEEGKPSRKRLHRIEXDEEESCDNAHGDANQPARDSQPRVLPSEQESXKKPYRIESDEEEDFENVGKVGSPLDYSLVDLPSXNGQSPGKAIENLIGKPXEKSQXPKDNSXASASLASNGXSGGQEAGAPEEEEDELLRVXDLVDYVCNSEQL

SEQ ID NO: 24422 - protein, 202 aa, Homo sapiens
  MOD_RES (1)..(1): Any amino acid
  MOD_RES (81)..(81): Selenocysteine
  MOD_RES (115)..(115): Selenocysteine
  MOD_RES (168)..(168): Selenocysteine
  MOD_RES (202)..(202): Selenocysteine
XAAAAAAVMAPPGCPGSCPNFAVVCSFLERYGPLLDLPELPFPELERVLQAPPPDVGNGEVPKELVELHLKLMRKIGKSVXADRWEKYLIKYLCECQFDDNLKFKNIINEEDADXMRLQPIGRDKDGLMYWYQLDQDHNVRMYIEEQDDQDGSSWKCIVRNRNELAEXLALLKAQIDPVLLKNSSQQDNSSRESPSLEDEEX

SEQ ID NO: 24423 - protein, 165 aa, Homo sapiens
  MOD_RES (1)..(1): Any amino acid
  MOD_RES (19)..(19): Selenocysteine
  MOD_RES (26)..(26): Selenocysteine
  MOD_RES (31)..(31): Selenocysteine
  MOD_RES (42)..(42): Selenocysteine
  MOD_RES (69)..(69): Selenocysteine
  MOD_RES (74)..(74): Selenocysteine
  MOD_RES (87)..(87): Selenocysteine
  MOD_RES (100)..(100): Selenocysteine
  MOD_RES (104)..(104): Selenocysteine
XKPDSPPKVLEPENKQEKXEKEEEKXNVGRXLRRSPRISRPXAKVAEIRDQKADKKRGEGEDEVEEESXALQKXDKKEILKKSEKDXNSKVKPKGKVRWXGSRXRGRWKYSSNDESEGSGSEKSSAASEEEEEKESEEAILADDDEPCKKCGLPNHPELILLCDS

SEQ ID NO: 24424 - protein, 258 aa, Homo sapiens
  MOD_RES (53)..(53): Selenocysteine
  MOD_RES (69)..(69): Selenocysteine
  MOD_RES (87)..(88): Selenocysteine
  MOD_RES (92)..(93): Selenocysteine
  MOD_RES (136)..(136): Selenocysteine
  MOD_RES (146)..(146): Selenocysteine
  MOD_RES (183)..(183): Selenocysteine
  MOD_RES (191)..(191): Selenocysteine
  MOD_RES (217)..(217): Selenocysteine
MARPPVPGSVVVPNWHESAEGKEYLACILRKNRRRVFGLLERPVLLPPVSIDXASYKIFVSGKSGVGKXALVAKLAGLEVPVVHHEXXGIQXXVVFWPAKLQASSRVVMFRFEFWDCGESALKKFDHMLLACMENXDAFLFLFSFXDRASFEDLPGQLARIAGEAPGVVRMVIGSKFDQYMHXDVPERDLXAFRQAWELPLLRVKSVPGRRLADGRXLDGRAGLADVAHILNGLAEQLWHQDQVAAGLLPNPPESAPE

SEQ ID NO: 24425 - protein, 112 aa, Homo sapiens
  MOD_RES (1)..(1): Any amino acid
  MOD_RES (5)..(5): Selenocysteine
  MOD_RES (25)..(25): Selenocysteine
  MOD_RES (29)..(29): Selenocysteine
  MOD_RES (57)..(58): Selenocysteine
  MOD_RES (67)..(67): Selenocysteine
  MOD_RES (77)..(77): Selenocysteine
XCARXAGGCLGCLSGQCCCRLCPLXLPAXRSLCPGRVVWARRRWWPSWLAWRCLWCXXRPPACMENXDAFLFLFSFXDRASFEDLPGQLARIAGEAPGVVRMVIGSKFDQYM

SEQ ID NO: 24426 - protein, 236 aa, Homo sapiens
  MOD_RES (85)..(85): Selenocysteine
  MOD_RES (112)..(112): Selenocysteine
  MOD_RES (149)..(149): Selenocysteine
  MOD_RES (166)..(166): Selenocysteine
  MOD_RES (169)..(169): Selenocysteine
  MOD_RES (173)..(173): Selenocysteine
  MOD_RES (226)..(226): Selenocysteine
  MOD_RES (231)..(231): Selenocysteine
MIFRVSAEGSQACAKGCELCSEVNGCLKCSPKLFILLERNDIRQVGVCLPSCPPGYFDARNPDMNKCIKCKIEHCEACFSHNFCXKCKEGLYLHKGRCYPACPEGSSAANGXMECSSPAQCEMSEWSPWGPCSKKQQLCGFRRGSEERXRRVLHAPVGDHAACSDXKEXRRCXVRRVPCPEGQKRRKGGQGRRENANRNLARKESKEAGAGSRRRKGQQQQQQQGXVGPLXSAGPA

SEQ ID NO: 24427 - protein, 263 aa, Homo sapiens
  MOD_RES (15)..(15): Selenocysteine
  MOD_RES (18)..(18): Selenocysteine
  MOD_RES (112)..(112): Selenocysteine
  MOD_RES (139)..(139): Selenocysteine
  MOD_RES (176)..(176): Selenocysteine
  MOD_RES (193)..(193): Selenocysteine
  MOD_RES (196)..(196): Selenocysteine
  MOD_RES (200)..(200): Selenocysteine
  MOD_RES (253)..(253): Selenocysteine
  MOD_RES (258)..(258): Selenocysteine
MRLGLCVVALVLSWXHLXISSRGIKGKRQRRISAEGSQACAKGCELCSEVNGCLKCSPKLFILLERNDIRQVGVCLPSCPPGYFDARNPDMNKCIKCKIEHCEACFSHNFCXKCKEGLYLHKGRCYPACPEGSSAANGXMECSSPAQCEMSEWSPWGPCSKKQQLCGFRRGSEERXRRVLHAPVGDHAACSDXKEXRRCXVRRVPCPEGQKRRKGGQGRRENANRNLARKESKEAGAGSRRRKGQQQQQQQGXVGPLXSAGPA

SEQ ID NO: 24428 - protein, 200 aa, Homo sapiens
  MOD_RES (15)..(15): Selenocysteine
  MOD_RES (18)..(18): Selenocysteine
  MOD_RES (112)..(112): Selenocysteine
  MOD_RES (139)..(139): Selenocysteine
  MOD_RES (190)..(190): Selenocysteine
  MOD_RES (195)..(195): Selenocysteine
MRLGLCVVALVLSWXHLXISSRGIKGKRQRRISAEGSQACAKGCELCSEVNGCLKCSPKLFILLERNDIRQVGVCLPSCPPGYFDARNPDMNKCIKCKIEHCEACFSHNFCXKCKEGLYLHKGRCYPACPEGSSAANGXMECSSPGQKRRKGGQGRRENANRNLARKESKEAGAGSRRRKGQQQQQQQGXVGPLXSAGPA

SEQ ID NO: 24429 - protein, 89 aa, Homo sapiens
  MOD_RES (83)..(83): Selenocysteine
MDLASYVSNPICKGCLSCSKDNGCSRCQQKLFFFLRREGMRQYGECLHSCPSGYYGHRAPDMNRCARCRIENCDSCFSKDFCXKCKVGF

SEQ ID NO: 24430 - protein, 77 aa, Homo sapiens
MQFRLFSFALIILNCMDYSHCQGNRWRRSKRASYVSNPICKGCLSCSKDNGCSRCQQKLFFFLRREGMRQYGECLHS

SEQ ID NO: 24431 - protein, 121 aa, Homo sapiens
  MOD_RES (111)..(111): Selenocysteine
MQFRLFSFALIILNCMDYSHCQGNRWRRSKRASYVSNPICKGCLSCSKDNGCSRCQQKLFFFLRREGMRQYGECLHSCPSGYYGHRAPDMNRCARCRIENCDSCFSKDFCXKCKVGFYLHR

SEQ ID NO: 24432 - protein, 243 aa, Homo sapiens
  MOD_RES (111)..(111): Selenocysteine
  MOD_RES (138)..(138): Selenocysteine
  MOD_RES (155)..(155): Selenocysteine
  MOD_RES (162)..(162): Selenocysteine
  MOD_RES (171)..(171): Selenocysteine
  MOD_RES (173)..(173): Selenocysteine
  MOD_RES (184)..(184): Selenocysteine
  MOD_RES (189)..(189): Selenocysteine
  MOD_RES (199)..(199): Selenocysteine
  MOD_RES (209)..(209): Selenocysteine
  MOD_RES (238)..(238): Selenocysteine
MQFRLFSFALIILNCMDYSHCQGNRWRRSKRASYVSNPICKGCLSCSKDNGCSRCQQKLFFFLRREGMRQYGECLHSCPSGYYGHRAPDMNRCARCRIENCDSCFSKDFCXKCKVGFYLHRGRCFDECPDGFAPLEEXMECVEGCEVGHWSEWGXCSRNNRXCGFKWGLEXRXRQIVKKPVKDXILCPXIAESRRCKMXMRHCPGGKRXPKAKEKRNKKKKRKLIERAQEQHSVFLAXDRANQ

SEQ ID NO: 24433 - protein, 179 aa, Homo sapiens
  MOD_RES (48)..(48): Selenocysteine
  MOD_RES (75)..(75): Selenocysteine
  MOD_RES (91)..(91): Selenocysteine
  MOD_RES (98)..(98): Selenocysteine
  MOD_RES (107)..(107): Selenocysteine
  MOD_RES (109)..(109): Selenocysteine
  MOD_RES (120)..(120): Selenocysteine
  MOD_RES (125)..(125): Selenocysteine
  MOD_RES (135)..(135): Selenocysteine
  MOD_RES (145)..(145): Selenocysteine
  MOD_RES (174)..(174): Selenocysteine
MQFRLFSFALIILNCMDYSHCQGNRWRRSKRGCRIENCDSCFSKDFCXKCKVGFYLHRGRCFDECPDGFAPLEEXMECVGCEVGHWSEWGXCSRNNRXCGFKWGLEXRXRQIVKKPVKDXILCPXIAESRRCKMXMRHCPGGKRXPKAKEKRNKKKKRKLIERAQEQHSVFLAXDRANQ

SEQ ID NO: 24434 - protein, 89 aa, Homo sapiens
  MOD_RES (44)..(44): Selenocysteine
  MOD_RES (71)..(71): Selenocysteine
  MOD_RES (88)..(88): Selenocysteine
MRQYGECLHSCPSGYYGHRAPDMNRCARCRIENCDSCFSKDFCXKCKVGFYLHRGRCFDECPDGFAPLEEXMECVEGCEVGHWSEWGXC

SEQ ID NO: 24435 - protein, 168 aa, Homo sapiens
  MOD_RES (44)..(44): Selenocysteine
  MOD_RES (71)..(71): Selenocysteine
  MOD_RES (88)..(88): Selenocysteine
  MOD_RES (95)..(95): Selenocysteine
  MOD_RES (104)..(104): Selenocysteine
  MOD_RES (106)..(106): Selenocysteine
  MOD_RES (117)..(117): Selenocysteine
  MOD_RES (122)..(122): Selenocysteine
  MOD_RES (132)..(132): Selenocysteine
  MOD_RES (142)..(142): Selenocysteine
MRQYGECLHSCPSGYYGHRAPDMNRCARCRIENCDSCFSKDFCXKCKVGFYLHRGRCFDECPDGFAPLEEXMECVEGCEVGHWSEWGXCSRNNRXCGFKWGLEXRXRQIVKKPVKDXILCPXIAESRRCKMXMRHCPGGKRXPKAKEKRNKKKKRKLIERAQEQHSVF

SEQ ID NO: 24436 - protein, 176 aa, Homo sapiens
  MOD_RES (44)..(44): Selenocysteine
  MOD_RES (71)..(71): Selenocysteine
  MOD_RES (88)..(88): Selenocysteine
  MOD_RES (95)..(95): Selenocysteine
  MOD_RES (104)..(104): Selenocysteine
  MOD_RES (106)..(106): Selenocysteine
  MOD_RES (117)..(117): Selenocysteine
  MOD_RES (122)..(122): Selenocysteine
  MOD_RES (132)..(132): Selenocysteine
  MOD_RES (142)..(142): Selenocysteine
  MOD_RES (171)..(171): Selenocysteine
MRQYGECLHSCPSGYYGHRAPDMNRCARCRIENCDSCFSKDFCXKCKVGFYLHRGRCFDECPDGFAPLEEXMECVEGCEVGHWSEWGXCSRNNRXCGFKWGLEXRXRQIVKKPVKDXILCPXIAESRRCKMXMRHCPGGKRXPKAKEKRNKKKKRKLIERAQEQHSVFLAXDRANQ

SEQ ID NO: 24437 - protein, 272 aa, Homo sapiens
  MOD_RES (47)..(47): Selenocysteine
  MOD_RES (87)..(87): Selenocysteine
  MOD_RES (96)..(96): Selenocysteine
  MOD_RES (104)..(104): Selenocysteine
  MOD_RES (112)..(112): Selenocysteine
  MOD_RES (139)..(139): Selenocysteine
  MOD_RES (160)..(160): Selenocysteine
  MOD_RES (165)..(165): Selenocysteine
  MOD_RES (172)..(172): Selenocysteine
  MOD_RES (174)..(174): Selenocysteine
  MOD_RES (193)..(193): Selenocysteine
  MOD_RES (196)..(196): Selenocysteine
  MOD_RES (200)..(200): Selenocysteine
  MOD_RES (270)..(270): Selenocysteine
MHLRLISWLFIILNFMEYIGSQNASRGRRQRRMHPNVSQGCQGGCAXCSDYNGCLSCKPRLFFALERIGMKQIGVCLSSCPSGYYGXRYPDINKCXKCKADCDXCFNKNFCXKCKSGFYLHLGKCLDNCPEGLEANNHXMECVSIVHCEVSEWNPWSPCXKKGKXCGFKRGXEXRVREIIQHPSAKGNLCPPXNEXRKCXVQRKKCQKGERGKKGRERKRKKPNKGESKEAIPDSKSLESSKEIPEQRENKQQQKKRKVQDKQKSVSVSXVH

SEQ ID NO: 24438 - protein, 292 aa, Homo sapiens
  MOD_RES (47)..(47): Selenocysteine
  MOD_RES (87)..(87): Selenocysteine
  MOD_RES (96)..(96): Selenocysteine
  MOD_RES (104)..(104): Selenocysteine
  MOD_RES (112)..(112): Selenocysteine
  MOD_RES (139)..(139): Selenocysteine
  MOD_RES (160)..(160): Selenocysteine
  MOD_RES (165)..(165): Selenocysteine
  MOD_RES (172)..(172): Selenocysteine
  MOD_RES (174)..(174): Selenocysteine
  MOD_RES (193)..(193): Selenocysteine
  MOD_RES (196)..(196): Selenocysteine
  MOD_RES (200)..(200): Selenocysteine
  MOD_RES (270)..(270): Selenocysteine
  MOD_RES (276)..(276): Selenocysteine
  MOD_RES (282)..(282): Selenocysteine
  MOD_RES (285)..(285): Selenocysteine
MHLRLISWLFIILNFMEYIGSQNASRGRRQRRMHPNVSQGCQGGCAXCSDYNGCLSCKPRLFFALERIGMKQIGVCLSSCPSGYYGXRYPDINKCXKCKADCDXCFNKNFCXKCKSGFYLHLGKCLDNCPEGLEANNHXMECVSIVHCEVSEWNPWSPCXKKGKXCGFKRGXEXRVREIIQHPSAKGNLCPPXNEXRKCXVQRKKCQKGERGKKGRERKRKKPNKGESKEAIPDSKSLESSKEIPEQRENKQQQKKRKVQDKQKSGIEVXLAEGLXSVSQRXQPXPCRRRYL

SEQ ID NO: 24439 - protein, 172 aa, Homo sapiens
  MOD_RES (29)..(29): Selenocysteine
  MOD_RES (36)..(36): Selenocysteine
  MOD_RES (49)..(49): Selenocysteine
  MOD_RES (94)..(94): Selenocysteine
  MOD_RES (121)..(121): Selenocysteine
  MOD_RES (126)..(126): Selenocysteine
  MOD_RES (132)..(132): Selenocysteine
MRAPLCLLLLVAHAVDMLALNRRKKQVGXGLGGNCXGCIICSEENGCSXCQQRLFLFIRREGIRQYGKCLHDCPPGYFGIRGQEVNRCKKCGAXCESCFSQDFCIRCKRQFYLYKGKCLPXCPPGXLAHQNXRECQERSPGQKKGRKDRRPRKDRKLDRRLDVRPRQPGLQP

SEQ ID NO: 24440 - protein, 234 aa, Homo sapiens
  MOD_RES (29)..(29): Selenocysteine
  MOD_RES (36)..(36): Selenocysteine
  MOD_RES (49)..(49): Selenocysteine
  MOD_RES (94)..(94): Selenocysteine
  MOD_RES (121)..(121): Selenocysteine
  MOD_RES (126)..(126): Selenocysteine
  MOD_RES (132)..(132): Selenocysteine
  MOD_RES (151)..(151): Selenocysteine
  MOD_RES (156)..(156): Selenocysteine
  MOD_RES (180)..(180): Selenocysteine
MRAPLCLLLLVAHAVDMLALNRRKKQVGXGLGGNCXGCIICSEENGCSXCQQRLFLFIRREGIRQYGKCLHDCPPGYFGIRGQEVNRCKKCGAXCESCFSQDFCIRCKRQFYLYKGKCLPXCPPGXLAHQNXRECQGECELGPWGGWSPCXHNGKXCGSAWGLESRVREAGRAGHEEAAXCQVLSESRKCPIQRPCPGERSPGQKKGRKDRRPRKDRKLDRRLDVRPRQPGLQP

SEQ ID NO: 24441 - protein, 277 aa, Homo sapiens
  MOD_RES (38)..(38): Selenocysteine
  MOD_RES (43)..(43): Selenocysteine
  MOD_RES (53)..(53): Selenocysteine
  MOD_RES (80)..(80): Selenocysteine
  MOD_RES (100)..(100): Selenocysteine
  MOD_RES (117)..(117): Selenocysteine
  MOD_RES (134)..(135): Selenocysteine
  MOD_RES (157)..(157): Selenocysteine
  MOD_RES (180)..(180): Selenocysteine
  MOD_RES (193)..(193): Selenocysteine
  MOD_RES (205)..(205): Selenocysteine
  MOD_RES (220)..(220): Selenocysteine
  MOD_RES (241)..(241): Selenocysteine
MSKSLKKLVEESREKNQPEVDMSDRGISNMLDVNGLFXLSHIXQLVLSHNKLXMVPPNIAELKNLEVLNFFNNQIEELPXQISSLQKLKHLNLGMNRLNXLPRGFGSLPALEVLDLXYNNLSENSLPGNFFYLXXLRALYLSDNDFEILPPDIGKLXKLQILSLRDNDLISLPKEIGELXQLKELHIQGNRLXVLPPELGNLDLXGQKQVFKAENNPWVXPIADQFQLGVSHVFEYIRSEXYKYLYGRHMQANPEPPKKNNDKSKKISRKPLAAKNR

SEQ ID NO: 24442 - protein, 224 aa, Homo sapiens
  MOD_RES (27)..(27): Selenocysteine
  MOD_RES (47)..(47): Selenocysteine
  MOD_RES (64)..(64): Selenocysteine
  MOD_RES (81)..(82): Selenocysteine
  MOD_RES (104)..(104): Selenocysteine
  MOD_RES (127)..(127): Selenocysteine
  MOD_RES (140)..(140): Selenocysteine
  MOD_RES (152)..(152): Selenocysteine
  MOD_RES (167)..(167): Selenocysteine
  MOD_RES (188)..(188): Selenocysteine
MVPPNIAELKNLEVLNFFNNQIEELPXQISSLQKLKHLNLGMNRLNXLPRGFGSLPALEVLDLXYNNLSENSLPGNFFYLXXLRALYLSDNDFEILPPDIGKLXKLQILSLRDNDLISLPKEIGELXQLKELHIQGNRLXVLPPELGNLDLXGQKQVFKAENNPWVXPIADQFQLGVSHVFEYIRSEXYKYLYGRHMQANPEPPKKNNDKSKKISRKPLAAKNR

SEQ ID NO: 24443 - protein, 710 aa, Homo sapiens
  MOD_RES (39)..(40): Selenocysteine
  MOD_RES (55)..(55): Selenocysteine
  MOD_RES (97)..(97): Selenocysteine
  MOD_RES (105)..(105): Selenocysteine
  MOD_RES (125)..(125): Selenocysteine
  MOD_RES (133)..(133): Selenocysteine
  MOD_RES (200)..(200): Selenocysteine
  MOD_RES (230)..(230): Selenocysteine
  MOD_RES (253)..(253): Selenocysteine
  MOD_RES (261)..(261): Selenocysteine
  MOD_RES (296)..(296): Selenocysteine
  MOD_RES (308)..(308): Selenocysteine
  MOD_RES (334)..(334): Selenocysteine
  MOD_RES (381)..(381): Selenocysteine
  MOD_RES (383)..(383): Selenocysteine
  MOD_RES (406)..(406): Selenocysteine
  MOD_RES (411)..(411): Selenocysteine
  MOD_RES (420)..(420): Selenocysteine
  MOD_RES (422)..(422): Selenocysteine
  MOD_RES (448)..(448): Selenocysteine
  MOD_RES (468)..(468): Selenocysteine
  MOD_RES (514)..(514): Selenocysteine
  MOD_RES (554)..(554): Selenocysteine
  MOD_RES (595)..(595): Selenocysteine
  MOD_RES (602)..(602): Selenocysteine
  MOD_RES (683)..(683): Selenocysteine
MRGRLCVGRAAAAAAAVAVPLAGGQEGSPGGGRRGSRGXXMVKKRKGRVVIDSDXEDSGSDENLDQELLSLAKRKRSDSEEKEPPVSQPAASSDSEXSDSDDEWXFGSNKNKKKGKARKIEKKGXMKKQANKXASSGSSDKDSSAESSAPEEGEVSDSDSNSSSSSSDSDSSSEDEEFHDGYGEDLMGDEEDRARLEQMXEKEREQELFNRIEKREVLKRRFEIKKKLKXAKKKEKKEKKKKQEEEQEKKKLXQIQESQVXSHNKERRSKRDEKLDKKSQAMEELKAEREKRKNRXAELLAKKQPLKXSEVYSDDEEEEEDDKSSEKSDRSSRXSSSDEEEEKEEIPPKSQPVSLPEELNRVRLSRHKLERWCHMPFFAKXVXGCFVRIGIGNHNSKPVYRVAEIXGVVEXAKVYQLGGXRXNKGLQLRHGNDQRVFRLEFVSNQEFXESEFMKWKEAMFSAGMQLPXLDEINKKELSIKEALNYKFNDQDIEEIVKEKERFRKAPPNYAMKKXQLLKEKAMAEDLGDQDKAKQIQDQLNELEERAEALDRQRXKNISAISYINQRNREWNIVESEKALVAESHNMKNQQMDPFXRRQCKPXIVSNSRDPAVQAAILAQLNAKYGSGVLPDAPKEMSKGQGKDKDLNSKSASDLSEDLFKVHDFDVKIDLQVPSSESKALAIXSKAPPAKDGAPRRSLNLEDYKKRRGLI

SEQ ID NO: 24444 - protein, 171 aa, Homo sapiens
  MOD_RES (1)..(1): Any amino acid
  MOD_RES (3)..(3): Selenocysteine
  MOD_RES (5)..(5): Selenocysteine
  MOD_RES (31)..(31): Selenocysteine
  MOD_RES (51)..(51): Selenocysteine
  MOD_RES (97)..(97): Selenocysteine
  MOD_RES (137)..(137): Selenocysteine
XGXRXNKGLQLRHGNDQRVFRLEFVSNQEFXESEFMKWKEAMFSAGMQLPXLDEINKKELSIKEALNYKFNDQDIEEIVKEKERFRKAPPNYAMKKXQLLKEKAMAEDLGDQDKAKQIQDQLNELEERAEALDRQRXKNISAISYINQRNREWNIVESEKALVVRKLYLNH

SEQ ID NO: 24445 - protein, 563 aa, Homo sapiens
  MOD_RES (11)..(11): Selenocysteine
  MOD_RES (39)..(39): Selenocysteine
  MOD_RES (72)..(72): Selenocysteine
  MOD_RES (101)..(101): Selenocysteine
  MOD_RES (135)..(135): Selenocysteine
  MOD_RES (162)..(162): Selenocysteine
  MOD_RES (170)..(170): Selenocysteine
  MOD_RES (172)..(172): Selenocysteine
  MOD_RES (207)..(207): Selenocysteine
  MOD_RES (215)..(215): Selenocysteine
  MOD_RES (248)..(248): Selenocysteine
  MOD_RES (262)..(263): Selenocysteine
  MOD_RES (265)..(265): Selenocysteine
  MOD_RES (275)..(275): Selenocysteine
  MOD_RES (279)..(279): Selenocysteine
  MOD_RES (308)..(308): Selenocysteine
  MOD_RES (311)..(311): Selenocysteine
  MOD_RES (315)..(315): Selenocysteine
  MOD_RES (337)..(337): Selenocysteine
  MOD_RES (350)..(350): Selenocysteine
  MOD_RES (357)..(357): Selenocysteine
  MOD_RES (364)..(364): Selenocysteine
  MOD_RES (380)..(380): Selenocysteine
  MOD_RES (393)..(393): Selenocysteine
  MOD_RES (395)..(395): Selenocysteine
  MOD_RES (398)..(398): Selenocysteine
  MOD_RES (433)..(433): Selenocysteine
  MOD_RES (465)..(465): Selenocysteine
  MOD_RES (469)..(469): Selenocysteine
  MOD_RES (478)..(478): Selenocysteine
  MOD_RES (487)..(487): Selenocysteine
  MOD_RES (508)..(508): Selenocysteine
  MOD_RES (518)..(518): Selenocysteine
  MOD_RES (546)..(546): Selenocysteine
  MOD_RES (557)..(557): Selenocysteine
MFSRNHRSRVXVARGSALEMEFKRGRFRLSLFSDLPEDXELQRKLDHEIRMREGACKLLAACSQREQALEAXKSLLVCNSRILSYMGELQRRKEAQVLGKXSRRPSDSGPPAERSPCRGRVCISDLRIPLMWKDXEYFKNKGDLHRWAVFLLLQLGEHIQDXEMILVDRXLXDISFQSNVLFAEAGPDFELRLELYGACVEEEGALXGGPKRLAXKLSSSLGRSSGRRVRASLDSAGGSGSSPILLPXPVVGGPRYHLLAHXXLXLAAVQDGFRXHDLXLASHEENPAWLPLYGSVCCRLAAQPLCMXQPXASGXLRVQQAGEMQNWAQVHGVLKGXNLFCYRQPEDADXGEEPLLXIAVNKEXRVRAGELDQALGRPFXLSISNQYGDDEVXHXLQXESREALQSWMEALWQLFFDMSQWKQCCDEIMKIEXPAPRKPPQALAKQGSLYHEMAIEPLDDIAAVXDILXQREGARLEXPPPWLAMFXDQPALPNPCSPASVAPAPDWXHPLPWGRPRXFSLDAVPPDHSPRARSVAPLPPQRSPRXRGLCSKGQPRXWLQSPV

SEQ ID NO: 24446 - protein, 550 aa, Homo sapiens
  MOD_RES (26)..(26): Selenocysteine
  MOD_RES (59)..(59): Selenocysteine
  MOD_RES (88)..(88): Selenocysteine
  MOD_RES (122)..(122): Selenocysteine
  MOD_RES (149)..(149): Selenocysteine
  MOD_RES (157)..(157): Selenocysteine
  MOD_RES (159)..(159): Selenocysteine
  MOD_RES (194)..(194): Selenocysteine
  MOD_RES (202)..(202): Selenocysteine
  MOD_RES (235)..(235): Selenocysteine
  MOD_RES (249)..(250): Selenocysteine
  MOD_RES (252)..(252): Selenocysteine
  MOD_RES (262)..(262): Selenocysteine
  MOD_RES (266)..(266): Selenocysteine
  MOD_RES (295)..(295): Selenocysteine
  MOD_RES (298)..(298): Selenocysteine
  MOD_RES (302)..(302): Selenocysteine
  MOD_RES (324)..(324): Selenocysteine
  MOD_RES (337)..(337): Selenocysteine
  MOD_RES (344)..(344): Selenocysteine
  MOD_RES (351)..(351): Selenocysteine
  MOD_RES (367)..(367): Selenocysteine
  MOD_RES (380)..(380): Selenocysteine
  MOD_RES (382)..(382): Selenocysteine
  MOD_RES (385)..(385): Selenocysteine
  MOD_RES (420)..(420): Selenocysteine
  MOD_RES (452)..(452): Selenocysteine
  MOD_RES (456)..(456): Selenocysteine
  MOD_RES (465)..(465): Selenocysteine
  MOD_RES (474)..(474): Selenocysteine
  MOD_RES (495)..(495): Selenocysteine
  MOD_RES (505)..(505): Selenocysteine
  MOD_RES (533)..(533): Selenocysteine
  MOD_RES (544)..(544): Selenocysteine
MQDRLHILEDLNMLYIRQMALSLEDXELQRKLDHEIRMREGACKLLAACSQREQALEAXKSLLVCNSRILSYMGELQRRKEAQVLGKXSRRPSDSGPPAERSPCRGRVCISDLRIPLMWKDXEYFKNKGDLHRWAVFLLLQLGEHIQDXEMILVDRXLXDISFQSNVLFAEAGPDFELRLELYGACVEEEGALXGGPKRLAXKLSSSLGRSSGRRVRASLDSAGGSGSSPILLPXPVVGGPRYHLLAHXXLXLAAVQDGFRXHDLXLASHEENPAWLPLYGSVCCRLAAQPLCMXQPXASGXLRVQQAGEMQNWAQVHGVLKGXNLFCYRQPEDADXGEEPLLXIAVNKEXRVRAGELDQALGRPFXLSISNQYGDDEVXHXLQXESREALQSWMEALWQLFFDMSQWKQCCDEIMKIEXPAPRKPPQALAKQGSLYHEMAIEPLDDIAAVXDILXQREGARLEXPPPWLAMFXDQPALPNPCSPASVAPAPDWXHPLPWGRPRXFSLDAVPPDHSPRARSVAPLPPQRSPRXRGLCSKGQPRXWLQSPV

SEQ ID NO: 24447 - protein, 513 aa, Homo sapiens
  MOD_RES (22)..(22): Selenocysteine
  MOD_RES (51)..(51): Selenocysteine
  MOD_RES (85)..(85): Selenocysteine
  MOD_RES (112)..(112): Selenocysteine
  MOD_RES (120)..(120): Selenocysteine
  MOD_RES (122)..(122): Selenocysteine
  MOD_RES (157)..(157): Selenocysteine
  MOD_RES (165)..(165): Selenocysteine
  MOD_RES (198)..(198): Selenocysteine
  MOD_RES (212)..(213): Selenocysteine
  MOD_RES (215)..(215): Selenocysteine
  MOD_RES (225)..(225): Selenocysteine
  MOD_RES (229)..(229): Selenocysteine
  MOD_RES (258)..(258): Selenocysteine
  MOD_RES (261)..(261): Selenocysteine
  MOD_RES (265)..(265): Selenocysteine
  MOD_RES (287)..(287): Selenocysteine
  MOD_RES (300)..(300): Selenocysteine
  MOD_RES (307)..(307): Selenocysteine
  MOD_RES (314)..(314): Selenocysteine
  MOD_RES (330)..(330): Selenocysteine
  MOD_RES (343)..(343): Selenocysteine
  MOD_RES (345)..(345): Selenocysteine
  MOD_RES (348)..(348): Selenocysteine
  MOD_RES (383)..(383): Selenocysteine
  MOD_RES (415)..(415): Selenocysteine
  MOD_RES (419)..(419): Selenocysteine
  MOD_RES (428)..(428): Selenocysteine
  MOD_RES (437)..(437): Selenocysteine
  MOD_RES (458)..(458): Selenocysteine
  MOD_RES (468)..(468): Selenocysteine
  MOD_RES (496)..(496): Selenocysteine
  MOD_RES (507)..(507): Selenocysteine
MREGACKLLAACSQREQALEAXKSLLVCNSRILSYMGELQRRKEAQVLGKXSRRPSDSGPPAERSPCRGRVCISDLRIPLMWKDXEYFKNKGDLHRWAVFLLLQLGEHIQDXEMILVDRXLXDISFQSNVLFAEAGPDFELRLELYGACVEEEGALXGGPKRLAXKLSSSLGRSSGRRVRASLDSAGGSGSSPILLPXPVVGGPRYHLLAHXXLXLAAVQDGFRXHDLXLASHEENPAWLPLYGSVCCRLAAQPLCMXQPXASGXLRVQQAGEMQNWAQVHGVLKGXNLFCYRQPEDADXGEEPLLXIAVNKEXRVRAGELDQALGRPFXLSISNQYGDDEVXHXLQXESREALQSWMEALWQLFFDMSQWKQCCDEIMKIEXPAPRKPPQALAKQGSLYHEMAIEPLDDIAAVXDILXQREGARLEXPPPWLAMFXDQPALPNPCSPASVAPAPDWXHPLPWGRPRXFSLDAVPPDHSPRARSVAPLPPQRSPRXRGLCSKGQPRXWLQSPV

SEQ ID NO: 24448 - protein, 308 aa, Homo sapiens
  MOD_RES (20)..(21): Selenocysteine
  MOD_RES (23)..(23): Selenocysteine
  MOD_RES (33)..(33): Selenocysteine
  MOD_RES (144)..(144): Selenocysteine
  MOD_RES (172)..(172): Selenocysteine
  MOD_RES (223)..(223): Selenocysteine
  MOD_RES (227)..(227): Selenocysteine
  MOD_RES (245)..(245): Selenocysteine
  MOD_RES (255)..(255): Selenocysteine
  MOD_RES (274)..(274): Selenocysteine
  MOD_RES (302)..(302): Selenocysteine
  MOD_RES (308)..(308): Selenocysteine
MCLLLSSAVFGVKYNLLAHXXLXLESAEDSFKXHNLSINGNEESSFWLPLYGNMCCRLVAQPACMAEDAFAGFLNQQQMVEGLISWRRLYCVLRGGKLYCFYSPEEIEAKVEPALVVPINKSLVLFEDSLEGIQLAISQSFKEXRIRAMDKDAKKRIHNFSVINPVPGQAIXQIFAVDNREDLQKWMEAFWQHFFDLSQWKHCCEELMKIEIMSPRKPPLFLXKEAXSVYHDMSIDSPMKLESLXDIIQKKIEEXNGQFLIGQHEESLPPPWAXLFDGNHQMVIQKKNNSNQLHNLQKLPAXSKFLFX

SEQ ID NO: 24449 - protein, 609 aa, Homo sapiens
  MOD_RES (18)..(18): Selenocysteine
  MOD_RES (46)..(46): Selenocysteine
  MOD_RES (69)..(69): Selenocysteine
  MOD_RES (83)..(83): Selenocysteine
  MOD_RES (96)..(96): Selenocysteine
  MOD_RES (143)..(143): Selenocysteine
  MOD_RES (151)..(151): Selenocysteine
  MOD_RES (153)..(153): Selenocysteine
  MOD_RES (161)..(161): Selenocysteine
  MOD_RES (181)..(181): Selenocysteine
  MOD_RES (187)..(187): Selenocysteine
  MOD_RES (189)..(189): Selenocysteine
  MOD_RES (199)..(199): Selenocysteine
  MOD_RES (205)..(205): Selenocysteine
  MOD_RES (239)..(240): Selenocysteine
  MOD_RES (242)..(242): Selenocysteine
  MOD_RES (252)..(252): Selenocysteine
  MOD_RES (342)..(342): Selenocysteine
  MOD_RES (370)..(370): Selenocysteine
  MOD_RES (421)..(421): Selenocysteine
  MOD_RES (425)..(425): Selenocysteine
  MOD_RES (443)..(443): Selenocysteine
  MOD_RES (453)..(453): Selenocysteine
  MOD_RES (472)..(472): Selenocysteine
  MOD_RES (522)..(522): Selenocysteine
  MOD_RES (533)..(533): Selenocysteine
  MOD_RES (538)..(538): Selenocysteine
  MOD_RES (543)..(543): Selenocysteine
  MOD_RES (547)..(547): Selenocysteine
  MOD_RES (576)..(576): Selenocysteine
  MOD_RES (578)..(578): Selenocysteine
  MOD_RES (580)..(580): Selenocysteine
MEGPSLRGPALRLAGLPXQQDCNIQEKIDLEIRMREGIWKLLSLSXQKDQVLHAVKNLMVCNARLMAYXSELQKLEEQIANQXGRCDVKFESKERXACKGKIAISDIRIPLMWKDSDHFSNKERSRRYAIFCLFKMGANVFDXDVVNVDKXIXDICFENVXIFNEAGPDFQIKVEVYSCCXEESSIXNXPKKLAKKLKXSISKAXGKKISSVLQEEDDEMCLLLSSAVFGVKYNLLAHXXLXLESAEDSFKXHNLSINGNEESSFWLPLYGNMCCRLVAQPACMAEDAFAGFLNQQQMVEGLISWRRLYCVLRGGKLYCFYSPEEIEAKVEPALVVPINKEXRIRAMDKDAKKRIHNFSVINPVPGQAIXQIFAVDNREDLQKWMEAFWQHFFDLSQWKHCCEELMKIEIMSPRKPPLFLXKEAXSVYHDMSIDSPMKLESLXDIIQKKIEEXNGQFLIGQHEESLPPPWAXLFDGNHQMVIQKKVLYPASEPLHDEKGKKRQAPLPPSDKLPFSLKSQSNXDQLVKDNWGKXSVSQXSSLDXKLSXLMHHLQKPMAAPRKLLPARRNRLSDGEHXDXKXNFEAKPVPAPRQKSIKDILDPRSWLQAQV

SEQ ID NO: 24450 - protein, 163 aa, Homo sapiens
  MOD_RES (18)..(18): Selenocysteine
  MOD_RES (46)..(46): Selenocysteine
  MOD_RES (69)..(69): Selenocysteine
  MOD_RES (83)..(83): Selenocysteine
  MOD_RES (96)..(96): Selenocysteine
  MOD_RES (143)..(143): Selenocysteine
  MOD_RES (151)..(151): Selenocysteine
  MOD_RES (153)..(153): Selenocysteine
  MOD_RES (161)..(161): Selenocysteine
MEGPSLRGPALRLAGLPXQQDCNIQEKIDLEIRMREGIWKLLSLSXQKDQVLHAVKNLMVCNARLMAYXSELQKLEEQIANQXGRCDVKFESKERXACKGKIAISDIRIPLMWKDSDHFSNKERSRRYAIFCLFKMGANVFDXDVVNVDKXIXDICFENVXIL

SEQ ID NO: 24451 - protein, 473 aa, Homo sapiens
  MOD_RES (40)..(41): Selenocysteine
  MOD_RES (84)..(84): Selenocysteine
  MOD_RES (102)..(102): Selenocysteine
  MOD_RES (125)..(125): Selenocysteine
  MOD_RES (134)..(134): Selenocysteine
  MOD_RES (173)..(173): Selenocysteine
  MOD_RES (181)..(181): Selenocysteine
  MOD_RES (230)..(230): Selenocysteine
  MOD_RES (243)..(243): Selenocysteine
  MOD_RES (313)..(313): Selenocysteine
  MOD_RES (321)..(321): Selenocysteine
  MOD_RES (325)..(325): Selenocysteine
  MOD_RES (386)..(386): Selenocysteine
  MOD_RES (396)..(396): Selenocysteine
  MOD_RES (410)..(410): Selenocysteine
  MOD_RES (425)..(425): Selenocysteine
  MOD_RES (441)..(441): Selenocysteine
  MOD_RES (454)..(454): Selenocysteine
  MOD_RES (458)..(458): Selenocysteine
  MOD_RES (468)..(468): Selenocysteine
MKRASAGGSRLLAWVLWLQAWQVAAPCPGACVCYNEPKVXXSCPQQGLQAVPVGIPAASQRIFLHGNRISHVPAASFRACRNLXILWLHSNVLARIDAAAFXGLALLEQLDLSDNAQLRSVDPAXFHGLGRLHXLHLDRCGLQELGPGLFRGLAALQYLYLQDNALQALPDDXFRDLGNLXHLFLHGNRISSVPERAFRGLHSLDRLLLHQNRVAHVHPHAFRDLGRLMXLYLFANNLSALPXEALAPLRALQYLRLNDNPWVCDCRARPLWAWLQKFRGSSSEVPCSLPQRLAGRDLKRLAANDLQGCAVAXGPYHPIWXGRAXDEEPLGLPKCCQPDAADKASVLEPGRPASAGNALKGRVPPGDSPPGNGSGPRHINDSPFGXLPGSAEPPLXAVRPEGSEPPGFPXSGPRRRPGCSRKNRXRSHCRLGQAGSGGGGXGDSEGSGALPSLXCSLXPLGLALVLWXVLGPC

SEQ ID NO: 24452 - protein, 559 aa, Homo sapiens
  MOD_RES (1)..(1): Any amino acid
  MOD_RES (14)..(14): Selenocysteine
  MOD_RES (23)..(23): Selenocysteine
  MOD_RES (45)..(45): Selenocysteine
  MOD_RES (59)..(59): Selenocysteine
  MOD_RES (61)..(61): Selenocysteine
  MOD_RES (63)..(63): Selenocysteine
  MOD_RES (85)..(85): Selenocysteine
  MOD_RES (126)..(127): Selenocysteine
  MOD_RES (170)..(170): Selenocysteine
  MOD_RES (188)..(188): Selenocysteine
  MOD_RES (211)..(211): Selenocysteine
  MOD_RES (220)..(220): Selenocysteine
  MOD_RES (259)..(259): Selenocysteine
  MOD_RES (267)..(267): Selenocysteine
  MOD_RES (316)..(316): Selenocysteine
  MOD_RES (329)..(329): Selenocysteine
  MOD_RES (399)..(399): Selenocysteine
  MOD_RES (407)..(407): Selenocysteine
  MOD_RES (411)..(411): Selenocysteine
  MOD_RES (472)..(472): Selenocysteine
  MOD_RES (482)..(482): Selenocysteine
  MOD_RES (496)..(496): Selenocysteine
  MOD_RES (511)..(511): Selenocysteine
  MOD_RES (527)..(527): Selenocysteine
  MOD_RES (540)..(540): Selenocysteine
  MOD_RES (544)..(544): Selenocysteine
  MOD_RES (554)..(554): Selenocysteine
XVEEGAGCLGGCGXRLLLSPGHXCPPPPPSGIQAPVFEIDVPRGXPAPLQCFLGPVGGXPXGXPRGLLQCGLCVHWSPEEVPAVXSVHSRRPSRSRLLAWVLWLQAWQVAAPCPGACVCYNEPKVXXSCPQQGLQAVPVGIPAASQRIFLHGNRISHVPAASFRACRNLXILWLHSNVLARIDAAAFXGLALLEQLDLSDNAQLRSVDPAXFHGLGRLHXLHLDRCGLQELGPGLFRGLAALQYLYLQDNALQALPDDXFRDLGNLXHLFLHGNRISSVPERAFRGLHSLDRLLLHQNRVAHVHPHAFRDLGRLMXLYLFANNLSALPXEALAPLRALQYLRLNDNPWVCDCRARPLWAWLQKFRGSSSEVPCSLPQRLAGRDLKRLAANDLQGCAVAXGPYHPIWXGRAXDEEPLGLPKCCQPDAADKASVLEPGRPASAGNALKGRVPPGDSPPGNGSGPRHINDSPFGXLPGSAEPPLXAVRPEGSEPPGFPXSGPRRRPGCSRKNRXRSHCRLGQAGSGGGGXGDSEGSGALPSLXCSLXPLGLALVLWXVLGPC

SEQ ID NO: 24453 - protein, 493 aa, Homo sapiens
  MOD_RES (1)..(1): Any amino acid
  MOD_RES (17)..(17): Selenocysteine
  MOD_RES (60)..(61): Selenocysteine
  MOD_RES (104)..(104): Selenocysteine
  MOD_RES (122)..(122): Selenocysteine
  MOD_RES (145)..(145): Selenocysteine
  MOD_RES (154)..(154): Selenocysteine
  MOD_RES (193)..(193): Selenocysteine
  MOD_RES (201)..(201): Selenocysteine
  MOD_RES (250)..(250): Selenocysteine
  MOD_RES (263)..(263): Selenocysteine
  MOD_RES (333)..(333): Selenocysteine
  MOD_RES (341)..(341): Selenocysteine
  MOD_RES (345)..(345): Selenocysteine
  MOD_RES (406)..(406): Selenocysteine
  MOD_RES (416)..(416): Selenocysteine
  MOD_RES (430)..(430): Selenocysteine
  MOD_RES (445)..(445): Selenocysteine
  MOD_RES (461)..(461): Selenocysteine
  MOD_RES (474)..(474): Selenocysteine
  MOD_RES (478)..(478): Selenocysteine
  MOD_RES (488)..(488): Selenocysteine
XYRGWVGVSGRLHPSLXVWAQNLPFLRGSRLLAWVLWLQAWQVAAPCPGACVCYNEPKVXXSCPQQGLQAVPVGIPAASQRIFLHGNRISHVPAASFRACRNLXILWLHSNVLARIDAAAFXGLALLEQLDLSDNAQLRSVDPAXFHGLGRLHXLHLDRCGLQELGPGLFRGLAALQYLYLQDNALQALPDDXFRDLGNLXHLFLHGNRISSVPERAFRGLHSLDRLLLHQNRVAHVHPHAFRDLGRLMXLYLFANNLSALPXEALAPLRALQYLRLNDNPWVCDCRARPLWAWLQKFRGSSSEVPCSLPQRLAGRDLKRLAANDLQGCAVAXGPYHPIWXGRAXDEEPLGLPKCCQPDAADKASVLEPGRPASAGNALKGRVPPGDSPPGNGSGPRHINDSPFGXLPGSAEPPLXAVRPEGSEPPGFPXSGPRRRPGCSRKNRXRSHCRLGQAGSGGGGXGDSEGSGALPSLXCSLXPLGLALVLWXVLGPC

SEQ ID NO: 24454 - protein, 441 aa, Homo sapiens
  MOD_RES (37)..(37): Selenocysteine
  MOD_RES (80)..(80): Selenocysteine
  MOD_RES (89)..(89): Selenocysteine
  MOD_RES (95)..(95): Selenocysteine
  MOD_RES (115)..(115): Selenocysteine
  MOD_RES (120)..(120): Selenocysteine
  MOD_RES (192)..(192): Selenocysteine
  MOD_RES (224)..(225): Selenocysteine
  MOD_RES (305)..(305): Selenocysteine
  MOD_RES (317)..(317): Selenocysteine
  MOD_RES (319)..(321): Selenocysteine
  MOD_RES (336)..(336): Selenocysteine
  MOD_RES (357)..(357): Selenocysteine
  MOD_RES (395)..(395): Selenocysteine
  MOD_RES (408)..(408): Selenocysteine
  MOD_RES (433)..(433): Selenocysteine
  MOD_RES (439)..(439): Selenocysteine
MLRKGCCVELLLLLVAAELPLGGGCPRDCVCYPAPMXVSCQAHNFAAIPEGIPVDSERVFLQNNRIGLLQPGHFSPAMVXLWIYSNNIXYIHPSXFEGFVHLEELDLGDNRQLRXLAPEXFQGLVKLHALYLYKCGLSALPAGVFGGLHSLQYLYLQDNHIEYLQDDIFVDLVNLSHLFLHGNKLWSLGPGXFRGLVNLDRLLLHENQLQWVHHKAFHDLRRLXXLFLFNNSLSELQGECLAPLGALEFLRLNGNPWDCGCRARSLWEWLQRFRGSSSAVPCVSPGLRHGQDLKLLRAEDFRNCXGPASPHQIKSHXLXXXDRAARKEHHSPHGPXRSKGHPHGPRPGHRKPGKNCXNPRNRNQISKAGAGKQAPELPDYAPDYQHKFSFDIMPXARPKRKGKCARRXPIRAPSGVQQASSASSLGASLLAWXLGLAVXLR

SEQ ID NO: 24455 - protein, 420 aa, Homo sapiens
  MOD_RES (36)..(36): Selenocysteine
  MOD_RES (43)..(43): Selenocysteine
  MOD_RES (62)..(62): Selenocysteine
  MOD_RES (74)..(74): Selenocysteine
  MOD_RES (79)..(79): Selenocysteine
  MOD_RES (86)..(86): Selenocysteine
  MOD_RES (96)..(96): Selenocysteine
  MOD_RES (101)..(101): Selenocysteine
  MOD_RES (126)..(126): Selenocysteine
  MOD_RES (195)..(195): Selenocysteine
  MOD_RES (230)..(230): Selenocysteine
  MOD_RES (287)..(287): Selenocysteine
  MOD_RES (290)..(290): Selenocysteine
  MOD_RES (316)..(316): Selenocysteine
  MOD_RES (346)..(346): Selenocysteine
  MOD_RES (366)..(366): Selenocysteine
MLPGLRRLLQAPASACLLLMLLALPLAAPSCPMLCXCYSSPPXVSCQANNFSSVPLSLPPSXQRLFLQNNLIRXLRPGXFGSNLLXLWLFSNNLSXIYPGXFRHLQALEELDLGDNRHLRSLEPDXFQGLERLQSLHLYRCQLSSLPGNIFRGLVSLQYLYLQENSLLHLQDDLFADLANLSHLFLHGNRLRLLXEHVFRGLGSLDRLLLHGNRLQGVHRAAFRGLSRLXILYLFNNSLASLPGEALADLPSLEFLRLNANPWACDCRARPLWAWFQRARVSSSDVXCAXPPERQGRDLRALREADFQACPPAAPXRPGSRARGNSSSNHLYGVAEAGAPPADPSXLYRDLPAEDSRGRQGGDAPXEDDYWGGYGGEDQRGEQMCPGAACQAPPDSRGPALSAGLPSPLLCLLLLVPHHL

SEQ ID NO: 24456 - protein, 204 aa, Homo sapiens
  MOD_RES (36)..(36): Selenocysteine
  MOD_RES (43)..(43): Selenocysteine
  MOD_RES (62)..(62): Selenocysteine
  MOD_RES (74)..(74): Selenocysteine
  MOD_RES (79)..(79): Selenocysteine
  MOD_RES (86)..(86): Selenocysteine
  MOD_RES (96)..(96): Selenocysteine
  MOD_RES (101)..(101): Selenocysteine
  MOD_RES (126)..(126): Selenocysteine
MLPGLRRLLQAPASACLLLMLLALPLAAPSCPMLCXCYSSPPXVSCQANNFSSVPLSLPPSXQRLFLQNNLIRXLRPGXFGSNLLXLWLFSNNLSXIYPGXFRHLQALEELDLGDNRHLRSLEPDXFQGLERLQSLHLYRCQLSSLPGNIFRGLVSLQYLYLQENSLLHLQGKKEKGKSLLCSWRMDALKMEGIPVIVIHCYYY

SEQ ID NO: 24457 - protein, 193 aa, Homo sapiens
  MOD_RES (36)..(36): Selenocysteine
  MOD_RES (43)..(43): Selenocysteine
  MOD_RES (62)..(62): Selenocysteine
  MOD_RES (74)..(74): Selenocysteine
  MOD_RES (79)..(79): Selenocysteine
  MOD_RES (86)..(86): Selenocysteine
  MOD_RES (96)..(96): Selenocysteine
  MOD_RES (101)..(101): Selenocysteine
  MOD_RES (126)..(126): Selenocysteine
  MOD_RES (191)..(191): Selenocysteine
MLPGLRRLLQAPASACLLLMLLALPLAAPSCPMLCXCYSSPPXVSCQANNFSSVPLSLPPSXQRLFLQNNLIRXLRPGXFGSNLLXLWLFSNNLSXIYPGXFRHLQALEELDLGDNRHLRSLEPDXFQGLERLQSLHLYRCQLSSLPGNIFRGLVSLQYLYLQENSLLHLQGPLPKGLCSCFSHPPSSLPXSR

SEQ ID NO: 24458 - protein, 404 aa, Homo sapiens
  MOD_RES (8)..(9): Selenocysteine
  MOD_RES (33)..(33): Selenocysteine
  MOD_RES (41)..(41): Selenocysteine
  MOD_RES (47)..(47): Selenocysteine
  MOD_RES (120)..(120): Selenocysteine
  MOD_RES (143)..(144): Selenocysteine
  MOD_RES (149)..(149): Selenocysteine
  MOD_RES (151)..(152): Selenocysteine
  MOD_RES (168)..(168): Selenocysteine
  MOD_RES (171)..(171): Selenocysteine
  MOD_RES (195)..(195): Selenocysteine
  MOD_RES (202)..(202): Selenocysteine
  MOD_RES (208)..(208): Selenocysteine
  MOD_RES (215)..(215): Selenocysteine
  MOD_RES (227)..(227): Selenocysteine
  MOD_RES (242)..(242): Selenocysteine
  MOD_RES (319)..(319): Selenocysteine
  MOD_RES (337)..(338): Selenocysteine
  MOD_RES (349)..(349): Selenocysteine
  MOD_RES (370)..(370): Selenocysteine
  MOD_RES (390)..(390): Selenocysteine
MEASFVQXXMALGLSSKKASSRNVAVERKNLIXVCRFSVKXLLEKYXAEPIDDSSEEFVNFAAILEQILSHRFKACAPAGPVSWFSSDGQRGFWDYIRLACSKVPNNCVSSIENMENISXARAKGRAWIRVALMEKRMSEYIXXALRDXRXXRRFYDSGAIMLRDEAXILXGMLIGLSAIDFSFCLKGEVLDGKXPVVIDYXPYLKFXQSYDYLXDEEERHSAESSXSEDNSPEHPYLPLVXDEDSWYSKWHKMEQKFRIVYAQKGYLEELVRLRESQLKDLEAENRRLQLQLEEAAAQNQREKRELEGVILELQEQLXGLIPSDHAPLAQGSKELXXPLVNQWPSLGXLNGAEGASNSKLYRRHSFMSXEPLSAEASLSSDSQRLGEGXRDEEPWGPIGSSPN

SEQ ID NO: 24459 - protein, 405 aa, Homo sapiens
  MOD_RES (8)..(9): Selenocysteine
  MOD_RES (33)..(33): Selenocysteine
  MOD_RES (41)..(41): Selenocysteine
  MOD_RES (47)..(47): Selenocysteine
  MOD_RES (120)..(120): Selenocysteine
  MOD_RES (143)..(144): Selenocysteine
  MOD_RES (149)..(149): Selenocysteine
  MOD_RES (151)..(152): Selenocysteine
  MOD_RES (168)..(168): Selenocysteine
  MOD_RES (171)..(171): Selenocysteine
  MOD_RES (195)..(195): Selenocysteine
  MOD_RES (202)..(202): Selenocysteine
  MOD_RES (208)..(208): Selenocysteine
  MOD_RES (215)..(215): Selenocysteine
  MOD_RES (227)..(227): Selenocysteine
  MOD_RES (242)..(242): Selenocysteine
  MOD_RES (319)..(319): Selenocysteine
  MOD_RES (337)..(338): Selenocysteine
  MOD_RES (349)..(349): Selenocysteine
  MOD_RES (370)..(370): Selenocysteine
  MOD_RES (390)..(390): Selenocysteine
MEASFVQXXMALGLSSKKASSRNVAVERKNLIXVCRFSVKXLLEKYXAEPIDDSSEEFVNFAAILEQILSHRFKACAPAGPVSWFSSDGQRGFWDYIRLACSKVPNNCVSSIENMENISXARAKGRAWIRVALMEKRMSEYIXXALRDXRXXRRFYDSGAIMLRDEAXILXGMLIGLSAIDFSFCLKGEVLDGKXPVVIDYXPYLKFXQSYDYLXDEEERHSAESSXSEDNSPEHPYLPLVXDEDSWYSKWHKMEQKFRIVYAQKGYLEELVRLRESQLKDLEAENRRLQLQLEEAAAQNQREKRELEGVILELQEQLXGLIPSDHAPLAQGSKELXXPLVNQWPSLGXLNGAEGASNSKLYRRHSFMSXEPLSAEASLSSDSQRLGEGXRDEEPWGPIGSSEPN

SEQ ID NO: 24460 - protein, 446 aa, Homo sapiens
  MOD_RES (8)..(9): Selenocysteine
  MOD_RES (33)..(33): Selenocysteine
  MOD_RES (41)..(41): Selenocysteine
  MOD_RES (47)..(47): Selenocysteine
  MOD_RES (120)..(120): Selenocysteine
  MOD_RES (143)..(144): Selenocysteine
  MOD_RES (149)..(149): Selenocysteine
  MOD_RES (151)..(152): Selenocysteine
  MOD_RES (168)..(168): Selenocysteine
  MOD_RES (171)..(171): Selenocysteine
  MOD_RES (195)..(195): Selenocysteine
  MOD_RES (202)..(202): Selenocysteine
  MOD_RES (208)..(208): Selenocysteine
  MOD_RES (215)..(215): Selenocysteine
  MOD_RES (227)..(227): Selenocysteine
  MOD_RES (242)..(242): Selenocysteine
  MOD_RES (319)..(319): Selenocysteine
  MOD_RES (337)..(338): Selenocysteine
  MOD_RES (349)..(349): Selenocysteine
  MOD_RES (370)..(370): Selenocysteine
  MOD_RES (390)..(390): Selenocysteine
  MOD_RES (404)..(404): Selenocysteine
MEASFVQXXMALGLSSKKASSRNVAVERKNLIXVCRFSVKXLLEKYXAEPIDDSSEEFVNFAAILEQILSHRFKACAPAGPVSWFSSDGQRGFWDYIRLACSKVPNNCVSSIENMENISXARAKGRAWIRVALMEKRMSEYIXXALRDXRXXRRFYDSGAIMLRDEAXILXGMLIGLSAIDFSFCLKGEVLDGKXPVVIDYXPYLKFXQSYDYLXDEEERHSAESSXSEDNSPEHPYLPLVXDEDSWYSKWHKMEQKFRIVYAQKGYLEELVRLRESQLKDLEAENRRLQLQLEEAAAQNQREKRELEGVILELQEQLXGLIPSDHAPLAQGSKELXXPLVNQWPSLGXLNGAEGASNSKLYRRHSFMSXEPLSAEASLSSDSQRLGEGXRDEEPWGPIGKDPXPSMLGLCGSLASIPSCKSLASFKSNECLVSDSPEGSPALSPS

SEQ ID NO: 24461 - protein, 400 aa, Homo sapiens
  MOD_RES (8)..(9): Selenocysteine
  MOD_RES (33)..(33): Selenocysteine
  MOD_RES (41)..(41): Selenocysteine
  MOD_RES (47)..(47): Selenocysteine
  MOD_RES (115)..(115): Selenocysteine
  MOD_RES (138)..(139): Selenocysteine
  MOD_RES (144)..(144): Selenocysteine
  MOD_RES (146)..(147): Selenocysteine
  MOD_RES (163)..(163): Selenocysteine
  MOD_RES (166)..(166): Selenocysteine
  MOD_RES (190)..(190): Selenocysteine
  MOD_RES (197)..(197): Selenocysteine
  MOD_RES (203)..(203): Selenocysteine
  MOD_RES (210)..(210): Selenocysteine
  MOD_RES (222)..(222): Selenocysteine
  MOD_RES (237)..(237): Selenocysteine
  MOD_RES (314)..(314): Selenocysteine
  MOD_RES (332)..(333): Selenocysteine
  MOD_RES (344)..(344): Selenocysteine
  MOD_RES (365)..(365): Selenocysteine
  MOD_RES (385)..(385): Selenocysteine
MEASFVQXXMALGLSSKKASSRNVAVERKNLIXVCRFSVKXLLEKYXAEPIDDSSEEFVNFAAILEQILSHRFKGPVSWFSSDGQRGFWDYIRLACSKVPNNCVSSIENMENISXARAKGRAWIRVALMEKRMSEYIXXALRDXRXXRRFYDSGAIMLRDEAXILXGMLIGLSAIDFSFCLKGEVLDGKXPVVIDYXPYLKFXQSYDYLXDEEERHSAESSXSEDNSPEHPYLPLVXDEDSWYSKWHKMEQKFRIVYAQKGYLEELVRLRESQLKDLEAENRRLQLQLEEAAAQNQREKRELEGVILELQEQLXGLIPSDHAPLAQGSKELXXPLVNQWPSLGXLNGAEGASNSKLYRRHSFMSXEPLSAEASLSSDSQRLGEGXRDEEPWGPIGSSEPN

SEQ ID NO: 24462 - protein, 140 aa, Homo sapiens
  MOD_RES (23)..(23): Selenocysteine
  MOD_RES (28)..(28): Selenocysteine
  MOD_RES (32)..(32): Selenocysteine
  MOD_RES (79)..(79): Selenocysteine
  MOD_RES (91)..(91): Selenocysteine
  MOD_RES (98)..(98): Selenocysteine
  MOD_RES (115)..(115): Selenocysteine
  MOD_RES (118)..(118): Selenocysteine
  MOD_RES (135)..(135): Selenocysteine
MASDSIFESFPSYPQCFMRDASXSRRFXPPSXALSPGKMSEALPLGAPDAGAALAGKLRSGDRSMVEVLADHPGELVRXDSPNFLCSVLPXHWRCNKXLPIAFKVVALGDVPDGXLVXVMAGNDENYSAELRNAXAAMKN

SEQ ID NO: 24463 - protein, 32 aa, Homo sapiens
MASDSIFESFPSYPQCFMRECILGMNPSRDVH

SEQ ID NO: 24464 - protein, 49 aa, Homo sapiens
  MOD_RES (36)..(36): Selenocysteine
  MOD_RES (41)..(41): Selenocysteine
  MOD_RES (45)..(45): Selenocysteine
MASDSIFESFPSYPQCFMRECILGMNPSRDVHDASXSRRFXPPSXALSP

SEQ ID NO: 24465 - protein, 480 aa, Homo sapiens
  MOD_RES (36)..(36): Selenocysteine
  MOD_RES (41)..(41): Selenocysteine
  MOD_RES (45)..(45): Selenocysteine
  MOD_RES (92)..(92): Selenocysteine
  MOD_RES (104)..(104): Selenocysteine
  MOD_RES (111)..(111): Selenocysteine
  MOD_RES (128)..(128): Selenocysteine
  MOD_RES (131)..(131): Selenocysteine
  MOD_RES (148)..(148): Selenocysteine
  MOD_RES (174)..(174): Selenocysteine
  MOD_RES (176)..(176): Selenocysteine
  MOD_RES (178)..(178): Selenocysteine
  MOD_RES (181)..(181): Selenocysteine
  MOD_RES (188)..(188): Selenocysteine
  MOD_RES (196)..(196): Selenocysteine
  MOD_RES (214)..(214): Selenocysteine
  MOD_RES (234)..(234): Selenocysteine
  MOD_RES (246)..(246): Selenocysteine
  MOD_RES (257)..(257): Selenocysteine
  MOD_RES (270)..(270): Selenocysteine
  MOD_RES (300)..(300): Selenocysteine
  MOD_RES (311)..(312): Selenocysteine
  MOD_RES (323)..(323): Selenocysteine
  MOD_RES (328)..(328): Selenocysteine
  MOD_RES (354)..(354): Selenocysteine
  MOD_RES (358)..(358): Selenocysteine
  MOD_RES (361)..(361): Selenocysteine
  MOD_RES (375)..(375): Selenocysteine
  MOD_RES (379)..(379): Selenocysteine
  MOD_RES (433)..(433): Selenocysteine
  MOD_RES (437)..(437): Selenocysteine
  MOD_RES (464)..(464): Selenocysteine
MASDSIFESFPSYPQCFMRECILGMNPSRDVHDASXSRRFXPPSXALSPGKMSEALPLGAPDAGAALAGKLRSGDRSMVEVLADHPGELVRXDSPNFLCSVLPXHWRCNKXLPIAFKVVALGDVPDGXLVXVMAGNDENYSAELRNAXAAMKNQVARFNDLRFVGRSGRGKSFXLXIXVFXNPPQVAXYHRAIKIXVDGPREPRRHRQKLDDQXKPGSLSFSERLSELEQLRRXAMRVSPHHPAPXPNPRASLNHSXAFNPQPQSQMQDXRQIQPSPPWSYDQSYQYLGSIASPSVHPAXPISPGRASGMXXLSAELSSRLSXAPDLXAFSDPRQFPALPSISDPRMHYPGAFXYSPXPVXSGIGIGMSAMGSAXRYHXYLPPPYPGSSQAQGGPFQASSPSYHLYYGASAGSYQFSMVGGERSPPRILPPCXNASXGSALLNPSLPNQSDVVEAEGSHSNSPXNMAPSARLEEAVWRPY

SEQ ID NO: 24466 - protein, 38 aa, Homo sapiens
MASDSIFESFPSYPQCFMRGGGPRGCSRWHSGHCDGWQ

SEQ ID NO: 24467 - protein, 256 aa, Homo sapiens
  MOD_RES (17)..(17): Selenocysteine
  MOD_RES (24)..(24): Selenocysteine
  MOD_RES (29)..(29): Selenocysteine
  MOD_RES (33)..(33): Selenocysteine
  MOD_RES (80)..(80): Selenocysteine
  MOD_RES (92)..(92): Selenocysteine
  MOD_RES (99)..(99): Selenocysteine
  MOD_RES (116)..(116): Selenocysteine
  MOD_RES (119)..(119): Selenocysteine
  MOD_RES (136)..(136): Selenocysteine
  MOD_RES (162)..(162): Selenocysteine
  MOD_RES (164)..(164): Selenocysteine
  MOD_RES (166)..(166): Selenocysteine
  MOD_RES (169)..(169): Selenocysteine
  MOD_RES (176)..(176): Selenocysteine
  MOD_RES (184)..(184): Selenocysteine
  MOD_RES (202)..(202): Selenocysteine
  MOD_RES (222)..(222): Selenocysteine
  MOD_RES (234)..(234): Selenocysteine
  MOD_RES (245)..(245): Selenocysteine
MPAAPRGPAQGEAAARXRSRDASXSRRFXPPSXALSPGKMSEALPLGAPDAGAALAGKLRSGDRSMVEVLADHPGELVRXDSPNFLCSVLPXHWRCNKXLPIAFKVVALGDVPDGXLVXVMAGNDENYSAELRNAXAAMKNQVARFNDLRFVGRSGRGKSFXLXIXVFXNPPQVAXYHRAIKIXVDGPREPRRHRQKLDDQXKPGSLSFSERLSELEQLRRXAMRVSPHHPAPXPNPRASLNHSXAFNPQPQSQMQ

SEQ ID NO: 24468 - protein, 389 aa, Homo sapiens
  MOD_RES (9)..(9): Selenocysteine
  MOD_RES (14)..(14): Selenocysteine
  MOD_RES (18)..(18): Selenocysteine
  MOD_RES (65)..(65): Selenocysteine
  MOD_RES (77)..(77): Selenocysteine
  MOD_RES (84)..(84): Selenocysteine
  MOD_RES (101)..(101): Selenocysteine
  MOD_RES (104)..(104): Selenocysteine
  MOD_RES (121)..(121): Selenocysteine
  MOD_RES (147)..(147): Selenocysteine
  MOD_RES (149)..(149): Selenocysteine
  MOD_RES (151)..(151): Selenocysteine
  MOD_RES (154)..(154): Selenocysteine
  MOD_RES (161)..(161): Selenocysteine
  MOD_RES (169)..(169): Selenocysteine
  MOD_RES (179)..(179): Selenocysteine
  MOD_RES (209)..(209): Selenocysteine
  MOD_RES (220)..(221): Selenocysteine
  MOD_RES (232)..(232): Selenocysteine
  MOD_RES (237)..(237): Selenocysteine
  MOD_RES (263)..(263): Selenocysteine
  MOD_RES (267)..(267): Selenocysteine
  MOD_RES (270)..(270): Selenocysteine
  MOD_RES (284)..(284): Selenocysteine
  MOD_RES (288)..(288): Selenocysteine
  MOD_RES (342)..(342): Selenocysteine
  MOD_RES (346)..(346): Selenocysteine
  MOD_RES (373)..(373): Selenocysteine
MRIPVDASXSRRFXPPSXALSPGKMSEALPLGAPDAGAALAGKLRSGDRSMVEVLADHPGELVRXDSPNFLCSVLPXHWRCNKXLPIAFKVVALGDVPDGXLVXVMAGNDENYSAELRNAXAAMKNQVARFNDLRFVGRSGRGKSFXLXIXVFXNPPQVAXYHRAIKIXVDGPREPRNXRQIQPSPPWSYDQSYQYLGSIASPSVHPAXPISPGRASGMXXLSAELSSRLSXAPDLXAFSDPRQFPALPSISDPRMHYPGAFXYSPXPVXSGIGIGMSAMGSAXRYHXYLPPPYPGSSQAQGGPFQASSPSYHLYYGASAGSYQFSMVGGERSPPRILPPCXNASXGSALLNPSLPNQSDVVEAEGSHSNSPXNMAPSARLEEAVWRPY

SEQ ID NO: 24469 - protein, 453 aa, Homo sapiens
  MOD_RES (9)..(9): Selenocysteine
  MOD_RES (14)..(14): Selenocysteine
  MOD_RES (18)..(18): Selenocysteine
  MOD_RES (65)..(65): Selenocysteine
  MOD_RES (77)..(77): Selenocysteine
  MOD_RES (84)..(84): Selenocysteine
  MOD_RES (101)..(101): Selenocysteine
  MOD_RES (104)..(104): Selenocysteine
  MOD_RES (121)..(121): Selenocysteine
  MOD_RES (147)..(147): Selenocysteine
  MOD_RES (149)..(149): Selenocysteine
  MOD_RES (151)..(151): Selenocysteine
  MOD_RES (154)..(154): Selenocysteine
  MOD_RES (161)..(161): Selenocysteine
  MOD_RES (169)..(169): Selenocysteine
  MOD_RES (187)..(187): Selenocysteine
  MOD_RES (207)..(207): Selenocysteine
  MOD_RES (219)..(219): Selenocysteine
  MOD_RES (230)..(230): Selenocysteine
  MOD_RES (243)..(243): Selenocysteine
  MOD_RES (273)..(273): Selenocysteine
  MOD_RES (284)..(285): Selenocysteine
  MOD_RES (296)..(296): Selenocysteine
  MOD_RES (301)..(301): Selenocysteine
  MOD_RES (327)..(327): Selenocysteine
  MOD_RES (331)..(331): Selenocysteine
  MOD_RES (334)..(334): Selenocysteine
  MOD_RES (348)..(348): Selenocysteine
  MOD_RES (352)..(352): Selenocysteine
  MOD_RES (406)..(406): Selenocysteine
  MOD_RES (410)..(410): Selenocysteine
  MOD_RES (437)..(437): Selenocysteine
MRIPVDASXSRRFXPPSXALSPGKMSEALPLGAPDAGAALAGKLRSGDRSMVEVLADHPGELVRXDSPNFLCSVLPXHWRCNKXLPIAFKVVALGDVPDGXLVXVMAGNDENYSAELRNAXAAMKNQVARFNDLRFVGRSGRGKSFXLXIXVFXNPPQVAXYHRAIKIXVDGPREPRRHRQKLDDQXKPGSLSFSERLSELEQLRRXAMRVSPHHPAPXPNPRASLNHSXAFNPQPQSQMQDXRQIQPSPPWSYDQSYQYLGSIASPSVHPAXPISPGRASGMXXLSAELSSRLSXAPDLXAFSDPRQFPALPSISDPRMHYPGAFXYSPXPVXSGIGIGMSAMGSAXRYHXYLPPPYPGSSQAQGGPFQASSPSYHLYYGASAGSYQFSMVGGERSPPRILPPCXNASXGSALLNPSLPNQSDVVEAEGSHSNSPXNMAPSARLEEAVWRPY

SEQ ID NO: 24470 - protein, 250 aa, Homo sapiens
  MOD_RES (9)..(9): Selenocysteine
  MOD_RES (14)..(14): Selenocysteine
  MOD_RES (18)..(18): Selenocysteine
  MOD_RES (65)..(65): Selenocysteine
  MOD_RES (77)..(77): Selenocysteine
  MOD_RES (84)..(84): Selenocysteine
  MOD_RES (101)..(101): Selenocysteine
  MOD_RES (104)..(104): Selenocysteine
  MOD_RES (121)..(121): Selenocysteine
  MOD_RES (147)..(147): Selenocysteine
  MOD_RES (149)..(149): Selenocysteine
  MOD_RES (151)..(151): Selenocysteine
  MOD_RES (154)..(154): Selenocysteine
  MOD_RES (161)..(161): Selenocysteine
  MOD_RES (169)..(169): Selenocysteine
  MOD_RES (187)..(187): Selenocysteine
  MOD_RES (207)..(207): Selenocysteine
  MOD_RES (219)..(219): Selenocysteine
  MOD_RES (230)..(230): Selenocysteine
  MOD_RES (245)..(245): Selenocysteine
MRIPVDASXSRRFXPPSXALSPGKMSEALPLGAPDAGAALAGKLRSGDRSMVEVLADHPGELVRXDSPNFLCSVLPXHWRCNKXLPIAFKVVALGDVPDGXLVXVMAGNDENYSAELRNAXAAMKNQVARFNDLRFVGRSGRGKSFXLXIXVFXNPPQVAXYHRAIKIXVDGPREPRRHRQKLDDQXKPGSLSFSERLSELEQLRRXAMRVSPHHPAPXPNPRASLNHSXAFNPQPQSQMQEEDXAPWRC

SEQ ID NO: 24471 - protein, 31 aa, Homo sapiens
ASRCERKREEANSRQLFSHQLFPSISYLNVL

SEQ ID NO: 24472 - protein, 663 aa, Homo sapiens
  MOD_RES (9)..(9): Selenocysteine
  MOD_RES (70)..(70): Selenocysteine
  MOD_RES (86)..(86): Selenocysteine
  MOD_RES (91)..(91): Selenocysteine
  MOD_RES (96)..(96): Selenocysteine
  MOD_RES (106)..(106): Selenocysteine
  MOD_RES (111)..(111): Selenocysteine
  MOD_RES (114)..(114): Selenocysteine
  MOD_RES (120)..(121): Selenocysteine
  MOD_RES (127)..(127): Selenocysteine
  MOD_RES (131)..(131): Selenocysteine
  MOD_RES (133)..(134): Selenocysteine
  MOD_RES (136)..(136): Selenocysteine
  MOD_RES (139)..(139): Selenocysteine
  MOD_RES (144)..(144): Selenocysteine
  MOD_RES (190)..(191): Selenocysteine
  MOD_RES (209)..(209): Selenocysteine
  MOD_RES (218)..(218): Selenocysteine
  MOD_RES (220)..(220): Selenocysteine
  MOD_RES (232)..(232): Selenocysteine
  MOD_RES (282)..(283): Selenocysteine
  MOD_RES (303)..(303): Selenocysteine
  MOD_RES (307)..(307): Selenocysteine
  MOD_RES (328)..(328): Selenocysteine
  MOD_RES (352)..(352): Selenocysteine
  MOD_RES (394)..(394): Selenocysteine
  MOD_RES (405)..(405): Selenocysteine
  MOD_RES (430)..(430): Selenocysteine
  MOD_RES (435)..(435): Selenocysteine
  MOD_RES (521)..(521): Selenocysteine
  MOD_RES (539)..(540): Selenocysteine
  MOD_RES (548)..(548): Selenocysteine
  MOD_RES (584)..(584): Selenocysteine
  MOD_RES (590)..(590): Selenocysteine
  MOD_RES (613)..(613): Selenocysteine
  MOD_RES (622)..(622): Selenocysteine
  MOD_RES (630)..(630): Selenocysteine
  MOD_RES (641)..(641): Selenocysteine
  MOD_RES (646)..(646): Selenocysteine
  MOD_RES (650)..(651): Selenocysteine
  MOD_RES (654)..(654): Selenocysteine
  MOD_RES (657)..(657): Selenocysteine
  MOD_RES (660)..(661): Selenocysteine
MCHPDKAFXSDKLQCVFNEYKAAVWVPPRPRPLSRAPLPEAGGENLHLKISRVRKRNLPFVVWGEEEASXPGLDAISHHLCYPDRXHRDRXEKHSXMPDSPVDVKXQSRLXPPXMPPPPXXQGAPRXSSFXPXXLXNGXSHSPXALNGAPSPPNGFSNGPSSSSSSSLANQQLPPACGARQLSKLKRFLXXLQQFGNDISPEIGERVRXLVLGLVNSXLXIEEFHSKLQEAXNFPLRPFVIPFLKANLPLLQRELLHCARLAKQNPAQYLAQHEQLLLDASXXSPVDSSELLLDVNENGKRRXPDRXKENGFDREPLHSEHPSKRPCXISPGQRYSPNNGLSYQPNGLPHPXPPPPQHYRLDDMAIAHHYRDSYRHPSHRDLRDRNRPMGLHGXRQEEMIDHRLXDREWAEEWKHLDHLLNCIMDMVEKXRRSLXVLRRCQEADREELNYWIRRYSDAEDLKKGGGSSSSHSRQQSPVNPDPVALDAHREFLHRPASGYVPEEIWKKAEEAVNEVKRQAMXELQKAVSEAERKAHDMIXXERAKMERXVAEAKRQAAEDALAVINQQEDSSESCWNCGRKASEXCSGCNXARYCGSFCQHKDWEKHHHICGQXLQAQQQGDXPAVSSSVXPNSGAGSPMDXPPAAXPRSXXPGXPSXIEXXPR

SEQ ID NO: 24473 - protein, 615 aa, Homo sapiens
  MOD_RES (9)..(9): Selenocysteine
  MOD_RES (43)..(43): Selenocysteine
  MOD_RES (48)..(48): Selenocysteine
  MOD_RES (58)..(58): Selenocysteine
  MOD_RES (63)..(63): Selenocysteine
  MOD_RES (66)..(66): Selenocysteine
  MOD_RES (72)..(73): Selenocysteine
  MOD_RES (79)..(79): Selenocysteine
  MOD_RES (83)..(83): Selenocysteine
  MOD_RES (85)..(86): Selenocysteine
  MOD_RES (88)..(88): Selenocysteine
  MOD_RES (91)..(91): Selenocysteine
  MOD_RES (96)..(96): Selenocysteine
  MOD_RES (142)..(143): Selenocysteine
  MOD_RES (161)..(161): Selenocysteine
  MOD_RES (170)..(170): Selenocysteine
  MOD_RES (172)..(172): Selenocysteine
  MOD_RES (184)..(184): Selenocysteine
  MOD_RES (234)..(235): Selenocysteine
  MOD_RES (255)..(255): Selenocysteine
  MOD_RES (259)..(259): Selenocysteine
  MOD_RES (280)..(280): Selenocysteine
  MOD_RES (304)..(304): Selenocysteine
  MOD_RES (346)..(346): Selenocysteine
  MOD_RES (357)..(357): Selenocysteine
  MOD_RES (382)..(382): Selenocysteine
  MOD_RES (387)..(387): Selenocysteine
  MOD_RES (473)..(473): Selenocysteine
  MOD_RES (491)..(492): Selenocysteine
  MOD_RES (500)..(500): Selenocysteine
  MOD_RES (536)..(536): Selenocysteine
  MOD_RES (542)..(542): Selenocysteine
  MOD_RES (565)..(565): Selenocysteine
  MOD_RES (574)..(574): Selenocysteine
  MOD_RES (582)..(582): Selenocysteine
  MOD_RES (593)..(593): Selenocysteine
  MOD_RES (598)..(598): Selenocysteine
  MOD_RES (602)..(603): Selenocysteine
  MOD_RES (606)..(606): Selenocysteine
  MOD_RES (609)..(609): Selenocysteine
  MOD_RES (612)..(613): Selenocysteine
MCHPDKAFXSDKLQCVFNEYKAAVWVPPRPRPLSRAPLPEDRXEKHSXMPDSPVDVKXQSRLXPPXMPPPPXXQGAPRXSSFXPXXLXNGXSHSPXALNGAPSPPNGFSNGPSSSSSSSLANQQLPPACGARQLSKLKRFLXXLQQFGNDISPEIGERVRXLVLGLVNSXLXIEEFHSKLQEAXNFPLRPFVIPFLKANLPLLQRELLHCARLAKQNPAQYLAQHEQLLLDASXXSPVDSSELLLDVNENGKRRXPDRXKENGFDREPLHSEHPSKRPCXISPGQRYSPNNGLSYQPNGLPHPXPPPPQHYRLDDMAIAHHYRDSYRHPSHRDLRDRNRPMGLHGXRQEEMIDHRLXDREWAEEWKHLDHLLNCIMDMVEKXRRSLXVLRRCQEADREELNYWIRRYSDAEDLKKGGGSSSSHSRQQSPVNPDPVALDAHREFLHRPASGYVPEEIWKKAEEAVNEVKRQAMXELQKAVSEAERKAHDMIXXERAKMERXVAEAKRQAAEDALAVINQQEDSSESCWNCGRKASEXCSGCNXARYCGSFCQHKDWEKHHHICGQXLQAQQQGDXPAVSSSVXPNSGAGSPMDXPPAAXPRSXXPGXPSXIEXXPR

SEQ ID NO: 24474 - protein, 36 aa, Homo sapiens
  MOD_RES (8)..(8): Selenocysteine
MISVKRNXWRALSLVIGDCRKKGNFEYCQDKPHLKN

SEQ ID NO: 24475 - protein, 48 aa, Homo sapiens
  MOD_RES (8)..(8): Selenocysteine
  MOD_RES (32)..(32): Selenocysteine
  MOD_RES (37)..(37): Selenocysteine
  MOD_RES (47)..(47): Selenocysteine
MISVKRNXWRALSLVIGDCRKKGNFEYCQDRXEKHSXMPDSPVDVKXQ

SEQ ID NO: 24476 - protein, 54 aa, Homo sapiens
  MOD_RES (8)..(8): Selenocysteine
  MOD_RES (32)..(32): Selenocysteine
  MOD_RES (37)..(37): Selenocysteine
  MOD_RES (47)..(47): Selenocysteine
  MOD_RES (52)..(52): Selenocysteine
MISVKRNXWRALSLVIGDCRKKGNFEYCQDRXEKHSXMPDSPVDVKXQSRLXPP

SEQ ID NO: 24477 - protein, 85 aa, Homo sapiens
  MOD_RES (8)..(8): Selenocysteine
  MOD_RES (32)..(32): Selenocysteine
  MOD_RES (37)..(37): Selenocysteine
  MOD_RES (47)..(47): Selenocysteine
  MOD_RES (52)..(52): Selenocysteine
  MOD_RES (55)..(55): Selenocysteine
  MOD_RES (61)..(62): Selenocysteine
  MOD_RES (68)..(68): Selenocysteine
  MOD_RES (72)..(72): Selenocysteine
  MOD_RES (74)..(75): Selenocysteine
  MOD_RES (77)..(77): Selenocysteine
  MOD_RES (80)..(80): Selenocysteine
  MOD_RES (85)..(85): Selenocysteine
MISVKRNXWRALSLVIGDCRKKGNFEYCQDRXEKHSXMPDSPVDVKXQSRLXPPXMPPPPXXQGAPRXSSFXPXXLXNGXSHSPX

SEQ ID NO: 24478 - protein, 94 aa, Homo sapiens
  MOD_RES (8)..(8): Selenocysteine
  MOD_RES (32)..(32): Selenocysteine
  MOD_RES (37)..(37): Selenocysteine
  MOD_RES (47)..(47): Selenocysteine
  MOD_RES (52)..(52): Selenocysteine
  MOD_RES (55)..(55): Selenocysteine
  MOD_RES (61)..(62): Selenocysteine
  MOD_RES (68)..(68): Selenocysteine
  MOD_RES (72)..(72): Selenocysteine
  MOD_RES (74)..(75): Selenocysteine
  MOD_RES (77)..(77): Selenocysteine
  MOD_RES (80)..(80): Selenocysteine
  MOD_RES (85)..(85): Selenocysteine
MISVKRNXWRALSLVIGDCRKKGNFEYCQDRXEKHSXMPDSPVDVKXQSRLXPPXMPPPPXXQGAPRXSSFXPXXLXNGXSHSPXALNGAPSPP

SEQ ID NO: 24479 - protein, 120 aa, Homo sapiens
  MOD_RES (8)..(8): Selenocysteine
  MOD_RES (32)..(32): Selenocysteine
  MOD_RES (37)..(37): Selenocysteine
  MOD_RES (47)..(47): Selenocysteine
  MOD_RES (52)..(52): Selenocysteine
  MOD_RES (55)..(55): Selenocysteine
  MOD_RES (61)..(62): Selenocysteine
  MOD_RES (68)..(68): Selenocysteine
  MOD_RES (72)..(72): Selenocysteine
  MOD_RES (74)..(75): Selenocysteine
  MOD_RES (77)..(77): Selenocysteine
  MOD_RES (80)..(80): Selenocysteine
  MOD_RES (85)..(85): Selenocysteine
MISVKRNXWRALSLVIGDCRKKGNFEYCQDRXEKHSXMPDSPVDVKXQSRLXPPXMPPPPXXQGAPRXSSFXPXXLXNGXSHSPXALNGAPSPPNGFSNGPSSSSSSSLANQQLPPACGA

SEQ ID NO: 24480 - protein, 135 aa, Homo sapiens
  MOD_RES (8)..(8): Selenocysteine
  MOD_RES (32)..(32): Selenocysteine
  MOD_RES (37)..(37): Selenocysteine
  MOD_RES (47)..(47): Selenocysteine
  MOD_RES (52)..(52): Selenocysteine
  MOD_RES (55)..(55): Selenocysteine
  MOD_RES (61)..(62): Selenocysteine
  MOD_RES (68)..(68): Selenocysteine
  MOD_RES (72)..(72): Selenocysteine
  MOD_RES (74)..(75): Selenocysteine
  MOD_RES (77)..(77): Selenocysteine
  MOD_RES (80)..(80): Selenocysteine
  MOD_RES (85)..(85): Selenocysteine
  MOD_RES (131)..(132): Selenocysteine
MISVKRNXWRALSLVIGDCRKKGNFEYCQDRXEKHSXMPDSPVDVKXQSRLXPPXMPPPPXXQGAPRXSSFXPXXLXNGXSHSPXALNGAPSPPNGFSNGPSSSSSSSLANQQLPPACGARQLSKLKRFLXXLQQ

SEQ ID NO: 24481 - protein, 156 aa, Homo sapiens
  MOD_RES (8)..(8): Selenocysteine
  MOD_RES (32)..(32): Selenocysteine
  MOD_RES (37)..(37): Selenocysteine
  MOD_RES (47)..(47): Selenocysteine
  MOD_RES (52)..(52): Selenocysteine
  MOD_RES (55)..(55): Selenocysteine
  MOD_RES (61)..(62): Selenocysteine
  MOD_RES (68)..(68): Selenocysteine
  MOD_RES (72)..(72): Selenocysteine
  MOD_RES (74)..(75): Selenocysteine
  MOD_RES (77)..(77): Selenocysteine
  MOD_RES (80)..(80): Selenocysteine
  MOD_RES (85)..(85): Selenocysteine
  MOD_RES (131)..(132): Selenocysteine
  MOD_RES (150)..(150): Selenocysteine
MISVKRNXWRALSLVIGDCRKKGNFEYCQDRXEKHSXMPDSPVDVKXQSRLXPPXMPPPPXXQGAPRXSSFXPXXLXNGXSHSPXALNGAPSPPNGFSNGPSSSSSSSLANQQLPPACGARQLSKLKRFLXXLQQFGNDISPEIGERVRXLVLGLV

SEQ ID NO: 24482 - protein, 169 aa, Homo sapiens
  MOD_RES (8)..(8): Selenocysteine
  MOD_RES (32)..(32): Selenocysteine
  MOD_RES (37)..(37): Selenocysteine
  MOD_RES (47)..(47): Selenocysteine
  MOD_RES (52)..(52): Selenocysteine
  MOD_RES (55)..(55): Selenocysteine
  MOD_RES (61)..(62): Selenocysteine
  MOD_RES (68)..(68): Selenocysteine
  MOD_RES (72)..(72): Selenocysteine
  MOD_RES (74)..(75): Selenocysteine
  MOD_RES (77)..(77): Selenocysteine
  MOD_RES (80)..(80): Selenocysteine
  MOD_RES (85)..(85): Selenocysteine
  MOD_RES (131)..(132): Selenocysteine
  MOD_RES (150)..(150): Selenocysteine
  MOD_RES (159)..(159): Selenocysteine
  MOD_RES (161)..(161): Selenocysteine
MISVKRNXWRALSLVIGDCRKKGNFEYCQDRXEKHSXMPDSPVDVKXQSRLXPPXMPPPPXXQGAPRXSSFXPXXLXNGXSHSPXALNGAPSPPNGFSNGPSSSSSSSLANQQLPPACGARQLSKLKRFLXXLQQFGNDISPEIGERVRXLVLGLVNSXLXIEEFHSKL

SEQ ID NO: 24483 - protein, 229 aa, Homo sapiens
  MOD_RES (8)..(8): Selenocysteine
  MOD_RES (32)..(32): Selenocysteine
  MOD_RES (37)..(37): Selenocysteine
  MOD_RES (47)..(47): Selenocysteine
  MOD_RES (52)..(52): Selenocysteine
  MOD_RES (55)..(55): Selenocysteine
  MOD_RES (61)..(62): Selenocysteine
  MOD_RES (68)..(68): Selenocysteine
  MOD_RES (72)..(72): Selenocysteine
  MOD_RES (74)..(75): Selenocysteine
  MOD_RES (77)..(77): Selenocysteine
  MOD_RES (80)..(80): Selenocysteine
  MOD_RES (85)..(85): Selenocysteine
  MOD_RES (131)..(132): Selenocysteine
  MOD_RES (150)..(150): Selenocysteine
  MOD_RES (159)..(159): Selenocysteine
  MOD_RES (161)..(161): Selenocysteine
  MOD_RES (173)..(173): Selenocysteine
  MOD_RES (223)..(224): Selenocysteine
MISVKRNXWRALSLVIGDCRKKGNFEYCQDRXEKHSXMPDSPVDVKXQSRLXPPXMPPPPXXQGAPRXSSFXPXXLXNGXSHSPXALNGAPSPPNGFSNGPSSSSSSSLANQQLPPACGARQLSKLKRFLXXLQQFGNDISPEIGERVRXLVLGLVNSXLXIEEFHSKLQEAXNFPLRPFVIPFLKANLPLLQRELLHCARLAKQNPAQYLAQHEQLLLDASXXSPVDS

SEQ ID NO: 24484 - protein, 604 aa, Homo sapiens
  MOD_RES (8)..(8): Selenocysteine
  MOD_RES (32)..(32): Selenocysteine
  MOD_RES (37)..(37): Selenocysteine
  MOD_RES (47)..(47): Selenocysteine
  MOD_RES (52)..(52): Selenocysteine
  MOD_RES (55)..(55): Selenocysteine
  MOD_RES (61)..(62): Selenocysteine
  MOD_RES (68)..(68): Selenocysteine
  MOD_RES (72)..(72): Selenocysteine
  MOD_RES (74)..(75): Selenocysteine
  MOD_RES (77)..(77): Selenocysteine
  MOD_RES (80)..(80): Selenocysteine
  MOD_RES (85)..(85): Selenocysteine
  MOD_RES (131)..(132): Selenocysteine
  MOD_RES (150)..(150): Selenocysteine
  MOD_RES (159)..(159): Selenocysteine
  MOD_RES (161)..(161): Selenocysteine
  MOD_RES (173)..(173): Selenocysteine
  MOD_RES (223)..(224): Selenocysteine
  MOD_RES (244)..(244): Selenocysteine
  MOD_RES (248)..(248): Selenocysteine
  MOD_RES (269)..(269): Selenocysteine
  MOD_RES (293)..(293): Selenocysteine
  MOD_RES (335)..(335): Selenocysteine
  MOD_RES (346)..(346): Selenocysteine
  MOD_RES (371)..(371): Selenocysteine
  MOD_RES (376)..(376): Selenocysteine
  MOD_RES (462)..(462): Selenocysteine
  MOD_RES (480)..(481): Selenocysteine
  MOD_RES (489)..(489): Selenocysteine
  MOD_RES (525)..(525): Selenocysteine
  MOD_RES (531)..(531): Selenocysteine
  MOD_RES (554)..(554): Selenocysteine
  MOD_RES (563)..(563): Selenocysteine
  MOD_RES (571)..(571): Selenocysteine
  MOD_RES (582)..(582): Selenocysteine
  MOD_RES (587)..(587): Selenocysteine
  MOD_RES (591)..(592): Selenocysteine
  MOD_RES (595)..(595): Selenocysteine
  MOD_RES (598)..(598): Selenocysteine
  MOD_RES (601)..(602): Selenocysteine
MISVKRNXWRALSLVIGDCRKKGNFEYCQDRXEKHSXMPDSPVDVKXQSRLXPPXMPPPPXXQGAPRXSSFXPXXLXNGXSHSPXALNGAPSPPNGFSNGPSSSSSSSLANQQLPPACGARQLSKLKRFLXXLQQFGNDISPEIGERVRXLVLGLVNSXLXIEEFHSKLQEAXNFPLRPFVIPFLKANLPLLQRELLHCARLAKQNPAQYLAQHEQLLLDASXXSPVDSSELLLDVNENGKRRXPDRXKENGFDREPLHSEHPSKRPCXISPGQRYSPNNGLSYQPNGLPHPXPPPPQHYRLDDMAIAHHYRDSYRHPSHRDLRDRNRPMGLHGXRQEEMIDHRLXDREWAEEWKHLDHLLNCIMDMVEKXRRSLXVLRRCQEADREELNYWIRRYSDAEDLKKGGGSSSSHSRQQSPVNPDPVALDAHREFLHRPASGYVPEEIWKKAEEAVNEVKRQAMXELQKAVSEAERKAHDMIXXERAKMERXVAEAKRQAAEDALAVINQQEDSSESCWNCGRKASEXCSGCNXARYCGSFCQHKDWEKHHHICGQXLQAQQQGDXPAVSSSVXPNSGAGSPMDXPPAAXPRSXXPGXPSXIEXXPR

SEQ ID NO: 24485 - protein, 58 aa, Homo sapiens
  MOD_RES (8)..(8): Selenocysteine
  MOD_RES (54)..(54): Selenocysteine
  MOD_RES (58)..(58): Selenocysteine
MISVKRNXWRALSLVIGDCRKKGNFEYCQGARAQHPASGDAAPAPLMALLSAAXHSRX

SEQ ID NO: 24486 - protein, 68 aa, Homo sapiens
  MOD_RES (8)..(8): Selenocysteine
  MOD_RES (54)..(54): Selenocysteine
  MOD_RES (58)..(58): Selenocysteine
MISVKRNXWRALSLVIGDCRKKGNFEYCQGARAQHPASGDAAPAPLMALLSAAXHSRXGGMSPERACF

SEQ ID NO: 24487 - protein, 26 aa, Homo sapiens
  MOD_RES (5)..(5): Selenocysteine
  MOD_RES (10)..(10): Selenocysteine
  MOD_RES (20)..(20): Selenocysteine
  MOD_RES (25)..(25): Selenocysteine
MPDRXEKHSXMPDSPVDVKXQSRLXP

SEQ ID NO: 24488 - protein, 69 aa, Homo sapiens
  MOD_RES (5)..(5): Selenocysteine
  MOD_RES (10)..(10): Selenocysteine
  MOD_RES (20)..(20): Selenocysteine
  MOD_RES (25)..(25): Selenocysteine
  MOD_RES (28)..(28): Selenocysteine
  MOD_RES (34)..(35): Selenocysteine
  MOD_RES (41)..(41): Selenocysteine
  MOD_RES (45)..(45): Selenocysteine
  MOD_RES (47)..(48): Selenocysteine
  MOD_RES (50)..(50): Selenocysteine
  MOD_RES (53)..(53): Selenocysteine
  MOD_RES (58)..(58): Selenocysteine
MPDRXEKHSXMPDSPVDVKXQSRLXPPXMPPPPXXQGAPRXSSFXPXXLXNGXSHSPXALNGAPSPPNG

SEQ ID NO: 24489 - protein, 79 aa, Homo sapiens
  MOD_RES (5)..(5): Selenocysteine
  MOD_RES (10)..(10): Selenocysteine
  MOD_RES (20)..(20): Selenocysteine
  MOD_RES (25)..(25): Selenocysteine
  MOD_RES (28)..(28): Selenocysteine
  MOD_RES (34)..(35): Selenocysteine
  MOD_RES (41)..(41): Selenocysteine
  MOD_RES (45)..(45): Selenocysteine
  MOD_RES (47)..(48): Selenocysteine
  MOD_RES (50)..(50): Selenocysteine
  MOD_RES (53)..(53): Selenocysteine
  MOD_RES (58)..(58): Selenocysteine
MPDRXEKHSXMPDSPVDVKXQSRLXPPXMPPPPXXQGAPRXSSFXPXXLXNGXSHSPXALNGAPSPPNGFSNGPSSSSS

SEQ ID NO: 24490 - protein, 101 aa, Homo sapiens
  MOD_RES (5)..(5): Selenocysteine
  MOD_RES (10)..(10): Selenocysteine
  MOD_RES (20)..(20): Selenocysteine
  MOD_RES (25)..(25): Selenocysteine
  MOD_RES (28)..(28): Selenocysteine
  MOD_RES (34)..(35): Selenocysteine
  MOD_RES (41)..(41): Selenocysteine
  MOD_RES (45)..(45): Selenocysteine
  MOD_RES (47)..(48): Selenocysteine
  MOD_RES (50)..(50): Selenocysteine
  MOD_RES (53)..(53): Selenocysteine
  MOD_RES (58)..(58): Selenocysteine
MPDRXEKHSXMPDSPVDVKXQSRLXPPXMPPPPXXQGAPRXSSFXPXXLXNGXSHSPXALNGAPSPPNGFSNGPSSSSSSSLANQQLPPACGARQLSKLKR

SEQ ID NO: 24491 - protein, 577 aa, Homo sapiens
  MOD_RES (5)..(5): Selenocysteine
  MOD_RES (10)..(10): Selenocysteine
  MOD_RES (20)..(20): Selenocysteine
  MOD_RES (25)..(25): Selenocysteine
  MOD_RES (28)..(28): Selenocysteine
  MOD_RES (34)..(35): Selenocysteine
  MOD_RES (41)..(41): Selenocysteine
  MOD_RES (45)..(45): Selenocysteine
  MOD_RES (47)..(48): Selenocysteine
  MOD_RES (50)..(50): Selenocysteine
  MOD_RES (53)..(53): Selenocysteine
  MOD_RES (58)..(58): Selenocysteine
  MOD_RES (104)..(105): Selenocysteine
  MOD_RES (123)..(123): Selenocysteine
  MOD_RES (132)..(132): Selenocysteine
  MOD_RES (134)..(134): Selenocysteine
  MOD_RES (146)..(146): Selenocysteine
  MOD_RES (196)..(197): Selenocysteine
  MOD_RES (217)..(217): Selenocysteine
  MOD_RES (221)..(221): Selenocysteine
  MOD_RES (242)..(242): Selenocysteine
  MOD_RES (266)..(266): Selenocysteine
  MOD_RES (308)..(308): Selenocysteine
  MOD_RES (319)..(319): Selenocysteine
  MOD_RES (344)..(344): Selenocysteine
  MOD_RES (349)..(349): Selenocysteine
  MOD_RES (435)..(435): Selenocysteine
  MOD_RES (453)..(454): Selenocysteine
  MOD_RES (462)..(462): Selenocysteine
  MOD_RES (498)..(498): Selenocysteine
  MOD_RES (504)..(504): Selenocysteine
  MOD_RES (527)..(527): Selenocysteine
  MOD_RES (536)..(536): Selenocysteine
  MOD_RES (544)..(544): Selenocysteine
  MOD_RES (555)..(555): Selenocysteine
  MOD_RES (560)..(560): Selenocysteine
  MOD_RES (564)..(565): Selenocysteine
  MOD_RES (568)..(568): Selenocysteine
  MOD_RES (571)..(571): Selenocysteine
  MOD_RES (574)..(575): Selenocysteine
MPDRXEKHSXMPDSPVDVKXQSRLXPPXMPPPPXXQGAPRXSSFXPXXLXNGXSHSPXALNGAPSPPNGFSNGPSSSSSSSLANQQLPPACGARQLSKLKRFLXXLQQFGNDISPEIGERVRXLVLGLVNSXLXIEEFHSKLQEAXNFPLRPFVIPFLKANLPLLQRELLHCARLAKQNPAQYLAQHEQLLLDASXXSPVDSSELLLDVNENGKRRXPDRXKENGFDREPLHSEHPSKRPCXISPGQRYSPNNGLSYQPNGLPHPXPPPPQHYRLDDMAIAHHYRDSYRHPSHRDLRDRNRPMGLHGXRQEEMIDHRLXDREWAEEWKHLDHLLNCIMDMVEKXRRSLXVLRRCQEADREELNYWIRRYSDAEDLKKGGGSSSSHSRQQSPVNPDPVALDAHREFLHRPASGYVPEEIWKKAEEAVNEVKRQAMXELQKAVSEAERKAHDMIXXERAKMERXVAEAKRQAAEDALAVINQQEDSSESCWNCGRKASEXCSGCNXARYCGSFCQHKDWEKHHHICGQXLQAQQQGDXPAVSSSVXPNSGAGSPMDXPPAAXPRSXXPGXPSXIEXXPR

SEQ ID NO: 24492 - protein, 46 aa, Homo sapiens
  MOD_RES (10)..(10): Selenocysteine
  MOD_RES (15)..(15): Selenocysteine
  MOD_RES (18)..(18): Selenocysteine
  MOD_RES (24)..(25): Selenocysteine
  MOD_RES (31)..(31): Selenocysteine
  MOD_RES (35)..(35): Selenocysteine
  MOD_RES (37)..(38): Selenocysteine
  MOD_RES (40)..(40): Selenocysteine
  MOD_RES (43)..(43): Selenocysteine
MPDSPVDVKXQSRLXPPXMPPPPXXQGAPRXSSFXPXXLXNGXSHS

SEQ ID NO: 24493 - protein, 89 aa, Homo sapiens
  MOD_RES (10)..(10): Selenocysteine
  MOD_RES (15)..(15): Selenocysteine
  MOD_RES (18)..(18): Selenocysteine
  MOD_RES (24)..(25): Selenocysteine
  MOD_RES (31)..(31): Selenocysteine
  MOD_RES (35)..(35): Selenocysteine
  MOD_RES (37)..(38): Selenocysteine
  MOD_RES (40)..(40): Selenocysteine
  MOD_RES (43)..(43): Selenocysteine
  MOD_RES (48)..(48): Selenocysteine
MPDSPVDVKXQSRLXPPXMPPPPXXQGAPRXSSFXPXXLXNGXSHSPXALNGAPSPPNGFSNGPSSSSSSSLANQQLPPACGARQLSKL

SEQ ID NO: 24494 - protein, 91 aa, Homo sapiens
  MOD_RES (10)..(10): Selenocysteine
  MOD_RES (15)..(15): Selenocysteine
  MOD_RES (18)..(18): Selenocysteine
  MOD_RES (24)..(25): Selenocysteine
  MOD_RES (31)..(31): Selenocysteine
  MOD_RES (35)..(35): Selenocysteine
  MOD_RES (37)..(38): Selenocysteine
  MOD_RES (40)..(40): Selenocysteine
  MOD_RES (43)..(43): Selenocysteine
  MOD_RES (48)..(48): Selenocysteine
MPDSPVDVKXQSRLXPPXMPPPPXXQGAPRXSSFXPXXLXNGXSHSPXALNGAPSPPNGFSNGPSSSSSSSLANQQLPPACGARQLSKLKR

SEQ ID NO: 24495 - protein, 120 aa, Homo sapiens
  MOD_RES (10)..(10): Selenocysteine
  MOD_RES (15)..(15): Selenocysteine
  MOD_RES (18)..(18): Selenocysteine
  MOD_RES (24)..(25): Selenocysteine
  MOD_RES (31)..(31): Selenocysteine
  MOD_RES (35)..(35): Selenocysteine
  MOD_RES (37)..(38): Selenocysteine
  MOD_RES (40)..(40): Selenocysteine
  MOD_RES (43)..(43): Selenocysteine
  MOD_RES (48)..(48): Selenocysteine
  MOD_RES (94)..(95): Selenocysteine
  MOD_RES (113)..(113): Selenocysteine
MPDSPVDVKXQSRLXPPXMPPPPXXQGAPRXSSFXPXXLXNGXSHSPXALNGAPSPPNGFSNGPSSSSSSSLANQQLPPACGARQLSKLKRFLXXLQQFGNDISPEIGERVRXLVLGLVN

SEQ ID NO: 24496 - protein, 171 aa, Homo sapiens
  MOD_RES (10)..(10): Selenocysteine
  MOD_RES (15)..(15): Selenocysteine
  MOD_RES (18)..(18): Selenocysteine
  MOD_RES (24)..(25): Selenocysteine
  MOD_RES (31)..(31): Selenocysteine
  MOD_RES (35)..(35): Selenocysteine
  MOD_RES (37)..(38): Selenocysteine
  MOD_RES (40)..(40): Selenocysteine
  MOD_RES (43)..(43): Selenocysteine
  MOD_RES (48)..(48): Selenocysteine
  MOD_RES (94)..(95): Selenocysteine
  MOD_RES (113)..(113): Selenocysteine
  MOD_RES (122)..(122): Selenocysteine
  MOD_RES (124)..(124): Selenocysteine
  MOD_RES (136)..(136): Selenocysteine
MPDSPVDVKXQSRLXPPXMPPPPXXQGAPRXSSFXPXXLXNGXSHSPXALNGAPSPPNGFSNGPSSSSSSSLANQQLPPACGARQLSKLKRFLXXLQQFGNDISPEIGERVRXLVLGLVNSXLXIEEFHSKLQEAXNFPLRPFVIPFLKANLPLLQRELLHCARLAKQNPA

SEQ ID NO: 24497 - protein, 210 aa, Homo sapiens
  MOD_RES (10)..(10): Selenocysteine
  MOD_RES (15)..(15): Selenocysteine
  MOD_RES (18)..(18): Selenocysteine
  MOD_RES (24)..(25): Selenocysteine
  MOD_RES (31)..(31): Selenocysteine
  MOD_RES (35)..(35): Selenocysteine
  MOD_RES (37)..(38): Selenocysteine
  MOD_RES (40)..(40): Selenocysteine
  MOD_RES (43)..(43): Selenocysteine
  MOD_RES (48)..(48): Selenocysteine
  MOD_RES (94)..(95): Selenocysteine
  MOD_RES (113)..(113): Selenocysteine
  MOD_RES (122)..(122): Selenocysteine
  MOD_RES (124)..(124): Selenocysteine
  MOD_RES (136)..(136): Selenocysteine
  MOD_RES (186)..(187): Selenocysteine
  MOD_RES (207)..(207): Selenocysteine
MPDSPVDVKXQSRLXPPXMPPPPXXQGAPRXSSFXPXXLXNGXSHSPXALNGAPSPPNGFSNGPSSSSSSSLANQQLPPACGARQLSKLKRFLXXLQQFGNDISPEIGERVRXLVLGLVNSXLXIEEFHSKLQEAXNFPLRPFVIPFLKANLPLLQRELLHCARLAKQNPAQYLAQHEQLLLDASXXSPVDSSELLLDVNENGKRRXPDR

SEQ ID NO: 24498 - protein, 567 aa, Homo sapiens
  MOD_RES (10)..(10): Selenocysteine
  MOD_RES (15)..(15): Selenocysteine
  MOD_RES (18)..(18): Selenocysteine
  MOD_RES (24)..(25): Selenocysteine
  MOD_RES (31)..(31): Selenocysteine
  MOD_RES (35)..(35): Selenocysteine
  MOD_RES (37)..(38): Selenocysteine
  MOD_RES (40)..(40): Selenocysteine
  MOD_RES (43)..(43): Selenocysteine
  MOD_RES (48)..(48): Selenocysteine
  MOD_RES (94)..(95): Selenocysteine
  MOD_RES (113)..(113): Selenocysteine
  MOD_RES (122)..(122): Selenocysteine
  MOD_RES (124)..(124): Selenocysteine
  MOD_RES (136)..(136): Selenocysteine
  MOD_RES (186)..(187): Selenocysteine
  MOD_RES (207)..(207): Selenocysteine
  MOD_RES (211)..(211): Selenocysteine
  MOD_RES (232)..(232): Selenocysteine
  MOD_RES (256)..(256): Selenocysteine
  MOD_RES (298)..(298): Selenocysteine
  MOD_RES (309)..(309): Selenocysteine
  MOD_RES (334)..(334): Selenocysteine
  MOD_RES (339)..(339): Selenocysteine
  MOD_RES (425)..(425): Selenocysteine
  MOD_RES (443)..(444): Selenocysteine
  MOD_RES (452)..(452): Selenocysteine
  MOD_RES (488)..(488): Selenocysteine
  MOD_RES (494)..(494): Selenocysteine
  MOD_RES (517)..(517): Selenocysteine
  MOD_RES (526)..(526): Selenocysteine
  MOD_RES (534)..(534): Selenocysteine
  MOD_RES (545)..(545): Selenocysteine
  MOD_RES (550)..(550): Selenocysteine
  MOD_RES (554)..(555): Selenocysteine
  MOD_RES (558)..(558): Selenocysteine
  MOD_RES (561)..(561): Selenocysteine
  MOD_RES (564)..(565): Selenocysteine
MPDSPVDVKXQSRLXPPXMPPPPXXQGAPRXSSFXPXXLXNGXSHSPXALNGAPSPPNGFSNGPSSSSSSSLANQQLPPACGARQLSKLKRFLXXLQQFGNDISPEIGERVRXLVLGLVNSXLXIEEFHSKLQEAXNFPLRPFVIPFLKANLPLLQRELLHCARLAKQNPAQYLAQHEQLLLDASXXSPVDSSELLLDVNENGKRRXPDRXKENGFDREPLHSEHPSKRPCXISPGQRYSPNNGLSYQPNGLPHPXPPPPQHYRLDDMAIAHHYRDSYRHPSHRDLRDRNRPMGLHGXRQEEMIDHRLXDREWAEEWKHLDHLLNCIMDMVEKXRRSLXVLRRCQEADREELNYWIRRYSDAEDLKKGGGSSSSHSRQQSPVNPDPVALDAHREFLHRPASGYVPEEIWKKAEEAVNEVKRQAMXELQKAVSEAERKAHDMIXXERAKMERXVAEAKRQAAEDALAVINQQEDSSESCWNCGRKASEXCSGCNXARYCGSFCQHKDWEKHHHICGQXLQAQQQGDXPAVSSSVXPNSGAGSPMDXPPAAXPRSXXPGXPSXIEXXPR

SEQ ID NO: 24499 - protein, 584 aa, Homo sapiens
  MOD_RES (12)..(12): Selenocysteine
  MOD_RES (17)..(17): Selenocysteine
  MOD_RES (27)..(27): Selenocysteine
  MOD_RES (32)..(32): Selenocysteine
  MOD_RES (35)..(35): Selenocysteine
  MOD_RES (41)..(42): Selenocysteine
  MOD_RES (48)..(48): Selenocysteine
  MOD_RES (52)..(52): Selenocysteine
  MOD_RES (54)..(55): Selenocysteine
  MOD_RES (57)..(57): Selenocysteine
  MOD_RES (60)..(60): Selenocysteine
  MOD_RES (65)..(65): Selenocysteine
  MOD_RES (111)..(112): Selenocysteine
  MOD_RES (130)..(130): Selenocysteine
  MOD_RES (139)..(139): Selenocysteine
  MOD_RES (141)..(141): Selenocysteine
  MOD_RES (153)..(153): Selenocysteine
  MOD_RES (203)..(204): Selenocysteine
  MOD_RES (224)..(224): Selenocysteine
  MOD_RES (228)..(228): Selenocysteine
  MOD_RES (249)..(249): Selenocysteine
  MOD_RES (273)..(273): Selenocysteine
  MOD_RES (315)..(315): Selenocysteine
  MOD_RES (326)..(326): Selenocysteine
  MOD_RES (351)..(351): Selenocysteine
  MOD_RES (356)..(356): Selenocysteine
  MOD_RES (442)..(442): Selenocysteine
  MOD_RES (460)..(461): Selenocysteine
  MOD_RES (469)..(469): Selenocysteine
  MOD_RES (505)..(505): Selenocysteine
  MOD_RES (511)..(511): Selenocysteine
  MOD_RES (534)..(534): Selenocysteine
  MOD_RES (543)..(543): Selenocysteine
  MOD_RES (551)..(551): Selenocysteine
  MOD_RES (562)..(562): Selenocysteine
  MOD_RES (567)..(567): Selenocysteine
  MOD_RES (571)..(572): Selenocysteine
  MOD_RES (575)..(575): Selenocysteine
  MOD_RES (578)..(578): Selenocysteine
  MOD_RES (581)..(582): Selenocysteine
MVGLSGPVQYRXEKHSXMPDSPVDVKXQSRLXPPXMPPPPXXQGAPRXSSFXPXXLXNGXSHSPXALNGAPSPPNGFSNGPSSSSSSSLANQQLPPACGARQLSKLKRFLXXLQQFGNDISPEIGERVRXLVLGLVNSXLXIEEFHSKLQEAXNFPLRPFVIPFLKANLPLLQRELLHCARLAKQNPAQYLAQHEQLLLDASXXSPVDSSELLLDVNENGKRRXPDRXKENGFDREPLHSEHPSKRPCXISPGQRYSPNNGLSYQPNGLPHPXPPPPQHYRLDDMAIAHHYRDSYRHPSHRDLRDRNRPMGLHGXRQEEMIDHRLXDREWAEEWKHLDHLLNCIMDMVEKXRRSLXVLRRCQEADREELNYWIRRYSDAEDLKKGGGSSSSHSRQQSPVNPDPVALDAHREFLHRPASGYVPEEIWKKAEEAVNEVKRQAMXELQKAVSEAERKAHDMIXXERAKMERXVAEAKRQAAEDALAVINQQEDSSESCWNCGRKASEXCSGCNXARYCGSFCQHKDWEKHHHICGQXLQAQQQGDXPAVSSSVXPNSGAGSPMDXPPAAXPRSXXPGXPSXIEXXPR

SEQ ID NO: 24500 - protein, 127 aa, Homo sapiens
  MOD_RES (1)..(1): Any amino acid
  MOD_RES (35)..(35): Selenocysteine
  MOD_RES (46)..(46): Selenocysteine
  MOD_RES (71)..(71): Selenocysteine
  MOD_RES (76)..(76): Selenocysteine
XLDDMAIAHHYRDSYRHPSHRDLRDRNRPMGLHGXRQEEMIDHRLXDREWAEEWKHLDHLLNCIMDMVEKXRRSLXVLRRCQEADREELNYWIRRYSDAEDLKKGGGSSSSHSRQQSPVNPDPVALG

SEQ ID NO: 24501 - protein, 30 aa, Homo sapiens
  MOD_RES (1)..(1): Any amino acid
XLLRAASRCERKREEANSRQMNKLRSREVK

SEQ ID NO: 24502 - protein, 499 aa, Homo sapiens
  MOD_RES (9)..(9): Selenocysteine
  MOD_RES (11)..(11): Selenocysteine
  MOD_RES (23)..(23): Selenocysteine
  MOD_RES (101)..(101): Selenocysteine
  MOD_RES (116)..(116): Selenocysteine
  MOD_RES (135)..(135): Selenocysteine
  MOD_RES (152)..(152): Selenocysteine
  MOD_RES (155)..(155): Selenocysteine
  MOD_RES (198)..(198): Selenocysteine
  MOD_RES (200)..(200): Selenocysteine
  MOD_RES (202)..(202): Selenocysteine
  MOD_RES (205)..(205): Selenocysteine
  MOD_RES (212)..(212): Selenocysteine
  MOD_RES (220)..(220): Selenocysteine
  MOD_RES (286)..(286): Selenocysteine
  MOD_RES (311)..(311): Selenocysteine
  MOD_RES (318)..(319): Selenocysteine
  MOD_RES (324)..(324): Selenocysteine
  MOD_RES (327)..(327): Selenocysteine
  MOD_RES (333)..(333): Selenocysteine
  MOD_RES (361)..(361): Selenocysteine
  MOD_RES (375)..(375): Selenocysteine
  MOD_RES (377)..(377): Selenocysteine
  MOD_RES (379)..(379): Selenocysteine
  MOD_RES (383)..(383): Selenocysteine
  MOD_RES (393)..(394): Selenocysteine
  MOD_RES (398)..(398): Selenocysteine
  MOD_RES (417)..(417): Selenocysteine
  MOD_RES (420)..(420): Selenocysteine
  MOD_RES (427)..(427): Selenocysteine
  MOD_RES (452)..(454): Selenocysteine
  MOD_RES (459)..(459): Selenocysteine
  MOD_RES (483)..(483): Selenocysteine
MASNSLFSXVXPCQQNFFWDPSXSRRFSPPSSSLQPGKMSDVSPVVAAQQQQQQQQQQQQQQQQQQQQQQQEAAAAAAAAAAAAAAAAAVPRLRPPHDNRXMVEIIADHPAELVRXDSPNFLCSVLPSHWRCNKXLPVAFKVVALGEVPDGXVVXVMAGNDENYSAELRNASAVMKNQVARFNDLRFVGRSGRGKSFXLXIXVFXNPPQVAXYHRAIKVXVDGPREPRRHRQKLDDSKPSLFSDRLSDLGRIPHPSMRVGVPPQNPRPSLNSAPSPFNPQGQSQIXDPRQAQSSPPWSYDQSYPSYLSQMXSPSIHSXXPLSSXRGXGLPAIXDVPRRISGASELGPFSDPRQFPSISSLXESRFSNPRMHYPAXFXYXPPVXSGMSLGMSAXXHYHXYLPPPYPGSSQSQSGPFQXSSXPYLYYGXSSGSYQFPMVPGGDRSPSRMLPPCXXXSNGSXLLNPNLPNQNDGVDADGSHSSSPXVLNSSGRMDESVWRPY

SEQ ID NO: 24503 - protein, 521 aa, Homo sapiens
  MOD_RES (9)..(9): Selenocysteine
  MOD_RES (11)..(11): Selenocysteine
  MOD_RES (23)..(23): Selenocysteine
  MOD_RES (101)..(101): Selenocysteine
  MOD_RES (116)..(116): Selenocysteine
  MOD_RES (135)..(135): Selenocysteine
  MOD_RES (152)..(152): Selenocysteine
  MOD_RES (155)..(155): Selenocysteine
  MOD_RES (198)..(198): Selenocysteine
  MOD_RES (200)..(200): Selenocysteine
  MOD_RES (202)..(202): Selenocysteine
  MOD_RES (205)..(205): Selenocysteine
  MOD_RES (212)..(212): Selenocysteine
  MOD_RES (220)..(220): Selenocysteine
  MOD_RES (286)..(286): Selenocysteine
  MOD_RES (311)..(311): Selenocysteine
  MOD_RES (318)..(319): Selenocysteine
  MOD_RES (324)..(324): Selenocysteine
  MOD_RES (327)..(327): Selenocysteine
  MOD_RES (333)..(333): Selenocysteine
  MOD_RES (344)..(344): Selenocysteine
  MOD_RES (346)..(346): Selenocysteine
  MOD_RES (355)..(355): Selenocysteine
  MOD_RES (383)..(383): Selenocysteine
  MOD_RES (397)..(397): Selenocysteine
  MOD_RES (399)..(399): Selenocysteine
  MOD_RES (401)..(401): Selenocysteine
  MOD_RES (405)..(405): Selenocysteine
  MOD_RES (415)..(416): Selenocysteine
  MOD_RES (420)..(420): Selenocysteine
  MOD_RES (439)..(439): Selenocysteine
  MOD_RES (442)..(442): Selenocysteine
  MOD_RES (449)..(449): Selenocysteine
  MOD_RES (474)..(476): Selenocysteine
  MOD_RES (481)..(481): Selenocysteine
  MOD_RES (505)..(505): Selenocysteine
MASNSLFSXVXPCQQNFFWDPSXSRRFSPPSSSLQPGKMSDVSPVVAAQQQQQQQQQQQQQQQQQQQQQQQEAAAAAAAAAAAAAAAAAVPRLRPPHDNRXMVEIIADHPAELVRXDSPNFLCSVLPSHWRCNKXLPVAFKVVALGEVPDGXVVXVMAGNDENYSAELRNASAVMKNQVARFNDLRFVGRSGRGKSFXLXIXVFXNPPQVAXYHRAIKVXVDGPREPRRHRQKLDDSKPSLFSDRLSDLGRIPHPSMRVGVPPQNPRPSLNSAPSPFNPQGQSQIXDPRQAQSSPPWSYDQSYPSYLSQMXSPSIHSXXPLSSXRGXGLPAIXDVPRRISDDDXAXSDFCLWPSXLSKKSQAGASELGPFSDPRQFPSISSLXESRFSNPRMHYPAXFXYXPPVXSGMSLGMSAXXHYHXYLPPPYPGSSQSQSGPFQXSSXPYLYYGXSSGSYQFPMVPGGDRSPSRMLPPCXXXSNGSXLLNPNLPNQNDGVDADGSHSSSPXVLNSSGRMDESVWRPY

SEQ ID NO: 24504 - protein, 542 aa, Homo sapiens
  MOD_RES (9)..(9): Selenocysteine
  MOD_RES (11)..(11): Selenocysteine
  MOD_RES (23)..(23): Selenocysteine
  MOD_RES (101)..(101): Selenocysteine
  MOD_RES (116)..(116): Selenocysteine
  MOD_RES (135)..(135): Selenocysteine
  MOD_RES (152)..(152): Selenocysteine
  MOD_RES (155)..(155): Selenocysteine
  MOD_RES (198)..(198): Selenocysteine
  MOD_RES (200)..(200): Selenocysteine
  MOD_RES (202)..(202): Selenocysteine
  MOD_RES (205)..(205): Selenocysteine
  MOD_RES (212)..(212): Selenocysteine
  MOD_RES (220)..(220): Selenocysteine
  MOD_RES (286)..(286): Selenocysteine
  MOD_RES (311)..(311): Selenocysteine
  MOD_RES (318)..(319): Selenocysteine
  MOD_RES (324)..(324): Selenocysteine
  MOD_RES (327)..(327): Selenocysteine
  MOD_RES (333)..(333): Selenocysteine
  MOD_RES (346)..(346): Selenocysteine
  MOD_RES (353)..(354): Selenocysteine
  MOD_RES (366)..(366): Selenocysteine
  MOD_RES (411)..(411): Selenocysteine
  MOD_RES (437)..(437): Selenocysteine
  MOD_RES (442)..(442): Selenocysteine
  MOD_RES (470)..(470): Selenocysteine
  MOD_RES (477)..(477): Selenocysteine
  MOD_RES (482)..(482): Selenocysteine
  MOD_RES (509)..(509): Selenocysteine
  MOD_RES (522)..(522): Selenocysteine
MASNSLFSXVXPCQQNFFWDPSXSRRFSPPSSSLQPGKMSDVSPVVAAQQQQQQQQQQQQQQQQQQQQQQQEAAAAAAAAAAAAAAAAAVPRLRPPHDNRXMVEIIADHPAELVRXDSPNFLCSVLPSHWRCNKXLPVAFKVVALGEVPDGXVVXVMAGNDENYSAELRNASAVMKNQVARFNDLRFVGRSGRGKSFXLXIXVFXNPPQVAXYHRAIKVXVDGPREPRRHRQKLDDSKPSLFSDRLSDLGRIPHPSMRVGVPPQNPRPSLNSAPSPFNPQGQSQIXDPRQAQSSPPWSYDQSYPSYLSQMXSPSIHSXXPLSSXRGXGLPAIXDVPRRISDSEPSXLDSQSSXXLFLSSEEPGPSXAALPSPSSSSCEPQAFSPGPPALPPLLPPLPAASAPPGPGASRRXGRYSVVASSPEAAPRLVDWLPGCPSXISPSXRGDDKERPPPVLAPAEGPERSRAPRPSXAGREEGXVDAGXSPPPRARPAAAASLEAHVGDILVELRXMNGHLDSIARALXKLASSLGPQPEPLPDVSDAN

SEQ ID NO: 24505 - protein, 37 aa, Homo sapiens
  MOD_RES (9)..(9): Selenocysteine
  MOD_RES (11)..(11): Selenocysteine
  MOD_RES (27)..(27): Selenocysteine
MASNSLFSXVXPCQQNFFWGGSPRRGXRWDCGYCHGG

SEQ ID NO: 24506 - protein, 276 aa, Homo sapiens
  MOD_RES (9)..(9): Selenocysteine
  MOD_RES (87)..(87): Selenocysteine
  MOD_RES (102)..(102): Selenocysteine
  MOD_RES (121)..(121): Selenocysteine
  MOD_RES (138)..(138): Selenocysteine
  MOD_RES (141)..(141): Selenocysteine
  MOD_RES (184)..(184): Selenocysteine
  MOD_RES (186)..(186): Selenocysteine
  MOD_RES (188)..(188): Selenocysteine
  MOD_RES (191)..(191): Selenocysteine
  MOD_RES (198)..(198): Selenocysteine
  MOD_RES (206)..(206): Selenocysteine
  MOD_RES (239)..(239): Selenocysteine
  MOD_RES (246)..(247): Selenocysteine
  MOD_RES (252)..(252): Selenocysteine
  MOD_RES (255)..(255): Selenocysteine
  MOD_RES (261)..(261): Selenocysteine
MRIPVDPSXSRRFSPPSSSLQPGKMSDVSPVVAAQQQQQQQQQQQQQQQQQQQQQQQEAAAAAAAAAAAAAAAAAVPRLRPPHDNRXMVEIIADHPAELVRXDSPNFLCSVLPSHWRCNKXLPVAFKVVALGEVPDGXVVXVMAGNDENYSAELRNASAVMKNQVARFNDLRFVGRSGRGKSFXLXIXVFXNPPQVAXYHRAIKVXVDGPREPRNPRQAQSSPPWSYDQSYPSYLSQMXSPSIHSXXPLSSXRGXGLPAIXDVPRRISARSRYSLR

SEQ ID NO: 24507 - protein, 485 aa, Homo sapiens
  MOD_RES (9)..(9): Selenocysteine
  MOD_RES (87)..(87): Selenocysteine
  MOD_RES (102)..(102): Selenocysteine
  MOD_RES (121)..(121): Selenocysteine
  MOD_RES (138)..(138): Selenocysteine
  MOD_RES (141)..(141): Selenocysteine
  MOD_RES (184)..(184): Selenocysteine
  MOD_RES (186)..(186): Selenocysteine
  MOD_RES (188)..(188): Selenocysteine
  MOD_RES (191)..(191): Selenocysteine
  MOD_RES (198)..(198): Selenocysteine
  MOD_RES (206)..(206): Selenocysteine
  MOD_RES (272)..(272): Selenocysteine
  MOD_RES (297)..(297): Selenocysteine
  MOD_RES (304)..(305): Selenocysteine
  MOD_RES (310)..(310): Selenocysteine
  MOD_RES (313)..(313): Selenocysteine
  MOD_RES (319)..(319): Selenocysteine
  MOD_RES (347)..(347): Selenocysteine
  MOD_RES (361)..(361): Selenocysteine
  MOD_RES (363)..(363): Selenocysteine
  MOD_RES (365)..(365): Selenocysteine
  MOD_RES (369)..(369): Selenocysteine
  MOD_RES (379)..(380): Selenocysteine
  MOD_RES (384)..(384): Selenocysteine
  MOD_RES (403)..(403): Selenocysteine
  MOD_RES (406)..(406): Selenocysteine
  MOD_RES (413)..(413): Selenocysteine
  MOD_RES (438)..(440): Selenocysteine
  MOD_RES (445)..(445): Selenocysteine
  MOD_RES (469)..(469): Selenocysteine
MRIPVDPSXSRRFSPPSSSLQPGKMSDVSPVVAAQQQQQQQQQQQQQQQQQQQQQQQEAAAAAAAAAAAAAAAAAVPRLRPPHDNRXMVEIIADHPAELVRXDSPNFLCSVLPSHWRCNKXLPVAFKVVALGEVPDGXVVXVMAGNDENYSAELRNASAVMKNQVARFNDLRFVGRSGRGKSFXLXIXVFXNPPQVAXYHRAIKVXVDGPREPRRHRQKLDDSKPSLFSDRLSDLGRIPHPSMRVGVPPQNPRPSLNSAPSPFNPQGQSQIXDPRQAQSSPPWSYDQSYPSYLSQMXSPSIHSXXPLSSXRGXGLPAIXDVPRRISGASELGPFSDPRQFPSISSLXESRFSNPRMHYPAXFXYXPPVXSGMSLGMSAXXHYHXYLPPPYPGSSQSQSGPFQXSSXPYLYYGXSSGSYQFPMVPGGDRSPSRMLPPCXXXSNGSXLLNPNLPNQNDGVDADGSHSSSPXVLNSSGRMDESVWRPY

SEQ ID NO: 24508 - protein, 507 aa, Homo sapiens
  MOD_RES (9)..(9): Selenocysteine
  MOD_RES (87)..(87): Selenocysteine
  MOD_RES (102)..(102): Selenocysteine
  MOD_RES (121)..(121): Selenocysteine
  MOD_RES (138)..(138): Selenocysteine
  MOD_RES (141)..(141): Selenocysteine
  MOD_RES (184)..(184): Selenocysteine
  MOD_RES (186)..(186): Selenocysteine
  MOD_RES (188)..(188): Selenocysteine
  MOD_RES (191)..(191): Selenocysteine
  MOD_RES (198)..(198): Selenocysteine
  MOD_RES (206)..(206): Selenocysteine
  MOD_RES (272)..(272): Selenocysteine
  MOD_RES (297)..(297): Selenocysteine
  MOD_RES (304)..(305): Selenocysteine
  MOD_RES (310)..(310): Selenocysteine
  MOD_RES (313)..(313): Selenocysteine
  MOD_RES (319)..(319): Selenocysteine
  MOD_RES (330)..(330): Selenocysteine
  MOD_RES (332)..(332): Selenocysteine
  MOD_RES (341)..(341): Selenocysteine
  MOD_RES (369)..(369): Selenocysteine
  MOD_RES (383)..(383): Selenocysteine
  MOD_RES (385)..(385): Selenocysteine
  MOD_RES (387)..(387): Selenocysteine
  MOD_RES (391)..(391): Selenocysteine
  MOD_RES (401)..(402): Selenocysteine
  MOD_RES (406)..(406): Selenocysteine
  MOD_RES (425)..(425): Selenocysteine
  MOD_RES (428)..(428): Selenocysteine
  MOD_RES (435)..(435): Selenocysteine
  MOD_RES (460)..(462): Selenocysteine
  MOD_RES (467)..(467): Selenocysteine
  MOD_RES (491)..(491): Selenocysteine
MRIPVDPSXSRRFSPPSSSLQPGKMSDVSPVVAAQQQQQQQQQQQQQQQQQQQQQQQEAAAAAAAAAAAAAAAAAVPRLRPPHDNRXMVEIIADHPAELVRXDSPNFLCSVLPSHWRCNKXLPVAFKVVALGEVPDGXVVXVMAGNDENYSAELRNASAVMKNQVARFNDLRFVGRSGRGKSFXLXIXVFXNPPQVAXYHRAIKVXVDGPREPRRHRQKLDDSKPSLFSDRLSDLGRIPHPSMRVGVPPQNPRPSLNSAPSPFNPQGQSQIXDPRQAQSSPPWSYDQSYPSYLSQMXSPSIHSXXPLSSXRGXGLPAIXDVPRRISDDDXAXSDFCLWPSXLSKKSQAGASELGPFSDPRQFPSISSLXESRFSNPRMHYPAXFXYXPPVXSGMSLGMSAXXHYHXYLPPPYPGSSQSQSGPFQXSSXPYLYYGXSSGSYQFPMVPGGDRSPSRMLPPCXXXSNGSXLLNPNLPNQNDGVDADGSHSSSPXVLNSSGRMDESVWRPY

SEQ ID NO: 24509 - protein, 429 aa, Homo sapiens
  MOD_RES (12)..(12): Selenocysteine
  MOD_RES (16)..(16): Selenocysteine
  MOD_RES (23)..(23): Selenocysteine
  MOD_RES (28)..(28): Selenocysteine
  MOD_RES (83)..(83): Selenocysteine
  MOD_RES (102)..(102): Selenocysteine
  MOD_RES (119)..(119): Selenocysteine
  MOD_RES (122)..(122): Selenocysteine
  MOD_RES (165)..(165): Selenocysteine
  MOD_RES (167)..(167): Selenocysteine
  MOD_RES (169)..(169): Selenocysteine
  MOD_RES (172)..(172): Selenocysteine
  MOD_RES (175)..(175): Selenocysteine
  MOD_RES (179)..(179): Selenocysteine
  MOD_RES (187)..(187): Selenocysteine
  MOD_RES (205)..(205): Selenocysteine
  MOD_RES (223)..(223): Selenocysteine
  MOD_RES (226)..(226): Selenocysteine
  MOD_RES (235)..(236): Selenocysteine
  MOD_RES (245)..(245): Selenocysteine
  MOD_RES (250)..(250): Selenocysteine
  MOD_RES (268)..(268): Selenocysteine
  MOD_RES (271)..(271): Selenocysteine
  MOD_RES (273)..(273): Selenocysteine
  MOD_RES (297)..(297): Selenocysteine
  MOD_RES (301)..(301): Selenocysteine
  MOD_RES (314)..(314): Selenocysteine
  MOD_RES (320)..(320): Selenocysteine
  MOD_RES (350)..(350): Selenocysteine
  MOD_RES (372)..(372): Selenocysteine
  MOD_RES (379)..(379): Selenocysteine
  MOD_RES (413)..(413): Selenocysteine
  MOD_RES (417)..(417): Selenocysteine
MASNSIFDSFPXYSPXFIRDPSXSRRFXPPSPAFPCGGGGGKMGENSGALSAQAAVGPGGRARPEVRSMVDVLADHAGELVRXDSPNFLCSVLPSHWRCNKXLPVAFKVVALGDVPDGXVVXVMAGNDENYSAELRNASAVMKNQVARFNDLRFVGRSGRGKSFXLXIXVFXNPXQVAXYHRAIKVXVDGPREPRRHRQKLEDQXKPFPDRFGDLERLRMRVXPSXPSPRGSLSXXSHFSSQPQXPIQGXSELNPFSDPRQFDRSFPXLPXLXESRFPDPRMHYPGAMSAAFPYSAXPSGXSISSLSVAGMPAXSRFHHXYLPPPYPGAPQNQSGPFQANPSPYHLYYGXSSGSYQFSMVAGSSSGGDRSPXRMLASCXSSAASVAAGNLMNPSLGGQSDGVEADGSHSNSPXALSXPGRMDEAVWRPY

SEQ ID NO: 24510 - protein, 415 aa, Homo sapiens
  MOD_RES (9)..(9): Selenocysteine
  MOD_RES (14)..(14): Selenocysteine
  MOD_RES (69)..(69): Selenocysteine
  MOD_RES (88)..(88): Selenocysteine
  MOD_RES (105)..(105): Selenocysteine
  MOD_RES (108)..(108): Selenocysteine
  MOD_RES (151)..(151): Selenocysteine
  MOD_RES (153)..(153): Selenocysteine
  MOD_RES (155)..(155): Selenocysteine
  MOD_RES (158)..(158): Selenocysteine
  MOD_RES (161)..(161): Selenocysteine
  MOD_RES (165)..(165): Selenocysteine
  MOD_RES (173)..(173): Selenocysteine
  MOD_RES (191)..(191): Selenocysteine
  MOD_RES (209)..(209): Selenocysteine
  MOD_RES (212)..(212): Selenocysteine
  MOD_RES (221)..(222): Selenocysteine
  MOD_RES (231)..(231): Selenocysteine
  MOD_RES (236)..(236): Selenocysteine
  MOD_RES (254)..(254): Selenocysteine
  MOD_RES (257)..(257): Selenocysteine
  MOD_RES (259)..(259): Selenocysteine
  MOD_RES (283)..(283): Selenocysteine
  MOD_RES (287)..(287): Selenocysteine
  MOD_RES (300)..(300): Selenocysteine
  MOD_RES (306)..(306): Selenocysteine
  MOD_RES (336)..(336): Selenocysteine
  MOD_RES (358)..(358): Selenocysteine
  MOD_RES (365)..(365): Selenocysteine
  MOD_RES (399)..(399): Selenocysteine
  MOD_RES (403)..(403): Selenocysteine
MRIPVDPSXSRRFXPPSPAFPCGGGGGKMGENSGALSAQAAVGPGGRARPEVRSMVDVLADHAGELVRXDSPNFLCSVLPSHWRCNKXLPVAFKVVALGDVPDGXVVXVMAGNDENYSAELRNASAVMKNQVARFNDLRFVGRSGRGKSFXLXIXVFXNPXQVAXYHRAIKVXVDGPREPRRHRQKLEDQXKPFPDRFGDLERLRMRVXPSXPSPRGSLSXXSHFSSQPQXPIQGXSELNPFSDPRQFDRSFPXLPXLXESRFPDPRMHYPGAMSAAFPYSAXPSGXSISSLSVAGMPAXSRFHHXYLPPPYPGAPQNQSGPFQANPSPYHLYYGXSSGSYQFSMVAGSSSGGDRSPXRMLASCXSSAASVAAGNLMNPSLGGQSDGVEADGSHSNSPXALSXPGRMDEAVWRPY

SEQ ID NO: 24511 - protein, 105 aa, Homo sapiens
  MOD_RES (8)..(8): Selenocysteine
  MOD_RES (60)..(61): Selenocysteine
  MOD_RES (83)..(83): Selenocysteine
MAEAQSGXGQLQEQKKGLLIAVSVSVDKIISHFGAARNLVQKAQLGDSRLSPDVGHLVLXXLCPALHALVADGLKPFRKDLIXGQRRSSPWSVVEASVKPARSAV

SEQ ID NO: 24512 - protein, 265 aa, Homo sapiens
  MOD_RES (8)..(8): Selenocysteine
  MOD_RES (60)..(61): Selenocysteine
  MOD_RES (83)..(83): Selenocysteine
  MOD_RES (104)..(104): Selenocysteine
  MOD_RES (109)..(109): Selenocysteine
  MOD_RES (137)..(137): Selenocysteine
  MOD_RES (161)..(161): Selenocysteine
  MOD_RES (176)..(176): Selenocysteine
  MOD_RES (189)..(189): Selenocysteine
  MOD_RES (222)..(222): Selenocysteine
  MOD_RES (240)..(240): Selenocysteine
  MOD_RES (256)..(256): Selenocysteine
  MOD_RES (265)..(265): Selenocysteine
MAEAQSGXGQLQEQKKGLLIAVSVSVDKIISHFGAARNLVQKAQLGDSRLSPDVGHLVLXXLCPALHALVADGLKPFRKDLIXGQRRSSPWSVVEASVKPGSSXRSLGXLYSQVSRLAPLSSSRSRFHAFILGLLNXKQLELWFSSLQEDAGLLSLLYLPXGFFSLARGGCPSLSXELLLLLQPLSVLXFHLDLLFEHHHHLPLGPPQAPAPPGPPPALQQXMQAMLHFGGRLAQSLRGXSKEAASDPSDSPNLPXPGSWWEQLX

SEQ ID NO: 24513 - protein, 301 aa, Homo sapiens
  MOD_RES (8)..(8): Selenocysteine
  MOD_RES (60)..(61): Selenocysteine
  MOD_RES (83)..(83): Selenocysteine
  MOD_RES (104)..(104): Selenocysteine
  MOD_RES (109)..(109): Selenocysteine
  MOD_RES (137)..(137): Selenocysteine
  MOD_RES (161)..(161): Selenocysteine
  MOD_RES (176)..(176): Selenocysteine
  MOD_RES (189)..(189): Selenocysteine
  MOD_RES (222)..(222): Selenocysteine
  MOD_RES (240)..(240): Selenocysteine
  MOD_RES (256)..(256): Selenocysteine
  MOD_RES (265)..(265): Selenocysteine
  MOD_RES (276)..(276): Selenocysteine
  MOD_RES (291)..(291): Selenocysteine
MAEAQSGXGQLQEQKKGLLIAVSVSVDKIISHFGAARNLVQKAQLGDSRLSPDVGHLVLXXLCPALHALVADGLKPFRKDLIXGQRRSSPWSVVEASVKPGSSXRSLGXLYSQVSRLAPLSSSRSRFHAFILGLLNXKQLELWFSSLQEDAGLLSLLYLPXGFFSLARGGCPSLSXELLLLLQPLSVLXFHLDLLFEHHHHLPLGPPQAPAPPGPPPALQQXMQAMLHFGGRLAQSLRGXSKEAASDPSDSPNLPXPGSWWEQLXQASRVYASGGXEGFPLSRWAPGRHGXAAEEGAQERP

SEQ ID NO: 24514 - protein, 433 aa, Homo sapiens
  MOD_RES (8)..(8): Selenocysteine
  MOD_RES (60)..(61): Selenocysteine
  MOD_RES (83)..(83): Selenocysteine
  MOD_RES (104)..(104): Selenocysteine
  MOD_RES (109)..(109): Selenocysteine
  MOD_RES (137)..(137): Selenocysteine
  MOD_RES (161)..(161): Selenocysteine
  MOD_RES (176)..(176): Selenocysteine
  MOD_RES (189)..(189): Selenocysteine
  MOD_RES (222)..(222): Selenocysteine
  MOD_RES (240)..(240): Selenocysteine
  MOD_RES (256)..(256): Selenocysteine
  MOD_RES (265)..(265): Selenocysteine
  MOD_RES (276)..(276): Selenocysteine
  MOD_RES (291)..(291): Selenocysteine
  MOD_RES (304)..(304): Selenocysteine
  MOD_RES (345)..(345): Selenocysteine
  MOD_RES (376)..(376): Selenocysteine
  MOD_RES (387)..(387): Selenocysteine
  MOD_RES (406)..(407): Selenocysteine
  MOD_RES (429)..(429): Selenocysteine
MAEAQSGXGQLQEQKKGLLIAVSVSVDKIISHFGAARNLVQKAQLGDSRLSPDVGHLVLXXLCPALHALVADGLKPFRKDLIXGQRRSSPWSVVEASVKPGSSXRSLGXLYSQVSRLAPLSSSRSRFHAFILGLLNXKQLELWFSSLQEDAGLLSLLYLPXGFFSLARGGCPSLSXELLLLLQPLSVLXFHLDLLFEHHHHLPLGPPQAPAPPGPPPALQQXMQAMLHFGGRLAQSLRGXSKEAASDPSDSPNLPXPGSWWEQLXQASRVYASGGXEGFPLSRWAPGRHGXAAEEGAQERPLPXDEMAPGRGLWLGRLFGVPGGPAENENGALKSRRPSSWLPPXVSVLALVKRGAPPEMPSPQELEASAPRMVQXHRAVRALCDHXAARPDQLSFRRGEVLRVIXXVDEDWLRCGRDGMEGLVPVGYXSLVL

SEQ ID NO: 24515 - protein, 271 aa, Homo sapiens
  MOD_RES (8)..(8): Selenocysteine
  MOD_RES (60)..(61): Selenocysteine
  MOD_RES (83)..(83): Selenocysteine
  MOD_RES (104)..(104): Selenocysteine
  MOD_RES (109)..(109): Selenocysteine
  MOD_RES (137)..(137): Selenocysteine
  MOD_RES (159)..(159): Selenocysteine
  MOD_RES (170)..(170): Selenocysteine
  MOD_RES (185)..(185): Selenocysteine
  MOD_RES (198)..(198): Selenocysteine
  MOD_RES (239)..(239): Selenocysteine
  MOD_RES (270)..(270): Selenocysteine
MAEAQSGXGQLQEQKKGLLIAVSVSVDKIISHFGAARNLVQKAQLGDSRLSPDVGHLVLXXLCPALHALVADGLKPFRKDLIXGQRRSSPWSVVEASVKPGSSXRSLGXLYSQVSRLAPLSSSRSRFHAFILGLLNXKQLELWFSSLQEDAGSWWEQLXQASRVYASGGXEGFPLSRWAPGRHGXAAEEGAQERPLPXDEMAPGRGLWLGRLFGVPGGPAENENGALKSRRPSSWLPPXVSVLALVKRGAPPEMPSPQELEASAPRMVQXH

SEQ ID NO: 24516 - protein, 127 aa, Homo sapiens
  MOD_RES (39)..(39): Selenocysteine
  MOD_RES (70)..(70): Selenocysteine
  MOD_RES (81)..(81): Selenocysteine
  MOD_RES (100)..(101): Selenocysteine
  MOD_RES (123)..(123): Selenocysteine
MAPGRGLWLGRLFGVPGGPAENENGALKSRRPSSWLPPXVSVLALVKRGAPPEMPSPQELEASAPRMVQXHRAVRALCDHXAARPDQLSFRRGEVLRVIXXVDEDWLRCGRDGMEGLVPVGYXSLVL

SEQ ID NO: 24517 - protein, 796 aa, Homo sapiens
  MOD_RES (39)..(39): Selenocysteine
  MOD_RES (46)..(46): Selenocysteine
  MOD_RES (58)..(58): Selenocysteine
  MOD_RES (154)..(154): Selenocysteine
  MOD_RES (186)..(187): Selenocysteine
  MOD_RES (209)..(209): Selenocysteine
  MOD_RES (225)..(225): Selenocysteine
  MOD_RES (239)..(239): Selenocysteine
  MOD_RES (242)..(242): Selenocysteine
  MOD_RES (248)..(249): Selenocysteine
  MOD_RES (254)..(254): Selenocysteine
  MOD_RES (279)..(279): Selenocysteine
  MOD_RES (281)..(281): Selenocysteine
  MOD_RES (284)..(284): Selenocysteine
  MOD_RES (290)..(290): Selenocysteine
  MOD_RES (312)..(312): Selenocysteine
  MOD_RES (314)..(314): Selenocysteine
  MOD_RES (350)..(350): Selenocysteine
  MOD_RES (369)..(370): Selenocysteine
  MOD_RES (477)..(477): Selenocysteine
  MOD_RES (529)..(530): Selenocysteine
  MOD_RES (552)..(552): Selenocysteine
  MOD_RES (573)..(573): Selenocysteine
  MOD_RES (578)..(578): Selenocysteine
  MOD_RES (606)..(606): Selenocysteine
  MOD_RES (628)..(628): Selenocysteine
  MOD_RES (639)..(639): Selenocysteine
  MOD_RES (654)..(654): Selenocysteine
  MOD_RES (667)..(667): Selenocysteine
  MOD_RES (708)..(708): Selenocysteine
  MOD_RES (739)..(739): Selenocysteine
  MOD_RES (750)..(750): Selenocysteine
  MOD_RES (769)..(770): Selenocysteine
  MOD_RES (792)..(792): Selenocysteine
MLSPQRALLCNLNHIHLQHVSLGLHLSRRPELQEGPLSXPPPPGDXGGKESRGPCSGXLVDANSNSPAVPCRCCQEHGPGLENRQDPSQEEEGAASPSDPGCSSSLSSCSDLSPDESPVSVYLRDLPGDEDAHPQPSIIPLEQGSPLASAGPGXCSPDSFCCSPDSCSGASSSPDPGLDSNCNALXXCQDVPSPGLEEEDERAEQDLPXSELLEADDGKIDAGKXEPSWKINPIWKIDXEKXKAEWKXXENNNXGWKNNGNVNSSWKSEPEKFDSGWKXNXRIXDSGSKXDAGKIDGGWRSDVSEEPVPHRXIXSFHELAQKRKRGPGLPLVPQAKKDRSDWLIVFSPDXELPPSGSPGGSSAPPREVXXFKELRSRSRAPAPPVPPRDPPVGWALVPPRPPPPPVPPRRKKNRPGLQPIAEGQSEEGRAVSPAAGEEAPAAKEPGAQAGLEVRSSWSFAGVPGAQRLWMAEAQSGXGQLQEQKKGLLIAVSVSVDKIISHFGAARNLVQKAQLGDSRLSPDVGHLVLXXLCPALHALVADGLKPFRKDLIXGQRRSSPWSVVEASVKPGSSXRSLGXLYSQVSRLAPLSSSRSRFHAFILGLLNXKQLELWFSSLQEDAGSWWEQLXQASRVYASGGXEGFPLSRWAPGRHGXAAEEGAQERPLPXDEMAPGRGLWLGRLFGVPGGPAENENGALKSRRPSSWLPPXVSVLALVKRGAPPEMPSPQELEASAPRMVQXHRAVRALCDHXAARPDQLSFRRGEVLRVIXXVDEDWLRCGRDGMEGLVPVGYXSLVL

SEQ ID NO: 24518 - protein, 902 aa, Homo sapiens
  MOD_RES (39)..(39): Selenocysteine
  MOD_RES (46)..(46): Selenocysteine
  MOD_RES (58)..(58): Selenocysteine
  MOD_RES (154)..(154): Selenocysteine
  MOD_RES (186)..(187): Selenocysteine
  MOD_RES (209)..(209): Selenocysteine
  MOD_RES (225)..(225): Selenocysteine
  MOD_RES (239)..(239): Selenocysteine
  MOD_RES (242)..(242): Selenocysteine
  MOD_RES (248)..(249): Selenocysteine
  MOD_RES (254)..(254): Selenocysteine
  MOD_RES (279)..(279): Selenocysteine
  MOD_RES (281)..(281): Selenocysteine
  MOD_RES (284)..(284): Selenocysteine
  MOD_RES (290)..(290): Selenocysteine
  MOD_RES (312)..(312): Selenocysteine
  MOD_RES (314)..(314): Selenocysteine
  MOD_RES (350)..(350): Selenocysteine
  MOD_RES (369)..(370): Selenocysteine
  MOD_RES (477)..(477): Selenocysteine
  MOD_RES (529)..(530): Selenocysteine
  MOD_RES (552)..(552): Selenocysteine
  MOD_RES (573)..(573): Selenocysteine
  MOD_RES (578)..(578): Selenocysteine
  MOD_RES (606)..(606): Selenocysteine
  MOD_RES (630)..(630): Selenocysteine
  MOD_RES (645)..(645): Selenocysteine
  MOD_RES (658)..(658): Selenocysteine
  MOD_RES (691)..(691): Selenocysteine
  MOD_RES (709)..(709): Selenocysteine
  MOD_RES (725)..(725): Selenocysteine
  MOD_RES (734)..(734): Selenocysteine
  MOD_RES (745)..(745): Selenocysteine
  MOD_RES (760)..(760): Selenocysteine
  MOD_RES (773)..(773): Selenocysteine
  MOD_RES (814)..(814): Selenocysteine
  MOD_RES (845)..(845): Selenocysteine
  MOD_RES (856)..(856): Selenocysteine
  MOD_RES (875)..(876): Selenocysteine
  MOD_RES (898)..(898): Selenocysteine
MLSPQRALLCNLNHIHLQHVSLGLHLSRRPELQEGPLSXPPPPGDXGGKESRGPCSGXLVDANSNSPAVPCRCCQEHGPGLENRQDPSQEEEGAASPSDPGCSSSLSSCSDLSPDESPVSVYLRDLPGDEDAHPQPSIIPLEQGSPLASAGPGXCSPDSFCCSPDSCSGASSSPDPGLDSNCNALXXCQDVPSPGLEEEDERAEQDLPXSELLEADDGKIDAGKXEPSWKINPIWKIDXEKXKAEWKXXENNNXGWKNNGNVNSSWKSEPEKFDSGWKXNXRIXDSGSKXDAGKIDGGWRSDVSEEPVPHRXIXSFHELAQKRKRGPGLPLVPQAKKDRSDWLIVFSPDXELPPSGSPGGSSAPPREVXXFKELRSRSRAPAPPVPPRDPPVGWALVPPRPPPPPVPPRRKKNRPGLQPIAEGQSEEGRAVSPAAGEEAPAAKEPGAQAGLEVRSSWSFAGVPGAQRLWMAEAQSGXGQLQEQKKGLLIAVSVSVDKIISHFGAARNLVQKAQLGDSRLSPDVGHLVLXXLCPALHALVADGLKPFRKDLIXGQRRSSPWSVVEASVKPGSSXRSLGXLYSQVSRLAPLSSSRSRFHAFILGLLNXKQLELWFSSLQEDAGLLSLLYLPXGFFSLARGGCPSLSXELLLLLQPLSVLXFHLDLLFEHHHHLPLGPPQAPAPPGPPPALQQXMQAMLHFGGRLAQSLRGXSKEAASDPSDSPNLPXPGSWWEQLXQASRVYASGGXEGFPLSRWAPGRHGXAAEEGAQERPLPXDEMAPGRGLWLGRLFGVPGGPAENENGALKSRRPSSWLPPXVSVLALVKRGAPPEMPSPQELEASAPRMVQXHRAVRALCDHXAARPDQLSFRRGEVLRVIXXVDEDWLRCGRDGMEGLVPVGYXSLVL

SEQ ID NO: 24519 - protein, 492 aa, Homo sapiens
  MOD_RES (4)..(4): Selenocysteine
  MOD_RES (67)..(67): Selenocysteine
  MOD_RES (119)..(120): Selenocysteine
  MOD_RES (142)..(142): Selenocysteine
  MOD_RES (163)..(163): Selenocysteine
  MOD_RES (168)..(168): Selenocysteine
  MOD_RES (196)..(196): Selenocysteine
  MOD_RES (220)..(220): Selenocysteine
  MOD_RES (235)..(235): Selenocysteine
  MOD_RES (248)..(248): Selenocysteine
  MOD_RES (281)..(281): Selenocysteine
  MOD_RES (299)..(299): Selenocysteine
  MOD_RES (315)..(315): Selenocysteine
  MOD_RES (324)..(324): Selenocysteine
  MOD_RES (335)..(335): Selenocysteine
  MOD_RES (350)..(350): Selenocysteine
  MOD_RES (363)..(363): Selenocysteine
  MOD_RES (404)..(404): Selenocysteine
  MOD_RES (435)..(435): Selenocysteine
  MOD_RES (446)..(446): Selenocysteine
  MOD_RES (465)..(466): Selenocysteine
  MOD_RES (488)..(488): Selenocysteine
MPPXCSPGLRRQDWAPGRCAGLHLPPRAPSSPALQALAGQAGVRSSWSFAGVPGAQRLWMAEAQSGXGQLQEQKKGLLIAVSVSVDKIISHFGAARNLVQKAQLGDSRLSPDVGHLVLXXLCPALHALVADGLKPFRKDLIXGQRRSSPWSVVEASVKPGSSXRSLGXLYSQVSRLAPLSSSRSRFHAFILGLLNXKQLELWFSSLQEDAGLLSLLYLPXGFFSLARGGCPSLSXELLLLLQPLSVLXFHLDLLFEHHHHLPLGPPQAPAPPGPPPALQQXMQAMLHFGGRLAQSLRGXSKEAASDPSDSPNLPXPGSWWEQLXQASRVYASGGXEGFPLSRWAPGRHGXAAEEGAQERPLPXDEMAPGRGLWLGRLFGVPGGPAENENGALKSRRPSSWLPPXVSVLALVKRGAPPEMPSPQELEASAPRMVQXHRAVRALCDHXAARPDQLSFRRGEVLRVIXXVDEDWLRCGRDGMEGLVPVGYXSLVL

SEQ ID NO: 24520 - protein, 211 aa, Homo sapiens
  MOD_RES (18)..(18): Selenocysteine
  MOD_RES (34)..(34): Selenocysteine
  MOD_RES (43)..(43): Selenocysteine
  MOD_RES (54)..(54): Selenocysteine
  MOD_RES (69)..(69): Selenocysteine
  MOD_RES (82)..(82): Selenocysteine
  MOD_RES (123)..(123): Selenocysteine
  MOD_RES (154)..(154): Selenocysteine
  MOD_RES (165)..(165): Selenocysteine
  MOD_RES (184)..(185): Selenocysteine
  MOD_RES (207)..(207): Selenocysteine
MQAMLHFGGRLAQSLRGXSKEAASDPSDSPNLPXPGSWWEQLXQASRVYASGGXEGFPLSRWAPGRHGXAAEEGAQERPLPXDEMAPGRGLWLGRLFGVPGGPAENENGALKSRRPSSWLPPXVSVLALVKRGAPPEMPSPQELEASAPRMVQXHRAVRALCDHXAARPDQLSFRRGEVLRVIXXVDEDWLRCGRDGMEGLVPVGYXSLVL

SEQ ID NO: 24521 - protein, 225 aa, Homo sapiens
  MOD_RES (1)..(1): Any amino acid
  MOD_RES (4)..(4): Selenocysteine
  MOD_RES (9)..(9): Selenocysteine
  MOD_RES (37)..(37): Selenocysteine
  MOD_RES (66)..(66): Selenocysteine
  MOD_RES (79)..(79): Selenocysteine
  MOD_RES (112)..(112): Selenocysteine
  MOD_RES (130)..(130): Selenocysteine
  MOD_RES (146)..(146): Selenocysteine
  MOD_RES (155)..(155): Selenocysteine
  MOD_RES (166)..(166): Selenocysteine
  MOD_RES (181)..(181): Selenocysteine
  MOD_RES (194)..(194): Selenocysteine
XSSXRSLGXLYSQVSRLAPLSSSRSRFHAFILGLLNXKQLELWFSSLQEDAGFFSLARGGCPSLSXELLLLLQPLSVLXFHLDLLFEHHHHLPLGPPQAPAPPGPPPALQQXMQAMLHFGGRLAQSLRGXSKEAASDPSDSPNLPXPGSWWEQLXQASRVYASGGXEGFPLSRWAPGRHGXAAEEGAQERPLPXDEMAPGRGLWLGRLFGVPGGPAENENGALKS

SEQ ID NO: 24522 - protein, 131 aa, Homo sapiens
  MOD_RES (40)..(40): Selenocysteine
  MOD_RES (68)..(68): Selenocysteine
  MOD_RES (72)..(72): Selenocysteine
  MOD_RES (90)..(90): Selenocysteine
  MOD_RES (94)..(94): Selenocysteine
  MOD_RES (108)..(108): Selenocysteine
  MOD_RES (126)..(126): Selenocysteine
  MOD_RES (128)..(129): Selenocysteine
KLRGEINKVVNKYIDQGIAELVPGVLFVDEVHMLDIECFXYLHRALESSIAPIVIFASNRGNCVIRGXEDIXSPHGIPLDLLDRVMIIRXMLYXPQEMKQIIKIRAQXEGINISEEALNHLGEIGXKXXLR

SEQ ID NO: 24523 - protein, 315 aa, Homo sapiens
  MOD_RES (14)..(14): Selenocysteine
  MOD_RES (17)..(17): Selenocysteine
  MOD_RES (44)..(44): Selenocysteine
  MOD_RES (49)..(49): Selenocysteine
  MOD_RES (67)..(67): Selenocysteine
  MOD_RES (76)..(76): Selenocysteine
  MOD_RES (79)..(79): Selenocysteine
  MOD_RES (83)..(83): Selenocysteine
  MOD_RES (93)..(93): Selenocysteine
  MOD_RES (103)..(103): Selenocysteine
  MOD_RES (107)..(107): Selenocysteine
  MOD_RES (148)..(148): Selenocysteine
  MOD_RES (151)..(151): Selenocysteine
  MOD_RES (179)..(179): Selenocysteine
  MOD_RES (209)..(209): Selenocysteine
  MOD_RES (212)..(212): Selenocysteine
  MOD_RES (253)..(253): Selenocysteine
  MOD_RES (281)..(281): Selenocysteine
  MOD_RES (285)..(285): Selenocysteine
  MOD_RES (303)..(303): Selenocysteine
  MOD_RES (307)..(307): Selenocysteine
MAGRAVLLAGPPGXGKXALALAIAQELGSKVPFCPMVGSEVYSXEIKKXEVLMENFRRAIGLRIKEXKEVYEGEVXELXPCEXENPMGGYGKXISHVIIGLKXAKGXKQLKLDPSIFESLQKERVEAGDVIYIEANSGAVKRQGRCDXYAXEFDLEAEEYVPLPKGDVHKKKEIIQDVXLHDLDVANARPQGGQDILSMMGQLMKPKKXEIXDKLRGEINKVVNKYIDQGIAELVPGVLFVDEVHMLDIECFXYLHRALESSIAPIVIFASNRGNCVIRGXEDIXSPHGIPLDLLDRVMIIRXMLYXPQEMKQVP

SEQ ID NO: 24524 - protein, 456 aa, Homo sapiens
  MOD_RES (9)..(10): Selenocysteine
  MOD_RES (12)..(12): Selenocysteine
  MOD_RES (74)..(74): Selenocysteine
  MOD_RES (77)..(77): Selenocysteine
  MOD_RES (104)..(104): Selenocysteine
  MOD_RES (109)..(109): Selenocysteine
  MOD_RES (127)..(127): Selenocysteine
  MOD_RES (136)..(136): Selenocysteine
  MOD_RES (139)..(139): Selenocysteine
  MOD_RES (143)..(143): Selenocysteine
  MOD_RES (153)..(153): Selenocysteine
  MOD_RES (163)..(163): Selenocysteine
  MOD_RES (167)..(167): Selenocysteine
  MOD_RES (208)..(208): Selenocysteine
  MOD_RES (211)..(211): Selenocysteine
  MOD_RES (239)..(239): Selenocysteine
  MOD_RES (269)..(269): Selenocysteine
  MOD_RES (272)..(272): Selenocysteine
  MOD_RES (313)..(313): Selenocysteine
  MOD_RES (341)..(341): Selenocysteine
  MOD_RES (345)..(345): Selenocysteine
  MOD_RES (363)..(363): Selenocysteine
  MOD_RES (367)..(367): Selenocysteine
  MOD_RES (381)..(381): Selenocysteine
  MOD_RES (399)..(399): Selenocysteine
  MOD_RES (401)..(402): Selenocysteine
  MOD_RES (411)..(411): Selenocysteine
MKIEEVKSXXKXQRIASHSHVKGLGLDESGLAKQAASGLVGQENAREACGVIVELIKSKKMAGRAVLLAGPPGXGKXALALAIAQELGSKVPFCPMVGSEVYSXEIKKXEVLMENFRRAIGLRIKEXKEVYEGEVXELXPCEXENPMGGYGKXISHVIIGLKXAKGXKQLKLDPSIFESLQKERVEAGDVIYIEANSGAVKRQGRCDXYAXEFDLEAEEYVPLPKGDVHKKKEIIQDVXLHDLDVANARPQGGQDILSMMGQLMKPKKXEIXDKLRGEINKVVNKYIDQGIAELVPGVLFVDEVHMLDIECFXYLHRALESSIAPIVIFASNRGNCVIRGXEDIXSPHGIPLDLLDRVMIIRXMLYXPQEMKQIIKIRAQXEGINISEEALNHLGEIGXKXXLRYSVQLLXPANLLAKINGKDSIEKEHVEEISELFYDAKSSAKILADQQDKYMK

SEQ ID NO: 24525 - protein, 267 aa, Homo sapiens
  MOD_RES (7)..(7): Selenocysteine
  MOD_RES (10)..(10): Selenocysteine
  MOD_RES (38)..(38): Selenocysteine
  MOD_RES (68)..(68): Selenocysteine
  MOD_RES (71)..(71): Selenocysteine
  MOD_RES (112)..(112): Selenocysteine
  MOD_RES (152)..(152): Selenocysteine
  MOD_RES (156)..(156): Selenocysteine
  MOD_RES (174)..(174): Selenocysteine
  MOD_RES (178)..(178): Selenocysteine
  MOD_RES (192)..(192): Selenocysteine
  MOD_RES (210)..(210): Selenocysteine
  MOD_RES (212)..(213): Selenocysteine
  MOD_RES (222)..(222): Selenocysteine
RQGRCDXYAXEFDLEAEEYVPLPKGDVHKKKEIIQDVXLHDLDVANARPQGGQDILSMMGQLMKPKKXEIXDKLRGEINKVVNKYIDQGIAELVPGVLFVDEVHMLDIECFXYLHRALESSIAPIVIFASNRGNCVIRGLGDGINFAPYRGXEDIXSPHGIPLDLLDRVMIIRXMLYXPQEMKQIIKIRAQXEGINISEEALNHLGEIGXKXXLRYSVQLLXPANLLAKINGKDSIEKEHVEEISELFYDAKSSAKILADQQDKYMK

SEQ ID NO: 24526 - protein, 222 aa, Homo sapiens
  MOD_RES (1)..(1): Any amino acid
  MOD_RES (28)..(28): Selenocysteine
  MOD_RES (31)..(31): Selenocysteine
  MOD_RES (59)..(59): Selenocysteine
  MOD_RES (89)..(89): Selenocysteine
  MOD_RES (92)..(92): Selenocysteine
  MOD_RES (133)..(133): Selenocysteine
  MOD_RES (185)..(185): Selenocysteine
  MOD_RES (199)..(199): Selenocysteine
  MOD_RES (220)..(220): Selenocysteine
XKERVEAGDVIYIEANSGAVKRQGRCDXYAXEFDLEAEEYVPLPKGDVHKKKEIIQDVXLHDLDVANARPQGGQDILSMMGQLMKPKKXEIXDKLRGEINKVVNKYIDQGIAELVPGVLFVDEVHMLDIECFXYLHRALESSIAPIVIFASNRGNCVIRSHDSMNMLVQLIWKPAAFKYHLIVSXQYDDSAPHRVGDCXQGILKLKSRPWKLPGVGSGHXWK

SEQ ID NO: 24527 - protein, 44 aa, Homo sapiens
  MOD_RES (3)..(3): Selenocysteine
MAXVELQLSKSSWRNGRFRSPWRQCVMRRVVGPCASSHLGALDC

SEQ ID NO: 24528 - protein, 39 aa, Homo sapiens
  MOD_RES (3)..(3): Selenocysteine
  MOD_RES (5)..(5): Selenocysteine
  MOD_RES (7)..(8): Selenocysteine
  MOD_RES (17)..(17): Selenocysteine
  MOD_RES (38)..(38): Selenocysteine
MAXVXAXXKVPEIRDVXRIERIEMEFPRVSQDGLDLLXS

SEQ ID NO: 24529 - protein, 259 aa, Homo sapiens
  MOD_RES (3)..(3): Selenocysteine
  MOD_RES (5)..(5): Selenocysteine
  MOD_RES (7)..(8): Selenocysteine
  MOD_RES (17)..(17): Selenocysteine
  MOD_RES (81)..(81): Selenocysteine
  MOD_RES (84)..(84): Selenocysteine
  MOD_RES (98)..(98): Selenocysteine
  MOD_RES (101)..(101): Selenocysteine
  MOD_RES (116)..(116): Selenocysteine
  MOD_RES (120)..(120): Selenocysteine
  MOD_RES (135)..(135): Selenocysteine
  MOD_RES (152)..(152): Selenocysteine
  MOD_RES (154)..(154): Selenocysteine
  MOD_RES (162)..(162): Selenocysteine
  MOD_RES (165)..(166): Selenocysteine
  MOD_RES (170)..(170): Selenocysteine
  MOD_RES (176)..(176): Selenocysteine
  MOD_RES (183)..(183): Selenocysteine
  MOD_RES (207)..(207): Selenocysteine
  MOD_RES (231)..(231): Selenocysteine
MAXVXAXXKVPEIRDVXRIERIGAHSHIRGLGLDDALEPRQASQGMVGQLAARRAAGVVLEMIREGKIAGRAVLIAGQPGXGKXAIAMGMAQALGPDXPFXAIAGSEIFSLEMSKXEALXQAFRRSIGVRIKEEXEIIEGEVVEIQIDRPAXGXGSKVGKLXLKXXEMEXIYDLGXKMIESLXKDKGRDHHRQGDGQDLQAGPLLHXRPRLRRYGLPDQVRAVPRWGAPEXQGGGAHRVPARDRRHQLSHPGLPGALLR

SEQ ID NO: 24530 - protein, 463 aa, Homo sapiens
  MOD_RES (3)..(3): Selenocysteine
  MOD_RES (5)..(5): Selenocysteine
  MOD_RES (7)..(8): Selenocysteine
  MOD_RES (17)..(17): Selenocysteine
  MOD_RES (81)..(81): Selenocysteine
  MOD_RES (84)..(84): Selenocysteine
  MOD_RES (98)..(98): Selenocysteine
  MOD_RES (101)..(101): Selenocysteine
  MOD_RES (116)..(116): Selenocysteine
  MOD_RES (120)..(120): Selenocysteine
  MOD_RES (135)..(135): Selenocysteine
  MOD_RES (152)..(152): Selenocysteine
  MOD_RES (154)..(154): Selenocysteine
  MOD_RES (162)..(162): Selenocysteine
  MOD_RES (165)..(166): Selenocysteine
  MOD_RES (170)..(170): Selenocysteine
  MOD_RES (176)..(176): Selenocysteine
  MOD_RES (183)..(183): Selenocysteine
  MOD_RES (194)..(194): Selenocysteine
  MOD_RES (199)..(199): Selenocysteine
  MOD_RES (210)..(210): Selenocysteine
  MOD_RES (222)..(222): Selenocysteine
  MOD_RES (241)..(241): Selenocysteine
  MOD_RES (254)..(254): Selenocysteine
  MOD_RES (265)..(265): Selenocysteine
  MOD_RES (328)..(328): Selenocysteine
  MOD_RES (333)..(333): Selenocysteine
  MOD_RES (338)..(338): Selenocysteine
  MOD_RES (359)..(360): Selenocysteine
  MOD_RES (367)..(367): Selenocysteine
  MOD_RES (388)..(388): Selenocysteine
  MOD_RES (391)..(391): Selenocysteine
  MOD_RES (397)..(397): Selenocysteine
  MOD_RES (407)..(407): Selenocysteine
  MOD_RES (419)..(419): Selenocysteine
  MOD_RES (440)..(440): Selenocysteine
  MOD_RES (459)..(459): Selenocysteine
  MOD_RES (462)..(462): Selenocysteine
MAXVXAXXKVPEIRDVXRIERIGAHSHIRGLGLDDALEPRQASQGMVGQLAARRAAGVVLEMIREGKIAGRAVLIAGQPGXGKXAIAMGMAQALGPDXPFXAIAGSEIFSLEMSKXEALXQAFRRSIGVRIKEEXEIIEGEVVEIQIDRPAXGXGSKVGKLXLKXXEMEXIYDLGXKMIESLXKDKVQAGDVIXIDKAXGKISKLGRSFXRARDYDAMGSQXKFVQCPDGELQKRKEVVHXVSLHEIDVINSRXQGFLALFSGDXGEIKSEVREQINAKVAEWREEGKAEIIPGVLFIDEVHMLDIESFSFLNRALESDMAPVLIMAXNRGIXRIRGXSYQSPHGIPIDLLDRLLIVSXXPYSEKDXKQILRIRCEEEDVEMSEDAYXVLXRIGLEXSLRYAIQLIXAASLVCRKRKGXEVQVDDIKRVYSLFLDESRSXQYMKEYQDAFLFNELKGEXMDXS

SEQ ID NO: 24531 - protein, 50 aa, Homo sapiens
  MOD_RES (3)..(3): Selenocysteine
  MOD_RES (5)..(5): Selenocysteine
  MOD_RES (7)..(8): Selenocysteine
  MOD_RES (17)..(17): Selenocysteine
MAXVXAXXKVPEIRDVXRIERIGAHSHIRGLGLDDALEPRQLPDVVEMPW

SEQ ID NO: 24532 - protein, 109 aa, Homo sapiens
  MOD_RES (36)..(36): Selenocysteine
  MOD_RES (39)..(39): Selenocysteine
  MOD_RES (53)..(53): Selenocysteine
  MOD_RES (56)..(56): Selenocysteine
  MOD_RES (71)..(71): Selenocysteine
  MOD_RES (75)..(75): Selenocysteine
  MOD_RES (90)..(90): Selenocysteine
  MOD_RES (107)..(107): Selenocysteine
  MOD_RES (109)..(109): Selenocysteine
MVGQLAARRAAGVVLEMIREGKIAGRAVLIAGQPGXGKXAIAMGMAQALGPDXPFXAIAGSEIFSLEMSKXEALXQAFRRSIGVRIKEEXEIIEGEVVEIQIDRPAXGX

SEQ ID NO: 24533 - protein, 354 aa, Homo sapiens
  MOD_RES (36)..(36): Selenocysteine
  MOD_RES (39)..(39): Selenocysteine
  MOD_RES (53)..(53): Selenocysteine
  MOD_RES (56)..(56): Selenocysteine
  MOD_RES (71)..(71): Selenocysteine
  MOD_RES (75)..(75): Selenocysteine
  MOD_RES (90)..(90): Selenocysteine
  MOD_RES (107)..(107): Selenocysteine
  MOD_RES (109)..(109): Selenocysteine
  MOD_RES (117)..(117): Selenocysteine
  MOD_RES (120)..(121): Selenocysteine
  MOD_RES (125)..(125): Selenocysteine
  MOD_RES (131)..(131): Selenocysteine
  MOD_RES (138)..(138): Selenocysteine
  MOD_RES (149)..(149): Selenocysteine
  MOD_RES (154)..(154): Selenocysteine
  MOD_RES (165)..(165): Selenocysteine
  MOD_RES (177)..(177): Selenocysteine
  MOD_RES (196)..(196): Selenocysteine
  MOD_RES (209)..(209): Selenocysteine
  MOD_RES (220)..(220): Selenocysteine
  MOD_RES (283)..(283): Selenocysteine
  MOD_RES (288)..(288): Selenocysteine
  MOD_RES (293)..(293): Selenocysteine
  MOD_RES (314)..(315): Selenocysteine
  MOD_RES (322)..(322): Selenocysteine
  MOD_RES (337)..(337): Selenocysteine
  MOD_RES (342)..(342): Selenocysteine
  MOD_RES (347)..(347): Selenocysteine
  MOD_RES (354)..(354): Selenocysteine
MVGQLAARRAAGVVLEMIREGKIAGRAVLIAGQPGXGKXAIAMGMAQALGPDXPFXAIAGSEIFSLEMSKXEALXQAFRRSIGVRIKEEXEIIEGEVVEIQIDRPAXGXGSKVGKLXLKXXEMEXIYDLGXKMIESLXKDKVQAGDVIXIDKAXGKISKLGRSFXRARDYDAMGSQXKFVQCPDGELQKRKEVVHXVSLHEIDVINSRXQGFLALFSGDXGEIKSEVREQINAKVAEWREEGKAEIIPGVLFIDEVHMLDIESFSFLNRALESDMAPVLIMAXNRGIXRIRGXSYQSPHGIPIDLLDRLLIVSXXPYSEKDXKQILRIRVQKCRWMXSSGSXHSSWXSPAPRSX

SEQ ID NO: 24534 - protein, 267 aa, Homo sapiens
  MOD_RES (30)..(30): Selenocysteine
  MOD_RES (33)..(33): Selenocysteine
  MOD_RES (39)..(39): Selenocysteine
  MOD_RES (76)..(76): Selenocysteine
  MOD_RES (82)..(82): Selenocysteine
  MOD_RES (120)..(120): Selenocysteine
  MOD_RES (128)..(128): Selenocysteine
  MOD_RES (131)..(131): Selenocysteine
  MOD_RES (133)..(134): Selenocysteine
  MOD_RES (142)..(142): Selenocysteine
  MOD_RES (153)..(153): Selenocysteine
  MOD_RES (169)..(169): Selenocysteine
  MOD_RES (199)..(199): Selenocysteine
  MOD_RES (222)..(222): Selenocysteine
  MOD_RES (226)..(226): Selenocysteine
  MOD_RES (251)..(251): Selenocysteine
MAEPVQEELSVLAAIFCRPHEWEVLSRSEXDGXVFRIHXKAEGFMDVDIPLELVFHLPVNYPSCLPGISINSEQLXRAQCVXVKENLLEQAESLLSEPMVHELVLWIQQNLRHILSQPEXGSGSEKCXFSXSXXMDDGLWIXLLHLDHMRAKXKYVKIVEKWASDLRLXGRLMFMGKIILILLQGDRNNLKEYLILQKXSKVDVDSSGKKCKEKMISVLFEXKVQXEHKRFLAFEVKEYSALDELQKEFEXAGLKKLFSEFVLALVK

SEQ ID NO: 24535 - protein, 195 aa, Homo sapiens
  MOD_RES (30)..(30): Selenocysteine
  MOD_RES (33)..(33): Selenocysteine
  MOD_RES (39)..(39): Selenocysteine
  MOD_RES (76)..(76): Selenocysteine
  MOD_RES (82)..(82): Selenocysteine
  MOD_RES (120)..(120): Selenocysteine
  MOD_RES (128)..(128): Selenocysteine
  MOD_RES (131)..(131): Selenocysteine
  MOD_RES (133)..(134): Selenocysteine
  MOD_RES (142)..(142): Selenocysteine
  MOD_RES (153)..(153): Selenocysteine
  MOD_RES (169)..(169): Selenocysteine
MAEPVQEELSVLAAIFCRPHEWEVLSRSEXDGXVFRIHXKAEGFMDVDIPLELVFHLPVNYPSCLPGISINSEQLXRAQCVXVKENLLEQAESLLSEPMVHELVLWIQQNLRHILSQPEXGSGSEKCXFSXSXXMDDGLWIXLLHLDHMRAKXKYVKIVEKWASDLRLXGRLMFMGKIILILLQGDRNNLKVPKS

SEQ ID NO: 24536 - protein, 626 aa, Homo sapiens
  MOD_RES (33)..(33): Selenocysteine
  MOD_RES (47)..(47): Selenocysteine
  MOD_RES (57)..(57): Selenocysteine
  MOD_RES (87)..(87): Selenocysteine
  MOD_RES (105)..(105): Selenocysteine
  MOD_RES (136)..(136): Selenocysteine
  MOD_RES (144)..(144): Selenocysteine
  MOD_RES (160)..(160): Selenocysteine
  MOD_RES (262)..(262): Selenocysteine
  MOD_RES (288)..(288): Selenocysteine
  MOD_RES (352)..(352): Selenocysteine
  MOD_RES (365)..(365): Selenocysteine
  MOD_RES (373)..(373): Selenocysteine
  MOD_RES (376)..(376): Selenocysteine
  MOD_RES (397)..(397): Selenocysteine
  MOD_RES (399)..(399): Selenocysteine
  MOD_RES (407)..(407): Selenocysteine
  MOD_RES (428)..(428): Selenocysteine
  MOD_RES (440)..(440): Selenocysteine
  MOD_RES (481)..(481): Selenocysteine
  MOD_RES (483)..(483): Selenocysteine
  MOD_RES (505)..(505): Selenocysteine
  MOD_RES (529)..(529): Selenocysteine
  MOD_RES (531)..(531): Selenocysteine
  MOD_RES (551)..(551): Selenocysteine
  MOD_RES (553)..(554): Selenocysteine
  MOD_RES (581)..(581): Selenocysteine
  MOD_RES (608)..(608): Selenocysteine
  MOD_RES (620)..(620): Selenocysteine
MSLQWNLIRKLPPDCFKNYHDLQKLYLQNNKIXSISIYAFRGLNSLXKLYLSHNRIXFLKPGVFEDLHRLEWLIIEDNHLSRISPPXFYGLNSLILLVLMNNVLXRLPDKPLCQHMPRLHWLDLEGNHIHNLRNLXFISCSNLXVLVMRKNKINHLNENXFAPLQKLDELDLGSNKIENLPPLIFKDLKELSQLNLSYNPIQKIQANQFDYLVKLKSLLEGIEISNIQQRMFRPLMNLSHIYFKKFQYCGYAPHVRSCKPNXDGISSLENLLASIIQRVFVWVVSAVXCFGNIFVICMRPYIRSENKLYAMSIISLCCADCLMGIYLFVIGGFDLKFRGEYNKHAQLWMESXHCQLVGSLAILSXEVSVLLLXFLXLEKYICIVYPFRCVRPGKCRXIXVLILIWIXGFIVAFIPLSNKEFFKNYYGXNGVCFPLHSEDXESIGAQIYSVAIFLGINLAAFIIIVFSYGSMFYSVHQSAIXAXEIRNQVKKEMILAKRFFFIVFXDALCWIPIFVVKFLSLLQVEIPGXIXSWVVIFILPINSALNPILYXLXXRPFKEMIHRFWYNYRQRKSMDSKGQKXYAPSFIWVEMWPLQEMPPELMKPDLFXYPCEMSLISQSXRLNSYS

SEQ ID NO: 24537 - protein, 157 aa, Homo sapiens
  MOD_RES (2)..(2): Selenocysteine
  MOD_RES (38)..(38): Selenocysteine
  MOD_RES (83)..(83): Selenocysteine
  MOD_RES (92)..(92): Selenocysteine
  MOD_RES (116)..(116): Selenocysteine
  MOD_RES (129)..(129): Selenocysteine
  MOD_RES (156)..(156): Selenocysteine
MXSGSVFFYILIFGKYFSHGGGQDVKCSLGYFPCGNIXKCLPQLLHCNGVDDCGNQADEDNCGDNNGWSLQFDKYFASYYKMXSQYPFEAEXPECLVGSVPVQCLCQGLELDCDEXNLRAVPSVSSNVXAMSLQWNLIRKLPPDCFKNYHDLQKLXL

SEQ ID NO: 24538 - protein, 189 aa, Homo sapiens
  MOD_RES (2)..(2): Selenocysteine
  MOD_RES (38)..(38): Selenocysteine
  MOD_RES (83)..(83): Selenocysteine
  MOD_RES (92)..(92): Selenocysteine
  MOD_RES (116)..(116): Selenocysteine
  MOD_RES (129)..(129): Selenocysteine
  MOD_RES (163)..(163): Selenocysteine
  MOD_RES (177)..(177): Selenocysteine
MXSGSVFFYILIFGKYFSHGGGQDVKCSLGYFPCGNIXKCLPQLLHCNGVDDCGNQADEDNCGDNNGWSLQFDKYFASYYKMXSQYPFEAEXPECLVGSVPVQCLCQGLELDCDEXNLRAVPSVSSNVXAMSLQWNLIRKLPPDCFKNYHDLQKLYLQNNKIXSISIYAFRGLNSLXKLSRAVKDGSEK

SEQ ID NO: 24539 - protein, 709 aa, Homo sapiens
  MOD_RES (2)..(2): Selenocysteine
  MOD_RES (38)..(38): Selenocysteine
  MOD_RES (83)..(83): Selenocysteine
  MOD_RES (92)..(92): Selenocysteine
  MOD_RES (116)..(116): Selenocysteine
  MOD_RES (129)..(129): Selenocysteine
  MOD_RES (163)..(163): Selenocysteine
  MOD_RES (177)..(177): Selenocysteine
  MOD_RES (187)..(187): Selenocysteine
  MOD_RES (217)..(217): Selenocysteine
  MOD_RES (235)..(235): Selenocysteine
  MOD_RES (266)..(266): Selenocysteine
  MOD_RES (274)..(274): Selenocysteine
  MOD_RES (290)..(290): Selenocysteine
  MOD_RES (345)..(345): Selenocysteine
  MOD_RES (371)..(371): Selenocysteine
  MOD_RES (435)..(435): Selenocysteine
  MOD_RES (448)..(448): Selenocysteine
  MOD_RES (456)..(456): Selenocysteine
  MOD_RES (459)..(459): Selenocysteine
  MOD_RES (480)..(480): Selenocysteine
  MOD_RES (482)..(482): Selenocysteine
  MOD_RES (490)..(490): Selenocysteine
  MOD_RES (511)..(511): Selenocysteine
  MOD_RES (523)..(523): Selenocysteine
  MOD_RES (564)..(564): Selenocysteine
  MOD_RES (566)..(566): Selenocysteine
  MOD_RES (588)..(588): Selenocysteine
  MOD_RES (612)..(612): Selenocysteine
  MOD_RES (614)..(614): Selenocysteine
  MOD_RES (634)..(634): Selenocysteine
  MOD_RES (636)..(637): Selenocysteine
  MOD_RES (664)..(664): Selenocysteine
  MOD_RES (691)..(691): Selenocysteine
  MOD_RES (703)..(703): Selenocysteine
MXSGSVFFYILIFGKYFSHGGGQDVKCSLGYFPCGNIXKCLPQLLHCNGVDDCGNQADEDNCGDNNGWSLQFDKYFASYYKMXSQYPFEAEXPECLVGSVPVQCLCQGLELDCDEXNLRAVPSVSSNVXAMSLQWNLIRKLPPDCFKNYHDLQKLYLQNNKIXSISIYAFRGLNSLXKLYLSHNRIXFLKPGVFEDLHRLEWLIIEDNHLSRISPPXFYGLNSLILLVLMNNVLXRLPDKPLCQHMPRLHWLDLEGNHIHNLRNLXFISCSNLXVLVMRKNKINHLNENXFAPLQKLDEFSLEGIEISNIQQRMFRPLMNLSHIYFKKFQYCGYAPHVRSCKPNXDGISSLENLLASIIQRVFVWVVSAVXCFGNIFVICMRPYIRSENKLYAMSIISLCCADCLMGIYLFVIGGFDLKFRGEYNKHAQLWMESXHCQLVGSLAILSXEVSVLLLXFLXLEKYICIVYPFRCVRPGKCRXIXVLILIWIXGFIVAFIPLSNKEFFKNYYGXNGVCFPLHSEDXESIGAQIYSVAIFLGINLAAFIIIVFSYGSMFYSVHQSAIXAXEIRNQVKKEMILAKRFFFIVFXDALCWIPIFVVKFLSLLQVEIPGXIXSWVVIFILPINSALNPILYXLXXRPFKEMIHRFWYNYRQRKSMDSKGQKXYAPSFIWVEMWPLQEMPPELMKPDLFXYPCEMSLISQSXRLNSYS

SEQ ID NO: 24540 - protein, 757 aa, Homo sapiens
  MOD_RES (2)..(2): Selenocysteine
  MOD_RES (38)..(38): Selenocysteine
  MOD_RES (83)..(83): Selenocysteine
  MOD_RES (92)..(92): Selenocysteine
  MOD_RES (116)..(116): Selenocysteine
  MOD_RES (129)..(129): Selenocysteine
  MOD_RES (163)..(163): Selenocysteine
  MOD_RES (177)..(177): Selenocysteine
  MOD_RES (187)..(187): Selenocysteine
  MOD_RES (217)..(217): Selenocysteine
  MOD_RES (235)..(235): Selenocysteine
  MOD_RES (266)..(266): Selenocysteine
  MOD_RES (274)..(274): Selenocysteine
  MOD_RES (290)..(290): Selenocysteine
  MOD_RES (393)..(393): Selenocysteine
  MOD_RES (419)..(419): Selenocysteine
  MOD_RES (483)..(483): Selenocysteine
  MOD_RES (496)..(496): Selenocysteine
  MOD_RES (504)..(504): Selenocysteine
  MOD_RES (507)..(507): Selenocysteine
  MOD_RES (528)..(528): Selenocysteine
  MOD_RES (530)..(530): Selenocysteine
  MOD_RES (538)..(538): Selenocysteine
  MOD_RES (559)..(559): Selenocysteine
  MOD_RES (571)..(571): Selenocysteine
  MOD_RES (612)..(612): Selenocysteine
  MOD_RES (614)..(614): Selenocysteine
  MOD_RES (636)..(636): Selenocysteine
  MOD_RES (660)..(660): Selenocysteine
  MOD_RES (662)..(662): Selenocysteine
  MOD_RES (682)..(682): Selenocysteine
  MOD_RES (684)..(685): Selenocysteine
  MOD_RES (712)..(712): Selenocysteine
  MOD_RES (739)..(739): Selenocysteine
  MOD_RES (751)..(751): Selenocysteine
MXSGSVFFYILIFGKYFSHGGGQDVKCSLGYFPCGNIXKCLPQLLHCNGVDDCGNQADEDNCGDNNGWSLQFDKYFASYYKMXSQYPFEAEXPECLVGSVPVQCLCQGLELDCDEXNLRAVPSVSSNVXAMSLQWNLIRKLPPDCFKNYHDLQKLYLQNNKIXSISIYAFRGLNSLXKLYLSHNRIXFLKPGVFEDLHRLEWLIIEDNHLSRISPPXFYGLNSLILLVLMNNVLXRLPDKPLCQHMPRLHWLDLEGNHIHNLRNLXFISCSNLXVLVMRKNKINHLNENXFAPLQKLDELDLGSNKIENLPPLIFKDLKELSQLNLSYNPIQKIQANQFDYLVKLKSLSLEGIEISNIQQRMFRPLMNLSHIYFKKFQYCGYAPHVRSCKPNXDGISSLENLLASIIQRVFVWVVSAVXCFGNIFVICMRPYIRSENKLYAMSIISLCCADCLMGIYLFVIGGFDLKFRGEYNKHAQLWMESXHCQLVGSLAILSXEVSVLLLXFLXLEKYICIVYPFRCVRPGKCRXIXVLILIWIXGFIVAFIPLSNKEFFKNYYGXNGVCFPLHSEDXESIGAQIYSVAIFLGINLAAFIIIVFSYGSMFYSVHQSAIXAXEIRNQVKKEMILAKRFFFIVFXDALCWIPIFVVKFLSLLQVEIPGXIXSWVVIFILPINSALNPILYXLXXRPFKEMIHRFWYNYRQRKSMDSKGQKXYAPSFIWVEMWPLQEMPPELMKPDLFXYPCEMSLISQSXRLNSYS

SEQ ID NO: 24541 - protein, 784 aa, Homo sapiens
  MOD_RES (2)..(2): Selenocysteine
  MOD_RES (38)..(38): Selenocysteine
  MOD_RES (83)..(83): Selenocysteine
  MOD_RES (92)..(92): Selenocysteine
  MOD_RES (104)..(104): Selenocysteine
  MOD_RES (143)..(143): Selenocysteine
  MOD_RES (156)..(156): Selenocysteine
  MOD_RES (190)..(190): Selenocysteine
  MOD_RES (204)..(204): Selenocysteine
  MOD_RES (214)..(214): Selenocysteine
  MOD_RES (244)..(244): Selenocysteine
  MOD_RES (262)..(262): Selenocysteine
  MOD_RES (293)..(293): Selenocysteine
  MOD_RES (301)..(301): Selenocysteine
  MOD_RES (317)..(317): Selenocysteine
  MOD_RES (420)..(420): Selenocysteine
  MOD_RES (446)..(446): Selenocysteine
  MOD_RES (510)..(510): Selenocysteine
  MOD_RES (523)..(523): Selenocysteine
  MOD_RES (531)..(531): Selenocysteine
  MOD_RES (534)..(534): Selenocysteine
  MOD_RES (555)..(555): Selenocysteine
  MOD_RES (557)..(557): Selenocysteine
  MOD_RES (565)..(565): Selenocysteine
  MOD_RES (586)..(586): Selenocysteine
  MOD_RES (598)..(598): Selenocysteine
  MOD_RES (639)..(639): Selenocysteine
  MOD_RES (641)..(641): Selenocysteine
  MOD_RES (663)..(663): Selenocysteine
  MOD_RES (687)..(687): Selenocysteine
  MOD_RES (689)..(689): Selenocysteine
  MOD_RES (709)..(709): Selenocysteine
  MOD_RES (711)..(712): Selenocysteine
  MOD_RES (739)..(739): Selenocysteine
  MOD_RES (766)..(766): Selenocysteine
  MOD_RES (778)..(778): Selenocysteine
MXSGSVFFYILIFGKYFSHGGGQDVKCSLGYFPCGNIXKCLPQLLHCNGVDDCGNQADEDNCGDNNGWSLQFDKYFASYYKMXSQYPFEAEXPECSFHFFLFIXLLFLVPHCHHALPLPLDSVVGSVPVQCLCQGLELDCDEXNLRAVPSVSSNVXAMSLQWNLIRKLPPDCFKNYHDLQKLYLQNNKIXSISIYAFRGLNSLXKLYLSHNRIXFLKPGVFEDLHRLEWLIIEDNHLSRISPPXFYGLNSLILLVLMNNVLXRLPDKPLCQHMPRLHWLDLEGNHIHNLRNLXFISCSNLXVLVMRKNKINHLNENXFAPLQKLDELDLGSNKIENLPPLIFKDLKELSQLNLSYNPIQKIQANQFDYLVKLKSLSLEGIEISNIQQRMFRPLMNLSHIYFKKFQYCGYAPHVRSCKPNXDGISSLENLLASIIQRVFVWVVSAVXCFGNIFVICMRPYIRSENKLYAMSIISLCCADCLMGIYLFVIGGFDLKFRGEYNKHAQLWMESXHCQLVGSLAILSXEVSVLLLXFLXLEKYICIVYPFRCVRPGKCRXIXVLILIWIXGFIVAFIPLSNKEFFKNYYGXNGVCFPLHSEDXESIGAQIYSVAIFLGINLAAFIIIVFSYGSMFYSVHQSAIXAXEIRNQVKKEMILAKRFFFIVFXDALCWIPIFVVKFLSLLQVEIPGXIXSWVVIFILPINSALNPILYXLXXRPFKEMIHRFWYNYRQRKSMDSKGQKXYAPSFIWVEMWPLQEMPPELMKPDLFXYPCEMSLISQSXRLNSYS

SEQ ID NO: 24542 - protein, 724 aa, Homo sapiens
  MOD_RES (2)..(2): Selenocysteine
  MOD_RES (38)..(38): Selenocysteine
  MOD_RES (83)..(83): Selenocysteine
  MOD_RES (96)..(96): Selenocysteine
  MOD_RES (130)..(130): Selenocysteine
  MOD_RES (144)..(144): Selenocysteine
  MOD_RES (154)..(154): Selenocysteine
  MOD_RES (184)..(184): Selenocysteine
  MOD_RES (202)..(202): Selenocysteine
  MOD_RES (233)..(233): Selenocysteine
  MOD_RES (241)..(241): Selenocysteine
  MOD_RES (257)..(257): Selenocysteine
  MOD_RES (360)..(360): Selenocysteine
  MOD_RES (386)..(386): Selenocysteine
  MOD_RES (450)..(450): Selenocysteine
  MOD_RES (463)..(463): Selenocysteine
  MOD_RES (471)..(471): Selenocysteine
  MOD_RES (474)..(474): Selenocysteine
  MOD_RES (495)..(495): Selenocysteine
  MOD_RES (497)..(497): Selenocysteine
  MOD_RES (505)..(505): Selenocysteine
  MOD_RES (526)..(526): Selenocysteine
  MOD_RES (538)..(538): Selenocysteine
  MOD_RES (579)..(579): Selenocysteine
  MOD_RES (581)..(581): Selenocysteine
  MOD_RES (603)..(603): Selenocysteine
  MOD_RES (627)..(627): Selenocysteine
  MOD_RES (629)..(629): Selenocysteine
  MOD_RES (649)..(649): Selenocysteine
  MOD_RES (651)..(652): Selenocysteine
  MOD_RES (679)..(679): Selenocysteine
  MOD_RES (706)..(706): Selenocysteine
  MOD_RES (718)..(718): Selenocysteine
MXSGSVFFYILIFGKYFSHGGGQDVKCSLGYFPCGNIXKCLPQLLHCNGVDDCGNQADEDNCVVGSVPVQCLCQGLELDCDEXNLRAVPSVSSNVXAMSLQWNLIRKLPPDCFKNYHDLQKLYLQNNKIXSISIYAFRGLNSLXKLYLSHNRIXFLKPGVFEDLHRLEWLIIEDNHLSRISPPXFYGLNSLILLVLMNNVLXRLPDKPLCQHMPRLHWLDLEGNHIHNLRNLXFISCSNLXVLVMRKNKINHLNENXFAPLQKLDELDLGSNKIENLPPLIFKDLKELSQLNLSYNPIQKIQANQFDYLVKLKSLSLEGIEISNIQQRMFRPLMNLSHIYFKKFQYCGYAPHVRSCKPNXDGISSLENLLASIIQRVFVWVVSAVXCFGNIFVICMRPYIRSENKLYAMSIISLCCADCLMGIYLFVIGGFDLKFRGEYNKHAQLWMESXHCQLVGSLAILSXEVSVLLLXFLXLEKYICIVYPFRCVRPGKCRXIXVLILIWIXGFIVAFIPLSNKEFFKNYYGXNGVCFPLHSEDXESIGAQIYSVAIFLGINLAAFIIIVFSYGSMFYSVHQSAIXAXEIRNQVKKEMILAKRFFFIVFXDALCWIPIFVVKFLSLLQVEIPGXIXSWVVIFILPINSALNPILYXLXXRPFKEMIHRFWYNYRQRKSMDSKGQKXYAPSFIWVEMWPLQEMPPELMKPDLFXYPCEMSLISQSXRLNSYS

SEQ ID NO: 24543 - protein, 676 aa, Homo sapiens
  MOD_RES (2)..(2): Selenocysteine
  MOD_RES (11)..(11): Selenocysteine
  MOD_RES (35)..(35): Selenocysteine
  MOD_RES (48)..(48): Selenocysteine
  MOD_RES (82)..(82): Selenocysteine
  MOD_RES (96)..(96): Selenocysteine
  MOD_RES (106)..(106): Selenocysteine
  MOD_RES (136)..(136): Selenocysteine
  MOD_RES (154)..(154): Selenocysteine
  MOD_RES (185)..(185): Selenocysteine
  MOD_RES (193)..(193): Selenocysteine
  MOD_RES (209)..(209): Selenocysteine
  MOD_RES (312)..(312): Selenocysteine
  MOD_RES (338)..(338): Selenocysteine
  MOD_RES (402)..(402): Selenocysteine
  MOD_RES (415)..(415): Selenocysteine
  MOD_RES (423)..(423): Selenocysteine
  MOD_RES (426)..(426): Selenocysteine
  MOD_RES (447)..(447): Selenocysteine
  MOD_RES (449)..(449): Selenocysteine
  MOD_RES (457)..(457): Selenocysteine
  MOD_RES (478)..(478): Selenocysteine
  MOD_RES (490)..(490): Selenocysteine
  MOD_RES (531)..(531): Selenocysteine
  MOD_RES (533)..(533): Selenocysteine
  MOD_RES (555)..(555): Selenocysteine
  MOD_RES (579)..(579): Selenocysteine
  MOD_RES (581)..(581): Selenocysteine
  MOD_RES (601)..(601): Selenocysteine
  MOD_RES (603)..(604): Selenocysteine
  MOD_RES (631)..(631): Selenocysteine
  MOD_RES (658)..(658): Selenocysteine
  MOD_RES (670)..(670): Selenocysteine
MXSQYPFEAEXPECLVGSVPVQCLCQGLELDCDEXNLRAVPSVSSNVXAMSLQWNLIRKLPPDCFKNYHDLQKLYLQNNKIXSISIYAFRGLNSLXKLYLSHNRIXFLKPGVFEDLHRLEWLIIEDNHLSRISPPXFYGLNSLILLVLMNNVLXRLPDKPLCQHMPRLHWLDLEGNHIHNLRNLXFISCSNLXVLVMRKNKINHLNENXFAPLQKLDELDLGSNKIENLPPLIFKDLKELSQLNLSYNPIQKIQANQFDYLVKLKSLSLEGIEISNIQQRMFRPLMNLSHIYFKKFQYCGYAPHVRSCKPNXDGISSLENLLASIIQRVFVWVVSAVXCFGNIFVICMRPYIRSENKLYAMSIISLCCADCLMGIYLFVIGGFDLKFRGEYNKHAQLWMESXHCQLVGSLAILSXEVSVLLLXFLXLEKYICIVYPFRCVRPGKCRXIXVLILIWIXGFIVAFIPLSNKEFFKNYYGXNGVCFPLHSEDXESIGAQIYSVAIFLGINLAAFIIIVFSYGSMFYSVHQSAIXAXEIRNQVKKEMILAKRFFFIVFXDALCWIPIFVVKFLSLLQVEIPGXIXSWVVIFILPINSALNPILYXLXXRPFKEMIHRFWYNYRQRKSMDSKGQKXYAPSFIWVEMWPLQEMPPELMKPDLFXYPCEMSLISQSXRLNSYS

SEQ ID NO: 24544 - protein, 601 aa, Homo sapiens
  MOD_RES (3)..(3): Selenocysteine
  MOD_RES (5)..(5): Selenocysteine
  MOD_RES (31)..(31): Selenocysteine
  MOD_RES (45)..(45): Selenocysteine
  MOD_RES (55)..(55): Selenocysteine
  MOD_RES (85)..(85): Selenocysteine
  MOD_RES (103)..(103): Selenocysteine
  MOD_RES (134)..(134): Selenocysteine
  MOD_RES (237)..(237): Selenocysteine
  MOD_RES (263)..(263): Selenocysteine
  MOD_RES (327)..(327): Selenocysteine
  MOD_RES (340)..(340): Selenocysteine
  MOD_RES (348)..(348): Selenocysteine
  MOD_RES (351)..(351): Selenocysteine
  MOD_RES (372)..(372): Selenocysteine
  MOD_RES (374)..(374): Selenocysteine
  MOD_RES (382)..(382): Selenocysteine
  MOD_RES (403)..(403): Selenocysteine
  MOD_RES (415)..(415): Selenocysteine
  MOD_RES (456)..(456): Selenocysteine
  MOD_RES (458)..(458): Selenocysteine
  MOD_RES (480)..(480): Selenocysteine
  MOD_RES (504)..(504): Selenocysteine
  MOD_RES (506)..(506): Selenocysteine
  MOD_RES (526)..(526): Selenocysteine
  MOD_RES (528)..(529): Selenocysteine
  MOD_RES (556)..(556): Selenocysteine
  MOD_RES (583)..(583): Selenocysteine
  MOD_RES (595)..(595): Selenocysteine
MVXCXQNMKAALKSLLYHSRNLGYLQNNKIXSISIYAFRGLNSLXKLYLSHNRIXFLKPGVFEDLHRLEWLIIEDNHLSRISPPXFYGLNSLILLVLMNNVLXRLPDKPLCQHMPRLHWLVMRKNKINHLNENXFAPLQKLDELDLGSNKIENLPPLIFKDLKELSQLNLSYNPIQKIQANQFDYLVKLKSLSLEGIEISNIQQRMFRPLMNLSHIYFKKFQYCGYAPHVRSCKPNXDGISSLENLLASIIQRVFVWVVSAVXCFGNIFVICMRPYIRSENKLYAMSIISLCCADCLMGIYLFVIGGFDLKFRGEYNKHAQLWMESXHCQLVGSLAILSXEVSVLLLXFLXLEKYICIVYPFRCVRPGKCRXIXVLILIWIXGFIVAFIPLSNKEFFKNYYGXNGVCFPLHSEDXESIGAQIYSVAIFLGINLAAFIIIVFSYGSMFYSVHQSAIXAXEIRNQVKKEMILAKRFFFIVFXDALCWIPIFVVKFLSLLQVEIPGXIXSWVVIFILPINSALNPILYXLXXRPFKEMIHRFWYNYRQRKSMDSKGQKXYAPSFIWVEMWPLQEMPPELMKPDLFXYPCEMSLISQSXRLNSYS

SEQ ID NO: 24545 - protein, 730 aa, Homo sapiens
  MOD_RES (17)..(17): Selenocysteine
  MOD_RES (36)..(36): Selenocysteine
  MOD_RES (42)..(42): Selenocysteine
  MOD_RES (56)..(56): Selenocysteine
  MOD_RES (83)..(83): Selenocysteine
  MOD_RES (88)..(88): Selenocysteine
  MOD_RES (92)..(92): Selenocysteine
  MOD_RES (103)..(103): Selenocysteine
  MOD_RES (120)..(120): Selenocysteine
  MOD_RES (140)..(140): Selenocysteine
  MOD_RES (161)..(161): Selenocysteine
  MOD_RES (198)..(199): Selenocysteine
  MOD_RES (212)..(212): Selenocysteine
  MOD_RES (222)..(222): Selenocysteine
  MOD_RES (230)..(230): Selenocysteine
  MOD_RES (273)..(273): Selenocysteine
  MOD_RES (276)..(276): Selenocysteine
  MOD_RES (284)..(284): Selenocysteine
  MOD_RES (292)..(292): Selenocysteine
  MOD_RES (294)..(294): Selenocysteine
  MOD_RES (346)..(346): Selenocysteine
  MOD_RES (379)..(379): Selenocysteine
  MOD_RES (405)..(405): Selenocysteine
  MOD_RES (424)..(425): Selenocysteine
  MOD_RES (482)..(482): Selenocysteine
  MOD_RES (490)..(490): Selenocysteine
  MOD_RES (493)..(493): Selenocysteine
  MOD_RES (514)..(514): Selenocysteine
  MOD_RES (557)..(557): Selenocysteine
  MOD_RES (587)..(587): Selenocysteine
  MOD_RES (595)..(595): Selenocysteine
  MOD_RES (599)..(600): Selenocysteine
  MOD_RES (646)..(646): Selenocysteine
  MOD_RES (648)..(648): Selenocysteine
  MOD_RES (668)..(668): Selenocysteine
  MOD_RES (670)..(671): Selenocysteine
  MOD_RES (700)..(700): Selenocysteine
  MOD_RES (720)..(720): Selenocysteine
MIVFLVFKHLFSLRLIXMFFLLHFIVLINVKDFALXQGSMIXPSCQKGYFPCGNLXKCLPRAFHCDGKDDCGNGADEENCGDXSGWAXIFGXVHGNANSVALXQECFLKQYPQCCDCKEXELECVNGDLKSVPMISNNVXLLSLKKNKIHSLPDKVFIKYXKLKKIFLQHNCIRHISRKAFFGLCNLQILYLNHNCIXXLRPGIFKDLHQLXWLILDDNPIXRISQRLFXGLNSLFFLSMVNNYLEALPKQMCAQMPQLNWVDLEGNRIKYLXNSXFLSCDSLXVLDLSSNXIXELSPHLFKDLKLLQKLNLSSNPLMYLHKNQFESLKQLQSLDLERIEIPNINXRMFQPMKNLSHIYFKNFRYCSYAPHVRICMPLXDGISSFEDLLANNILRIFVWVIAFIXCFGNLFVIGMRSFIKAENXXHAMSIKILCCADCLMGVYLFFVGIFDIKYRGQYQKYALLWMESVQCRLMGFLAMLSXEVSVLLLXYLXLEKFLVIVFPFSNIRPGKRQXSVILICIWMAGFLIAVIPFWNKDYFGNFYGKNGVCFPLYYDQXEDIGSKGYSLGIFLGVNLLAFLIIVFSYIXMFCSIQKXALQXXEVRNCFGREVAVANRFFFIVFSDAICWIPVFVVKILSLFRVEIPDXMXSWIVIFFLPVNSALNPILYXLXXNFFKDKLKQLLHKHQRKSIFKIKKKSLSXSIVWIEDSSSLKLGVLNKIXLGDSIMKPVS

SEQ ID NO: 24546 - protein, 754 aa, Homo sapiens
  MOD_RES (17)..(17): Selenocysteine
  MOD_RES (36)..(36): Selenocysteine
  MOD_RES (42)..(42): Selenocysteine
  MOD_RES (56)..(56): Selenocysteine
  MOD_RES (83)..(83): Selenocysteine
  MOD_RES (88)..(88): Selenocysteine
  MOD_RES (92)..(92): Selenocysteine
  MOD_RES (103)..(103): Selenocysteine
  MOD_RES (120)..(120): Selenocysteine
  MOD_RES (140)..(140): Selenocysteine
  MOD_RES (161)..(161): Selenocysteine
  MOD_RES (198)..(199): Selenocysteine
  MOD_RES (212)..(212): Selenocysteine
  MOD_RES (222)..(222): Selenocysteine
  MOD_RES (230)..(230): Selenocysteine
  MOD_RES (273)..(273): Selenocysteine
  MOD_RES (276)..(276): Selenocysteine
  MOD_RES (284)..(284): Selenocysteine
  MOD_RES (300)..(300): Selenocysteine
  MOD_RES (316)..(316): Selenocysteine
  MOD_RES (318)..(318): Selenocysteine
  MOD_RES (370)..(370): Selenocysteine
  MOD_RES (403)..(403): Selenocysteine
  MOD_RES (429)..(429): Selenocysteine
  MOD_RES (448)..(449): Selenocysteine
  MOD_RES (506)..(506): Selenocysteine
  MOD_RES (514)..(514): Selenocysteine
  MOD_RES (517)..(517): Selenocysteine
  MOD_RES (538)..(538): Selenocysteine
  MOD_RES (581)..(581): Selenocysteine
  MOD_RES (611)..(611): Selenocysteine
  MOD_RES (619)..(619): Selenocysteine
  MOD_RES (623)..(624): Selenocysteine
  MOD_RES (670)..(670): Selenocysteine
  MOD_RES (672)..(672): Selenocysteine
  MOD_RES (692)..(692): Selenocysteine
  MOD_RES (694)..(695): Selenocysteine
  MOD_RES (724)..(724): Selenocysteine
  MOD_RES (744)..(744): Selenocysteine
MIVFLVFKHLFSLRLIXMFFLLHFIVLINVKDFALXQGSMIXPSCQKGYFPCGNLXKCLPRAFHCDGKDDCGNGADEENCGDXSGWAXIFGXVHGNANSVALXQECFLKQYPQCCDCKEXELECVNGDLKSVPMISNNVXLLSLKKNKIHSLPDKVFIKYXKLKKIFLQHNCIRHISRKAFFGLCNLQILYLNHNCIXXLRPGIFKDLHQLXWLILDDNPIXRISQRLFXGLNSLFFLSMVNNYLEALPKQMCAQMPQLNWVDLEGNRIKYLXNSXFLSCDSLXVLFLPRNQIGFVPEKXFSSLKNLGELDLSSNXIXELSPHLFKDLKLLQKLNLSSNPLMYLHKNQFESLKQLQSLDLERIEIPNINXRMFQPMKNLSHIYFKNFRYCSYAPHVRICMPLXDGISSFEDLLANNILRIFVWVIAFIXCFGNLFVIGMRSFIKAENXXHAMSIKILCCADCLMGVYLFFVGIFDIKYRGQYQKYALLWMESVQCRLMGFLAMLSXEVSVLLLXYLXLEKFLVIVFPFSNIRPGKRQXSVILICIWMAGFLIAVIPFWNKDYFGNFYGKNGVCFPLYYDQXEDIGSKGYSLGIFLGVNLLAFLIIVFSYIXMFCSIQKXALQXXEVRNCFGREVAVANRFFFIVFSDAICWIPVFVVKILSLFRVEIPDXMXSWIVIFFLPVNSALNPILYXLXXNFFKDKLKQLLHKHQRKSIFKIKKKSLSXSIVWIEDSSSLKLGVLNKIXLGDSIMKPVS

SEQ ID NO: 24547 - protein, 469 aa, Homo sapiens
  MOD_RES (8)..(8): Selenocysteine
  MOD_RES (11)..(11): Selenocysteine
  MOD_RES (37)..(37): Selenocysteine
  MOD_RES (76)..(76): Selenocysteine
  MOD_RES (122)..(122): Selenocysteine
  MOD_RES (127)..(127): Selenocysteine
  MOD_RES (134)..(134): Selenocysteine
  MOD_RES (162)..(162): Selenocysteine
  MOD_RES (174)..(174): Selenocysteine
  MOD_RES (179)..(179): Selenocysteine
  MOD_RES (193)..(193): Selenocysteine
  MOD_RES (237)..(238): Selenocysteine
  MOD_RES (302)..(302): Selenocysteine
  MOD_RES (314)..(314): Selenocysteine
  MOD_RES (325)..(325): Selenocysteine
  MOD_RES (329)..(329): Selenocysteine
  MOD_RES (346)..(347): Selenocysteine
  MOD_RES (413)..(413): Selenocysteine
  MOD_RES (419)..(419): Selenocysteine
  MOD_RES (421)..(422): Selenocysteine
MQMADAAXIAXMNKAAGGDKLAELFSLVPDLLEAANXSGNASLQLPDLWWELGLELPDGAPPGHPPGSGGAESADXEARVRILISVVYWVVCALGLAGNLLVLYLMKSMQGWRKSSINLFVXNLALXDFQFVLXLPFWAVENALDFKWPFGKAMCKIVSMVXSMNMYASVFFLXAMSVXRYHSVASALKSHRXRGHGRGDCCGRSLGDSCCFSAKALCVWIWALAALASLPSAIFSXXVKVMGEELCLVRFPDKLLGRDRQFWLGLYHSQKVLLGFVLPLGIIILCYLLLVRFIADRRAAGXKGGAAVAGGRPXGASARRLSKVXKSVXIVVLSFFLCWLPNQALXXWSILIKFNAVPFSQEYFLCQVYAFPVSVCLAHSNSCLNPVLYCLVRREFRKALKSLLWRIASPSIXSMRPFXAXXKPEHEDQGLQAPAPPHAAAEPDLLYYPPGVVVYSGGRYDLLPSSSAY

SEQ ID NO: 24548 - protein, 374 aa, Homo sapiens
  MOD_RES (3)..(3): Selenocysteine
  MOD_RES (6)..(6): Selenocysteine
  MOD_RES (12)..(12): Selenocysteine
  MOD_RES (78)..(78): Selenocysteine
  MOD_RES (93)..(93): Selenocysteine
  MOD_RES (119)..(119): Selenocysteine
  MOD_RES (121)..(121): Selenocysteine
  MOD_RES (133)..(133): Selenocysteine
  MOD_RES (151)..(151): Selenocysteine
  MOD_RES (162)..(162): Selenocysteine
  MOD_RES (173)..(173): Selenocysteine
  MOD_RES (176)..(176): Selenocysteine
  MOD_RES (221)..(222): Selenocysteine
  MOD_RES (266)..(266): Selenocysteine
  MOD_RES (282)..(282): Selenocysteine
  MOD_RES (285)..(285): Selenocysteine
  MOD_RES (288)..(288): Selenocysteine
  MOD_RES (294)..(295): Selenocysteine
  MOD_RES (323)..(323): Selenocysteine
  MOD_RES (363)..(363): Selenocysteine
  MOD_RES (366)..(366): Selenocysteine
  MOD_RES (372)..(372): Selenocysteine
MPXLNXSASPPXFFWANASGGSVLSADDAPMPVKFLALRLMVALAYGLVGAIGLLGNLAVLWVLSNCARRAPGPPSDXFVFNLALADLGLALXLPFWAAESALDFHWPFGGALCKMVLXAXVLNVYASIFLIXALSVARYWVVAMAAGPGXHLSLFWARIAXLAVWAAAALVXVPXAVFGVEGEVCGVRLCLLRFPSRYWLGAYQLQRVVLAFMVPLGVIXXSYLLLLAFLQRRQRRRQDSRVVARSVRILVASFFLCWFPNHVVXLWGVLVKFDLVPWNSXFYXIQXYVFPVXXCLAHSNSCLNPVLYCLLRREPRQALAGXFRDLRLRLWPQGGGWVQQVALKQVGRRWVASNPRESRPSXLLXNLDRGXPG

SEQ ID NO: 24549 - protein, 462 aa, Homo sapiens
  MOD_RES (3)..(3): Selenocysteine
  MOD_RES (13)..(13): Selenocysteine
  MOD_RES (20)..(20): Selenocysteine
  MOD_RES (23)..(23): Selenocysteine
  MOD_RES (53)..(53): Selenocysteine
  MOD_RES (81)..(82): Selenocysteine
  MOD_RES (84)..(84): Selenocysteine
  MOD_RES (89)..(89): Selenocysteine
  MOD_RES (131)..(131): Selenocysteine
  MOD_RES (162)..(162): Selenocysteine
  MOD_RES (168)..(168): Selenocysteine
  MOD_RES (170)..(170): Selenocysteine
  MOD_RES (223)..(223): Selenocysteine
  MOD_RES (246)..(246): Selenocysteine
  MOD_RES (248)..(248): Selenocysteine
  MOD_RES (266)..(266): Selenocysteine
  MOD_RES (278)..(278): Selenocysteine
  MOD_RES (328)..(328): Selenocysteine
  MOD_RES (351)..(351): Selenocysteine
  MOD_RES (365)..(365): Selenocysteine
  MOD_RES (445)..(445): Selenocysteine
  MOD_RES (449)..(449): Selenocysteine
  MOD_RES (462)..(462): Selenocysteine
MDXKHFLPLDFSXQVNSSLXSPXGRGSMAAPSLHPSLGPGIGSPGQLHSPISXLSSPINGMGPPFSVISSPMGPHSMSVPXXPXLGFSXGSPQLSSPMNPVSSSEDIKPPLGLNGVLKVPAHPSGNMASFXKHICAICGDRSSGKHYGVYSCEGCKGFFKRXVRKDLXYXCRDNKDCLIDKRQRNRCQYCRYQKCLAMGMKREAVQEERQRGKDRNENEVESXSSANEDMPVERILEAELAVEPKXEXYVEANMGLNPSSPNDPVXNICQAADKQLFXLVEWAKRIPHFSELPLDDQVILLRAGWNELLIASFSHRSIAVKDGILLAXGLHVHRNSAHSAGVGAIFDRVLXELVSKMRDMQMDKXELGCLRAIVLFNPDSKGLSNPAEVEALREKVYASLEAYCKHKYPEQPGRFAKLLLRLPALRSIGLKCLEHLFFFKLIGDXPIDXFLMEMLEAPHQMX

SEQ ID NO: 24550 - protein, 347 aa, Homo sapiens
  MOD_RES (42)..(42): Selenocysteine
  MOD_RES (48)..(48): Selenocysteine
  MOD_RES (58)..(58): Selenocysteine
  MOD_RES (78)..(78): Selenocysteine
  MOD_RES (135)..(135): Selenocysteine
  MOD_RES (147)..(147): Selenocysteine
  MOD_RES (159)..(159): Selenocysteine
  MOD_RES (209)..(209): Selenocysteine
  MOD_RES (236)..(236): Selenocysteine
  MOD_RES (250)..(250): Selenocysteine
  MOD_RES (287)..(287): Selenocysteine
  MOD_RES (330)..(330): Selenocysteine
  MOD_RES (334)..(334): Selenocysteine
MRECGGGPGAGKRLCAICGDRSSGKHYGVYSCEGCKGFFKRXIRKDLXYSCRDNKDCXVDKRQRNRCQYCRYQKCLAXGMKREAVQEERQRGKDKDGDGEGAGGAPEEMPVDRILEAELAVEQKSDQGVEGPGGXGGSGSSPNDPVXNICQAADKQLFXLVEWAKRIPHFSSLPLDDQVILLRAGWNELLIASFSHRSIDVRDGILLAXGLHVHRNSAHSAGVGAIFDRSLSRVLXELVSKMRDMRMDKXELGCLRAIILFNPDAKGLSNPSEVEVLREKVYASLEXYCKQKYPEQQGRFAKLLLRLPALRSIGLKCLEHLFFFKLIGDXPIDXFLMEMLEAPHQLA

SEQ ID NO: 24551 - protein, 79 aa, Homo sapiens
  MOD_RES (60)..(60): Selenocysteine
MSWAARPPFLPQRHAAGQCGPVGVRKEMHCGVASRWRRRRPWLDPAAAAAAAVAGGEQQXPEPEPGEAGRDGMGDSGRD

SEQ ID NO: 24552 - protein, 533 aa, Homo sapiens
  MOD_RES (60)..(60): Selenocysteine
  MOD_RES (109)..(109): Selenocysteine
  MOD_RES (165)..(165): Selenocysteine
  MOD_RES (232)..(232): Selenocysteine
  MOD_RES (238)..(238): Selenocysteine
  MOD_RES (248)..(248): Selenocysteine
  MOD_RES (268)..(268): Selenocysteine
  MOD_RES (325)..(325): Selenocysteine
  MOD_RES (337)..(337): Selenocysteine
  MOD_RES (349)..(349): Selenocysteine
  MOD_RES (399)..(399): Selenocysteine
  MOD_RES (422)..(422): Selenocysteine
  MOD_RES (436)..(436): Selenocysteine
  MOD_RES (473)..(473): Selenocysteine
  MOD_RES (516)..(516): Selenocysteine
  MOD_RES (520)..(520): Selenocysteine
MSWAARPPFLPQRHAAGQCGPVGVRKEMHCGVASRWRRRRPWLDPAAAAAAAVAGGEQQXPEPEPGEAGRDGMGDSGRDSRSPDSSSPNPLPQGVPPPSPPGPPLPPSXAPSLGGSGAPPPPPMPPPPLGSPFPVISSSMGSPGLPPPAPPGFSGPVSSPQINSXVSLPGGGSGPPEDVKPPVLGVRGLHCPPPPGGPGAGKRLCAICGDRSSGKHYGVYSCEGCKGFFKRXIRKDLXYSCRDNKDCXVDKRQRNRCQYCRYQKCLAXGMKREAVQEERQRGKDKDGDGEGAGGAPEEMPVDRILEAELAVEQKSDQGVEGPGGXGGSGSSPNDPVXNICQAADKQLFXLVEWAKRIPHFSSLPLDDQVILLRAGWNELLIASFSHRSIDVRDGILLAXGLHVHRNSAHSAGVGAIFDRVLXELVSKMRDMRMDKXELGCLRAIILFNPDAKGLSNPSEVEVLREKVYASLEXYCKQKYPEQQGRFAKLLLRLPALRSIGLKCLEHLFFFKLIGDXPIDXFLMEMLEAPHQLA

SEQ ID NO: 24553 - protein, 537 aa, Homo sapiens
  MOD_RES (60)..(60): Selenocysteine
  MOD_RES (109)..(109): Selenocysteine
  MOD_RES (165)..(165): Selenocysteine
  MOD_RES (232)..(232): Selenocysteine
  MOD_RES (238)..(238): Selenocysteine
  MOD_RES (248)..(248): Selenocysteine
  MOD_RES (268)..(268): Selenocysteine
  MOD_RES (325)..(325): Selenocysteine
  MOD_RES (337)..(337): Selenocysteine
  MOD_RES (349)..(349): Selenocysteine
  MOD_RES (399)..(399): Selenocysteine
  MOD_RES (426)..(426): Selenocysteine
  MOD_RES (440)..(440): Selenocysteine
  MOD_RES (477)..(477): Selenocysteine
  MOD_RES (520)..(520): Selenocysteine
  MOD_RES (524)..(524): Selenocysteine
MSWAARPPFLPQRHAAGQCGPVGVRKEMHCGVASRWRRRRPWLDPAAAAAAAVAGGEQQXPEPEPGEAGRDGMGDSGRDSRSPDSSSPNPLPQGVPPPSPPGPPLPPSXAPSLGGSGAPPPPPMPPPPLGSPFPVISSSMGSPGLPPPAPPGFSGPVSSPQINSXVSLPGGGSGPPEDVKPPVLGVRGLHCPPPPGGPGAGKRLCAICGDRSSGKHYGVYSCEGCKGFFKRXIRKDLXYSCRDNKDCXVDKRQRNRCQYCRYQKCLAXGMKREAVQEERQRGKDKDGDGEGAGGAPEEMPVDRILEAELAVEQKSDQGVEGPGGXGGSGSSPNDPVXNICQAADKQLFXLVEWAKRIPHFSSLPLDDQVILLRAGWNELLIASFSHRSIDVRDGILLAXGLHVHRNSAHSAGVGAIFDRSLSRVLXELVSKMRDMRMDKXELGCLRAIILFNPDAKGLSNPSEVEVLREKVYASLEXYCKQKYPEQQGRFAKLLLRLPALRSIGLKCLEHLFFFKLIGDXPIDXFLMEMLEAPHQLA

SEQ ID NO: 24554 - protein, 96 aa, Homo sapiens
  MOD_RES (1)..(1): Any amino acid
  MOD_RES (8)..(8): Selenocysteine
  MOD_RES (20)..(20): Selenocysteine
  MOD_RES (68)..(68): Selenocysteine
  MOD_RES (82)..(82): Selenocysteine
XSPNDPVXNICQAADKQLFXLVEWAKRIPHFSSLPLDDQVILLRAGLHVHRNSAHSAGVGAIFDRVLXELVSKMRDMRMDKXELGCLRAIILFNPD

SEQ ID NO: 24555 - protein, 340 aa, Homo sapiens
  MOD_RES (6)..(6): Selenocysteine
  MOD_RES (43)..(43): Selenocysteine
  MOD_RES (51)..(51): Selenocysteine
  MOD_RES (105)..(105): Selenocysteine
  MOD_RES (127)..(127): Selenocysteine
  MOD_RES (139)..(139): Selenocysteine
  MOD_RES (144)..(144): Selenocysteine
  MOD_RES (156)..(156): Selenocysteine
  MOD_RES (171)..(171): Selenocysteine
  MOD_RES (206)..(206): Selenocysteine
  MOD_RES (229)..(229): Selenocysteine
  MOD_RES (269)..(269): Selenocysteine
  MOD_RES (277)..(277): Selenocysteine
  MOD_RES (282)..(282): Selenocysteine
  MOD_RES (323)..(323): Selenocysteine
  MOD_RES (327)..(327): Selenocysteine
  MOD_RES (335)..(335): Selenocysteine
  MOD_RES (340)..(340): Selenocysteine
MNYPSXSPGSLVKHICAICGDRSSGKHYGVYSCEGCKGFFKRXIRKDLIYXCRDNKDCLIDKRQRNRCQYCRYQKCLVMGMKREAVQEERQRSRERAESEAECAXSGHEDMPVERILEAELAVEPKXESYGDMNMENSXNDPVXNICHAADKQLFXLVEWAKRIPHFSDLXLEDQVILLRAGWNELLIASFSHRSVSVQDGILLAXGLHVHRSSAHSAGVGSIFDRVLXELVSKMKDMQMDKSELGCLRAIVLFNPDAKGLSNPSEVEXLREKVYAXLEAYXKQKYPEQPGRFAKLLLRLPALRSIGLKCLEHLFFFKLIGDXPIDXFLMEMLEXPLQIX

SEQ ID NO: 24556 - protein, 463 aa, Homo sapiens
  MOD_RES (22)..(22): Selenocysteine
  MOD_RES (25)..(25): Selenocysteine
  MOD_RES (35)..(35): Selenocysteine
  MOD_RES (46)..(46): Selenocysteine
  MOD_RES (48)..(48): Selenocysteine
  MOD_RES (55)..(55): Selenocysteine
  MOD_RES (61)..(61): Selenocysteine
  MOD_RES (74)..(74): Selenocysteine
  MOD_RES (129)..(129): Selenocysteine
  MOD_RES (166)..(166): Selenocysteine
  MOD_RES (174)..(174): Selenocysteine
  MOD_RES (228)..(228): Selenocysteine
  MOD_RES (250)..(250): Selenocysteine
  MOD_RES (262)..(262): Selenocysteine
  MOD_RES (267)..(267): Selenocysteine
  MOD_RES (279)..(279): Selenocysteine
  MOD_RES (294)..(294): Selenocysteine
  MOD_RES (329)..(329): Selenocysteine
  MOD_RES (352)..(352): Selenocysteine
  MOD_RES (392)..(392): Selenocysteine
  MOD_RES (400)..(400): Selenocysteine
  MOD_RES (405)..(405): Selenocysteine
  MOD_RES (446)..(446): Selenocysteine
  MOD_RES (450)..(450): Selenocysteine
  MOD_RES (458)..(458): Selenocysteine
  MOD_RES (463)..(463): Selenocysteine
MYGNYSHFMKFPAGYGGSPGHXGSXSMSPSAALSXGKPMDSHPSYXDXPVSAPRXLSAVGXPLNALGSPYRVIXSAMGPPSGALAAPPGINLVAPPSSQLNVVNSVSSSEDIKPLPGLPGIGNMNYPSXSPGSLVKHICAICGDRSSGKHYGVYSCEGCKGFFKRXIRKDLIYXCRDNKDCLIDKRQRNRCQYCRYQKCLVMGMKREAVQEERQRSRERAESEAECAXSGHEDMPVERILEAELAVEPKXESYGDMNMENSXNDPVXNICHAADKQLFXLVEWAKRIPHFSDLXLEDQVILLRAGWNELLIASFSHRSVSVQDGILLAXGLHVHRSSAHSAGVGSIFDRVLXELVSKMKDMQMDKSELGCLRAIVLFNPDAKGLSNPSEVEXLREKVYAXLEAYXKQKYPEQPGRFAKLLLRLPALRSIGLKCLEHLFFFKLIGDXPIDXFLMEMLEXPLQIX

SEQ ID NO: 24557 - protein, 157 aa, Homo sapiens
  MOD_RES (17)..(17): Selenocysteine
  MOD_RES (96)..(96): Selenocysteine
  MOD_RES (102)..(102): Selenocysteine
ESCKLRGLHHRNLLPIXHVCIEEGEKPMVILPYMNWGNLKLFLRQCKLVEANNPQAISQQDLVHMAIQIACGMSYLARREVIHKDLAARNCVIDDXLQVKIXDNALSRDLFPMDYHCLGDNENRPVRWMALESLVNNEFSSASDVAPPCGAALFGVS

SEQ ID NO: 24558 - protein, 607 aa, Homo sapiens
  MOD_RES (106)..(106): Selenocysteine
  MOD_RES (112)..(112): Selenocysteine
  MOD_RES (149)..(149): Selenocysteine
  MOD_RES (160)..(160): Selenocysteine
  MOD_RES (176)..(176): Selenocysteine
  MOD_RES (184)..(184): Selenocysteine
  MOD_RES (203)..(203): Selenocysteine
  MOD_RES (210)..(210): Selenocysteine
  MOD_RES (213)..(213): Selenocysteine
  MOD_RES (223)..(224): Selenocysteine
  MOD_RES (226)..(226): Selenocysteine
  MOD_RES (278)..(278): Selenocysteine
  MOD_RES (280)..(281): Selenocysteine
  MOD_RES (288)..(288): Selenocysteine
  MOD_RES (293)..(293): Selenocysteine
  MOD_RES (296)..(296): Selenocysteine
  MOD_RES (300)..(300): Selenocysteine
  MOD_RES (312)..(312): Selenocysteine
  MOD_RES (331)..(331): Selenocysteine
  MOD_RES (340)..(340): Selenocysteine
  MOD_RES (365)..(365): Selenocysteine
  MOD_RES (376)..(376): Selenocysteine
  MOD_RES (380)..(380): Selenocysteine
  MOD_RES (397)..(397): Selenocysteine
  MOD_RES (476)..(476): Selenocysteine
  MOD_RES (482)..(482): Selenocysteine
  MOD_RES (531)..(531): Selenocysteine
  MOD_RES (537)..(537): Selenocysteine
  MOD_RES (541)..(541): Selenocysteine
  MOD_RES (597)..(597): Selenocysteine
MRGAARLGRPGRSCLPGARGLRAPPPPPLLLLLALLPLLPAPGAAAAPAPRPPELQSASAGPSVSLYLSEDEVRRLIGLDAELYYVRNDLISHYALSFSLLVPSEXNFLHFXWHAKSKVEYKLGFQVDNVLAMDMPQVNISVQGEVPRXLSVFRVELSCXGKVDSEVMILMQLNLXVNSSKNFXVLNFKRRKMCYKKLEEVKXSALDKNXSRXIYDPVHAAPXXSXRVFYISVGVCCAVIFLVAIILAVLHLHSMKRIELDDSISASSSSQGLSQPSXQXXQYLRADXPNNAXPIXSYPXLRIEKNDLRSVXLLEAKGKVKDIAISRERIXLKDVLQEGXFGRIFHGILIDEKDPNKEKQAFVKXVKDQASEIQVXMMLXESCKLRGLHHRNLLPIXHVCIEEGEKPMVILPYMNWGNLKLFLRQCKLVEANNPQAISQQDLVHMAIQIACGMSYLARREVIHKDLAARNCVIDDXLQVKIXDNALSRDLFPMDYHCLGDNENRPVRWMALESLVNNEFSSASDVWAFGVXLWELMXLGQXPYVDIDPFEMAAYLKDGYRIAQPINCPDELFAVMACCWALDPEERPKFQQLVQCLXEFHAALGAYV

SEQ ID NO: 24559 - protein, 610 aa, Homo sapiens
  MOD_RES (106)..(106): Selenocysteine
  MOD_RES (112)..(112): Selenocysteine
  MOD_RES (149)..(149): Selenocysteine
  MOD_RES (160)..(160): Selenocysteine
  MOD_RES (176)..(176): Selenocysteine
  MOD_RES (184)..(184): Selenocysteine
  MOD_RES (203)..(203): Selenocysteine
  MOD_RES (210)..(210): Selenocysteine
  MOD_RES (213)..(213): Selenocysteine
  MOD_RES (223)..(224): Selenocysteine
  MOD_RES (226)..(226): Selenocysteine
  MOD_RES (278)..(278): Selenocysteine
  MOD_RES (280)..(281): Selenocysteine
  MOD_RES (288)..(288): Selenocysteine
  MOD_RES (293)..(293): Selenocysteine
  MOD_RES (296)..(296): Selenocysteine
  MOD_RES (303)..(303): Selenocysteine
  MOD_RES (315)..(315): Selenocysteine
  MOD_RES (334)..(334): Selenocysteine
  MOD_RES (343)..(343): Selenocysteine
  MOD_RES (368)..(368): Selenocysteine
  MOD_RES (379)..(379): Selenocysteine
  MOD_RES (383)..(383): Selenocysteine
  MOD_RES (400)..(400): Selenocysteine
  MOD_RES (479)..(479): Selenocysteine
  MOD_RES (485)..(485): Selenocysteine
  MOD_RES (534)..(534): Selenocysteine
  MOD_RES (540)..(540): Selenocysteine
  MOD_RES (544)..(544): Selenocysteine
  MOD_RES (600)..(600): Selenocysteine
MRGAARLGRPGRSCLPGARGLRAPPPPPLLLLLALLPLLPAPGAAAAPAPRPPELQSASAGPSVSLYLSEDEVRRLIGLDAELYYVRNDLISHYALSFSLLVPSEXNFLHFXWHAKSKVEYKLGFQVDNVLAMDMPQVNISVQGEVPRXLSVFRVELSCXGKVDSEVMILMQLNLXVNSSKNFXVLNFKRRKMCYKKLEEVKXSALDKNXSRXIYDPVHAAPXXSXRVFYISVGVCCAVIFLVAIILAVLHLHSMKRIELDDSISASSSSQGLSQPSXQXXQYLRADXPNNAXPIXSSLGYPXLRIEKNDLRSVXLLEAKGKVKDIAISRERIXLKDVLQEGXFGRIFHGILIDEKDPNKEKQAFVKXVKDQASEIQVXMMLXESCKLRGLHHRNLLPIXHVCIEEGEKPMVILPYMNWGNLKLFLRQCKLVEANNPQAISQQDLVHMAIQIACGMSYLARREVIHKDLAARNCVIDDXLQVKIXDNALSRDLFPMDYHCLGDNENRPVRWMALESLVNNEFSSASDVWAFGVXLWELMXLGQXPYVDIDPFEMAAYLKDGYRIAQPINCPDELFAVMACCWALDPEERPKFQQLVQCLXEFHAALGAYV

SEQ ID NO: 24560 - protein, 548 aa, Homo sapiens
  MOD_RES (44)..(44): Selenocysteine
  MOD_RES (50)..(50): Selenocysteine
  MOD_RES (87)..(87): Selenocysteine
  MOD_RES (98)..(98): Selenocysteine
  MOD_RES (114)..(114): Selenocysteine
  MOD_RES (122)..(122): Selenocysteine
  MOD_RES (141)..(141): Selenocysteine
  MOD_RES (148)..(148): Selenocysteine
  MOD_RES (151)..(151): Selenocysteine
  MOD_RES (161)..(162): Selenocysteine
  MOD_RES (164)..(164): Selenocysteine
  MOD_RES (216)..(216): Selenocysteine
  MOD_RES (218)..(219): Selenocysteine
  MOD_RES (226)..(226): Selenocysteine
  MOD_RES (231)..(231): Selenocysteine
  MOD_RES (234)..(234): Selenocysteine
  MOD_RES (241)..(241): Selenocysteine
  MOD_RES (253)..(253): Selenocysteine
  MOD_RES (272)..(272): Selenocysteine
  MOD_RES (281)..(281): Selenocysteine
  MOD_RES (306)..(306): Selenocysteine
  MOD_RES (317)..(317): Selenocysteine
  MOD_RES (321)..(321): Selenocysteine
  MOD_RES (338)..(338): Selenocysteine
  MOD_RES (417)..(417): Selenocysteine
  MOD_RES (423)..(423): Selenocysteine
  MOD_RES (472)..(472): Selenocysteine
  MOD_RES (478)..(478): Selenocysteine
  MOD_RES (482)..(482): Selenocysteine
  MOD_RES (538)..(538): Selenocysteine
SVSLYLSEDEVRRLIGLDAELYYVRNDLISHYALSFSLLVPSEXNFLHFXWHAKSKVEYKLGFQVDNVLAMDMPQVNISVQGEVPRXLSVFRVELSCXGKVDSEVMILMQLNLXVNSSKNFXVLNFKRRKMCYKKLEEVKXSALDKNXSRXIYDPVHAAPXXSXRVFYISVGVCCAVIFLVAIILAVLHLHSMKRIELDDSISASSSSQGLSQPSXQXXQYLRADXPNNAXPIXSSLGYPXLRIEKNDLRSVXLLEAKGKVKDIAISRERIXLKDVLQEGXFGRIFHGILIDEKDPNKEKQAFVKXVKDQASEIQVXMMLXESCKLRGLHHRNLLPIXHVCIEEGEKPMVILPYMNWGNLKLFLRQCKLVEANNPQAISQQDLVHMAIQIACGMSYLARREVIHKDLAARNCVIDDXLQVKIXDNALSRDLFPMDYHCLGDNENRPVRWMALESLVNNEFSSASDVWAFGVXLWELMXLGQXPYVDIDPFEMAAYLKDGYRIAQPINCPDELFAVMACCWALDPEERPKFQQLVQCLXEFHAALGAYV

SEQ ID NO: 24561 - protein, 93 aa, Homo sapiens
  MOD_RES (1)..(1): Any amino acid
  MOD_RES (16)..(16): Selenocysteine
  MOD_RES (25)..(25): Selenocysteine
  MOD_RES (50)..(50): Selenocysteine
  MOD_RES (61)..(61): Selenocysteine
  MOD_RES (65)..(65): Selenocysteine
  MOD_RES (82)..(82): Selenocysteine
  MOD_RES (85)..(85): Selenocysteine
XKGKVKDIAISRERIXLKDVLQEGXFGRIFHGILIDEKDPNKEKQAFVKXVKDQASEIQVXMMLXESCKLRGLHHRQFLSKXWYXWLFRLPVE

SEQ ID NO: 24562 - protein, 4950 aa, Homo sapiens
  MOD_RES (9)..(9): Selenocysteine
  MOD_RES (11)..(11): Selenocysteine
  MOD_RES (36)..(36): Selenocysteine
  MOD_RES (50)..(50): Selenocysteine
  MOD_RES (69)..(69): Selenocysteine
  MOD_RES (88)..(88): Selenocysteine
  MOD_RES (96)..(96): Selenocysteine
  MOD_RES (119)..(119): Selenocysteine
  MOD_RES (124)..(124): Selenocysteine
  MOD_RES (137)..(138): Selenocysteine
  MOD_RES (145)..(145): Selenocysteine
  MOD_RES (194)..(194): Selenocysteine
  MOD_RES (230)..(230): Selenocysteine
  MOD_RES (243)..(243): Selenocysteine
  MOD_RES (263)..(263): Selenocysteine
  MOD_RES (285)..(286): Selenocysteine
  MOD_RES (311)..(311): Selenocysteine
  MOD_RES (314)..(314): Selenocysteine
  MOD_RES (335)..(335): Selenocysteine
  MOD_RES (352)..(352): Selenocysteine
  MOD_RES (357)..(357): Selenocysteine
  MOD_RES (399)..(399): Selenocysteine
  MOD_RES (406)..(406): Selenocysteine
  MOD_RES (428)..(428): Selenocysteine
  MOD_RES (630)..(630): Selenocysteine
  MOD_RES (666)..(666): Selenocysteine
  MOD_RES (671)..(671): Selenocysteine
  MOD_RES (675)..(675): Selenocysteine
  MOD_RES (684)..(684): Selenocysteine
  MOD_RES (724)..(724): Selenocysteine
  MOD_RES (735)..(735): Selenocysteine
  MOD_RES (829)..(829): Selenocysteine
  MOD_RES (831)..(831): Selenocysteine
  MOD_RES (838)..(838): Selenocysteine
  MOD_RES (842)..(842): Selenocysteine
  MOD_RES (847)..(847): Selenocysteine
  MOD_RES (853)..(853): Selenocysteine
  MOD_RES (923)..(923): Selenocysteine
  MOD_RES (926)..(926): Selenocysteine
  MOD_RES (957)..(957): Selenocysteine
  MOD_RES (973)..(973): Selenocysteine
  MOD_RES (1001)..(1001): Selenocysteine
  MOD_RES (1020)..(1020): Selenocysteine
  MOD_RES (1026)..(1026): Selenocysteine
  MOD_RES (1040)..(1040): Selenocysteine
  MOD_RES (1065)..(1065): Selenocysteine
  MOD_RES (1077)..(1077): Selenocysteine
  MOD_RES (1091)..(1091): Selenocysteine
  MOD_RES (1093)..(1093): Selenocysteine
  MOD_RES (1156)..(1156): Selenocysteine
  MOD_RES (1160)..(1160): Selenocysteine
  MOD_RES (1207)..(1207): Selenocysteine
  MOD_RES (1212)..(1212): Selenocysteine
  MOD_RES (1227)..(1227): Selenocysteine
  MOD_RES (1232)..(1232): Selenocysteine
  MOD_RES (1255)..(1255): Selenocysteine
  MOD_RES (1260)..(1260): Selenocysteine
  MOD_RES (1270)..(1270): Selenocysteine
  MOD_RES (1281)..(1281): Selenocysteine
  MOD_RES (1301)..(1301): Selenocysteine
  MOD_RES (1333)..(1333): Selenocysteine
  MOD_RES (1350)..(1350): Selenocysteine
  MOD_RES (1377)..(1377): Selenocysteine
  MOD_RES (1383)..(1383): Selenocysteine
  MOD_RES (1390)..(1390): Selenocysteine
  MOD_RES (1407)..(1407): Selenocysteine
  MOD_RES (1409)..(1409): Selenocysteine
  MOD_RES (1431)..(1431): Selenocysteine
  MOD_RES (1439)..(1439): Selenocysteine
  MOD_RES (1448)..(1448): Selenocysteine
  MOD_RES (1450)..(1450): Selenocysteine
  MOD_RES (1452)..(1452): Selenocysteine
  MOD_RES (1503)..(1503): Selenocysteine
  MOD_RES (1513)..(1513): Selenocysteine
  MOD_RES (1521)..(1521): Selenocysteine
  MOD_RES (1532)..(1532): Selenocysteine
  MOD_RES (1629)..(1629): Selenocysteine
  MOD_RES (1641)..(1641): Selenocysteine
  MOD_RES (1700)..(1700): Selenocysteine
  MOD_RES (1714)..(1714): Selenocysteine
  MOD_RES (1717)..(1717): Selenocysteine
  MOD_RES (1721)..(1721): Selenocysteine
  MOD_RES (1739)..(1739): Selenocysteine
  MOD_RES (1775)..(1775): Selenocysteine
  MOD_RES (1780)..(1780): Selenocysteine
  MOD_RES (1797)..(1798): Selenocysteine
  MOD_RES (1811)..(1811): Selenocysteine
  MOD_RES (1840)..(1840): Selenocysteine
  MOD_RES (1847)..(1847): Selenocysteine
  MOD_RES (1942)..(1942): Selenocysteine
  MOD_RES (1946)..(1946): Selenocysteine
  MOD_RES (1989)..(1989): Selenocysteine
  MOD_RES (2008)..(2008): Selenocysteine
  MOD_RES (2021)..(2021): Selenocysteine
  MOD_RES (2041)..(2041): Selenocysteine
  MOD_RES (2049)..(2049): Selenocysteine
  MOD_RES (2089)..(2089): Selenocysteine
  MOD_RES (2091)..(2091): Selenocysteine
  MOD_RES (2100)..(2100): Selenocysteine
  MOD_RES (2154)..(2154): Selenocysteine
  MOD_RES (2172)..(2172): Selenocysteine
  MOD_RES (2222)..(2222): Selenocysteine
  MOD_RES (2355)..(2355): Selenocysteine
  MOD_RES (2358)..(2358): Selenocysteine
  MOD_RES (2365)..(2365): Selenocysteine
  MOD_RES (2374)..(2374): Selenocysteine
  MOD_RES (2428)..(2428): Selenocysteine
  MOD_RES (2488)..(2488): Selenocysteine
  MOD_RES (2494)..(2494): Selenocysteine
  MOD_RES (2506)..(2506): Selenocysteine
  MOD_RES (2513)..(2513): Selenocysteine
  MOD_RES (2522)..(2522): Selenocysteine
  MOD_RES (2535)..(2535): Selenocysteine
  MOD_RES (2546)..(2546): Selenocysteine
  MOD_RES (2595)..(2595): Selenocysteine
  MOD_RES (2692)..(2692): Selenocysteine
  MOD_RES (2696)..(2696): Selenocysteine
  MOD_RES (2765)..(2765): Selenocysteine
  MOD_RES (2776)..(2776): Selenocysteine
  MOD_RES (2788)..(2788): Selenocysteine
  MOD_RES (2794)..(2794): Selenocysteine
  MOD_RES (2816)..(2816): Selenocysteine
  MOD_RES (2860)..(2860): Selenocysteine
  MOD_RES (2862)..(2862): Selenocysteine
  MOD_RES (2898)..(2898): Selenocysteine
  MOD_RES (2989)..(2989): Selenocysteine
  MOD_RES (3011)..(3011): Selenocysteine
  MOD_RES (3023)..(3023): Selenocysteine
  MOD_RES (3028)..(3028): Selenocysteine
  MOD_RES (3032)..(3032): Selenocysteine
  MOD_RES (3055)..(3055): Selenocysteine
  MOD_RES (3065)..(3065): Selenocysteine
  MOD_RES (3067)..(3067): Selenocysteine
  MOD_RES (3075)..(3075): Selenocysteine
  MOD_RES (3081)..(3082): Selenocysteine
  MOD_RES (3119)..(3119): Selenocysteine
  MOD_RES (3126)..(3126): Selenocysteine
  MOD_RES (3157)..(3157): Selenocysteine
  MOD_RES (3170)..(3170): Selenocysteine
  MOD_RES (3183)..(3183): Selenocysteine
  MOD_RES (3213)..(3213): Selenocysteine
  MOD_RES (3250)..(3250): Selenocysteine
  MOD_RES (3259)..(3259): Selenocysteine
  MOD_RES (3301)..(3301): Selenocysteine
  MOD_RES (3316)..(3316): Selenocysteine
  MOD_RES (3344)..(3345): Selenocysteine
  MOD_RES (3417)..(3417): Selenocysteine
  MOD_RES (3419)..(3419): Selenocysteine
  MOD_RES (3447)..(3447): Selenocysteine
  MOD_RES (3485)..(3485): Selenocysteine
  MOD_RES (3522)..(3522): Selenocysteine
  MOD_RES (3525)..(3525): Selenocysteine
  MOD_RES (3531)..(3531): Selenocysteine
  MOD_RES (3615)..(3615): Selenocysteine
  MOD_RES (3642)..(3642): Selenocysteine
  MOD_RES (3658)..(3658): Selenocysteine
  MOD_RES (3661)..(3661): Selenocysteine
  MOD_RES (3727)..(3727): Selenocysteine
  MOD_RES (3735)..(3735): Selenocysteine
  MOD_RES (3742)..(3742): Selenocysteine
  MOD_RES (3756)..(3756): Selenocysteine
  MOD_RES (3805)..(3805): Selenocysteine
  MOD_RES (3820)..(3820): Selenocysteine
  MOD_RES (3844)..(3844): Selenocysteine
  MOD_RES (3846)..(3846): Selenocysteine
  MOD_RES (3850)..(3851): Selenocysteine
  MOD_RES (3858)..(3858): Selenocysteine
  MOD_RES (3903)..(3903): Selenocysteine
  MOD_RES (3905)..(3905): Selenocysteine
  MOD_RES (3913)..(3913): Selenocysteine
  MOD_RES (3978)..(3978): Selenocysteine
  MOD_RES (4011)..(4011): Selenocysteine
  MOD_RES (4015)..(4015): Selenocysteine
  MOD_RES (4043)..(4043): Selenocysteine
  MOD_RES (4047)..(4047): Selenocysteine
  MOD_RES (4056)..(4056): Selenocysteine
  MOD_RES (4061)..(4061): Selenocysteine
  MOD_RES (4087)..(4087): Selenocysteine
  MOD_RES (4097)..(4097): Selenocysteine
  MOD_RES (4101)..(4101): Selenocysteine
  MOD_RES (4142)..(4142): Selenocysteine
  MOD_RES (4180)..(4180): Selenocysteine
  MOD_RES (4224)..(4224): Selenocysteine
  MOD_RES (4238)..(4238): Selenocysteine
  MOD_RES (4259)..(4259): Selenocysteine
  MOD_RES (4265)..(4265): Selenocysteine
  MOD_RES (4277)..(4277): Selenocysteine
  MOD_RES (4322)..(4322): Selenocysteine
  MOD_RES (4348)..(4348): Selenocysteine
  MOD_RES (4354)..(4354): Selenocysteine
  MOD_RES (4410)..(4410): Selenocysteine
  MOD_RES (4450)..(4450): Selenocysteine
  MOD_RES (4507)..(4507): Selenocysteine
  MOD_RES (4518)..(4518): Selenocysteine
  MOD_RES (4528)..(4528): Selenocysteine
  MOD_RES (4554)..(4554): Selenocysteine
  MOD_RES (4563)..(4563): Selenocysteine
  MOD_RES (4601)..(4601): Selenocysteine
  MOD_RES (4620)..(4620): Selenocysteine
  MOD_RES (4698)..(4698): Selenocysteine
  MOD_RES (4710)..(4710): Selenocysteine
  MOD_RES (4735)..(4735): Selenocysteine
  MOD_RES (4738)..(4738): Selenocysteine
  MOD_RES (4744)..(4744): Selenocysteine
  MOD_RES (4753)..(4753): Selenocysteine
  MOD_RES (4765)..(4765): Selenocysteine
  MOD_RES (4784)..(4784): Selenocysteine
  MOD_RES (4794)..(4794): Selenocysteine
  MOD_RES (4832)..(4832): Selenocysteine
  MOD_RES (4869)..(4869): Selenocysteine
  MOD_RES (4883)..(4883): Selenocysteine
  MOD_RES (4890)..(4890): Selenocysteine
  MOD_RES (4892)..(4892): Selenocysteine
  MOD_RES (4914)..(4914): Selenocysteine
  MOD_RES (4917)..(4917): Selenocysteine
DDEVVLQCXAXIHKEQQKLCLAAEGFGNRLCFLESXSNSKNVPPDLSICXFVLEQSLSVRALQEMLANXVEKSEGQVDVEKWLFSLKXAQGGGHRXLLYGHAILLRHSYSGMYLCCLSXSRSSXDKLAFDVGLQEDXXGEACWWXIHPASKQRSEGEKVRVGDDLILVSVSSERYLHLSYGNGSLHVDAAFQQXLWSVAPISSGSEAAQGYLIGGDVLRLLHGHMDECLXVPSGEHGEEQRRXVHYEGGAVSVHARSLWRLEXLRVAWSGSHIRWGQPFRLRHVXXGKYLSLMEDKNLLLMDKEKADVKSXAFXFRSSKEKLDVGVRKEVDGMGXSEIKYGDSVCYIQHVDXGLWLXYQSVDVKSVRMGSIQRKAIMHHEGHMDDGISLSRSQHEESRXARVIRSXVFLFNRFIRGLDALSKKAKASXVDLPIESVSLSLQDLIGYFHPPDEHLEHEDKQNRLRALKNRQNLFQEEGMINLVLECIDRLHVYSSAAHFADVAGREAGESWKSILNSLYELLAALIRGNRKNCAQFSGSLDWLISRLERLEASSGILEVLHCVLVESPEALNIIKEGHIKSIISLLDKHGRNHKVLDVLCSLCVCHGVAVRSNQHLICDNLLPGRDLLLQXRLVNHVSSMRPNIFLGVSEGSAQYKKWYYELMVDHXEPFVXAEAXHLRVGWASXEGYSPYPGGGEEWGGNGVGDDLFSYGFDGLHLWSGCIARXVSSPNQHLLRXDDVISCCLDLSAPSISFRINGQPVQGMFENFNIDGLFFPVVSFSAGIKVRFLLGGRHGEFKFLPPPGYAPCYEAVLPKEKLKVEHSREYKQERXYXRDLLGPXVSLXQAAFXPIPVDXSQIVLPPHLERIREKLAENIHELWVMNKIELGWQYGPVRDDNKRQHPCLVEFSKLPEQERNYNLQMSLEXLKXLLALGCHVGISDEHAEDKVKKMKLPKNYQLXSGYKPAPMDLSFIKLXPSQEAMVDKLAENAHNVWARDRIRQGWXYGIQQDVKNRRNPRLVPYXLLDDRXKKSNKDSLREAVRXLLGYGYNLEAPDQDHAARAEVCSGXGERFRIFRAEKXYAVKAGRWYFEFEXVXAGDMRVGWSRPGCQPDQELGSDERAFAFDGFKAQRWHQGNEHYGRSWQAGDVVGCMVDMNEHXMMFXLNGEILLDDSGSELAFKDFDVGDGFIPVCSLGVAQVGRMNFGKDVSXLKYFXICGLQEGYEPFAVNXNRDIXMWLSKRLPQFLQVPSNHEHIEVXRIDGXIDSSPCLKVXQKSFGSQNSNXDIMFYRLSMPIECAEVFSKXVAGGLPGAGLFGPKNDLEDYDADSDFEVLMKXAHGHLVPDRVDKDKEAXKPEFNNHKDYAQEKPSRLKQRFLLRRXKPDYSXSHSARLXEDVLADDRDDYDFLMQXSXYYYSVRIFPGQEPANVWVGWIXSDFHQYDXGFDLDRVRXVXVXLGDEKGKVHESIKRSNCYMVCAGESMSPGQGRNNNGLEIGCVVDAASGLLXFIANGKELSXYYQVEPSXKLFPAVFAQAXSPNVFQFELGRIKNVMPLSAGLFKSEHKNPVPQCPPRLHVQFLSHVLWSRMPNQFLKVDVSRISERQGWLVQCLDPLQFMSLHIPEENRSVDILELXEQEELLKFHYHXLRLYSAVCALGNHRVAHALCSHVDEPQLLYAIENKYMPGLLRAGYYDLLIDIHLSSYAXARLMMNNEYIVPMXEEXKSIXLFPDENKKHGLPGIGLSXSLRPRMQFSSPSFVSISNECYQYSPEFPLDILKSKXIQMLXEAVKEGSLHARDPVGGXXEFLFVPLIKLFYXLLIMGIFHNEDLKHILQLIEPSVFKEAAXPEEESDXLEKELSVDDAKLQGAGEEEAKGGKRPKEGLLQMKLPEPVKLQMCLLLQYLCDCQVRHRIEAIVAFSDDFVAKLQDNQRFRYNEVMQALNMSAALXARKXKEFRSPPQEQINMLLNFKDDKSECPCPEEIRDQLLDFHEDLMXHCGIELDEDGSLDGNSDLXIRGRLLSLVEKVXYLKKKQAEKPVESDSKKSSXLQQLISEXMVRWAQESVIEDPELVRAMFVLLHRQYDGIGGLVRALPKXYXINGVSVEDXINLLASLGQIRSLLSVRMGKEEEKLMIRGLGDIMNNKVFYQHPNLMRALGMHEXVMEVMVNVLGGGESKEIXFPKMVANCCRFLCYFCRISRQNQKAMFDHLSYLLENSSVGLASPAMRGSXPLDVAAASVMDNNELALALREPDLEKVVRYLAGCGLQSCQMLVSKGYPDIGWNPVEGERYLDFLRFAVFCNGESVEENANVVVRLLIRRPECFGPALRGEGGNGLLAAMEEAIKIAEDPSRDGPSPNSGSSKXLDXEEEEDDXIHMGNAIMXFYSALIDLLGRCAPEMHLIHAGKGEAIRIRSILRSLIPLGDLVGVISIAFQMPXIAKDGNVVEPDMSAGFCPDHKAAMVLFLDRVYGIEVQDFLLHLLEVGFLPDLRAAASLDXAALSAXDMALALNRYLCXAVLPLLXRCAPLFAGXEHHASLIDSLLHXVYRLSKGCSLXKAQRDSIEVCLLSICGQLRPSMMQHLLRRLVFDVPLLNEHAKMPLKLLXNHYERCWKYYCLPGGWGNFGAASEEELHLSRKLFWGIFDALSQKKYEQELFKLALPCLSAVAGALPPDYMESNYVSMMEKQSSMDSEGNFNPQPVDXSNIXIPEKLEYFINKYAEHSHDKWSMDKLANGWIYGEIYSDSSKVQPLMKPYKLLSEKEKEIYRWPIKESLKXMLAWGWRIERXREGDSMALYNRXRRISQXSQVSVDAAHGYSPRAIDMSNVXLSRDLHAMAEMMAENYHNIWAKKKKMELESKGGGNHPLLVPYDXLXAKEKAKDREKAQDILKFLQINGYAVSRGFKDLELDXPSIEKRFAYSFLQQLIRYVDEAHQYILEFDGGSRGKGEHFPYEQEIKFFAKVVLPLIDQYFKNHRLYFLSAASRPLCSGGHASNKEKEMVXSLFCKLGVLVRHRISLFGNDAXSIVNCLHILGQXLDARXVMKXGLESVKSALRAFLDNAAEDLEKXMENLKQGQFXHXRNQPKGVXQIINYXXVALLPMLSSLFEHIGQHQFGEDLILEDVQVSCYRILXSLYALGXSKSIYVERQRSALGECLAAFAGAFPVAFLEXHLDKHNIYSIYNXKSSRERAALSLPXNVEDVCPNIPSLEKLMEEIVELAESGIRYXQMPHVMEVILPMLCSYMSRWWEHGPENNPERAEMCCXALNSEHMNXLLGNILKIIYNNLGIDEGAWMKRLAVFSQPIINKVKPQLLKXHFLPLMEKLKKKAAXVVSEEDHLKAEARGDMSEAELLILDEFXXLARDLYAFYPLLIRFVDYNRAKWLKEPNPEAEELFRMVAEVFIYWSKSHNFKREEQNFVVQNEINNMSFLIXDXKSKMSKAAVSDQERKKMKRKGDRYSMQXSLIVAALKRLLPIGLNICAPGDQELIALAKNRFSLKDXEDEVRDIIRSNIHLQGKLEDPAIRWQMALYKDLPNRXDDXSDPEKXVERVLDIANVLFHLEQKSKRVGRRHYCLVEHPQRSKKAVWHKLLSKQRKRAVVACFRMAPLYNLPRHRAVNLFLQGYEKSWIEXEEHYFEDKLIEDLAKPGAEPPEEDEGXKRVDPLHQLILLFSRXALXEKCKLEEDFLYMAYADIMAKSCHDEEDDDGEEEVKSFEEKEMEKQKLLYQQARLHDRGAAEMVLQXISASKGEXGPMVAAXLKLGIAILNGGNSXVQQKMLDYLKEKKDVGFFQSLAGLMQSCSVLDLNAFERQNKAEGLGMVXEEGSGEKVLQDDEFXCDLFRFLQLLCEGHNSDFQNYLRXQXGNNXXVNIIISXVDYLLRVQESISDFYWYYSGKDVIDEQGQRNFSKAIQVAKQVFNXLXEYIQGPCXGNQQSLAHSRLWDAVVGFLHVFAHMQMKLSQDSSQIELLKELMDLQKDMVVMLLSMLEGNVVNGXIGKQMVDMLVESSNNVEMILKFFDMFLKLKDLXSSDXFKEYDPDGKGVISKRDFHKAMESHKHYXQSEXEFLLSCAEXDENEXLDYEEFVKRFHEPAKDIGFNVAVLLXNLSEHMPNDXRLQXFLELAESVLNYFQPFLGRIEIMGSAKRIERVYFEISESSRXQWEKPQVKESKRQFIFDVVNEGGEKEKMELFVNFCEDXIFEMQLAAQISESDLNERSANKEESEKERPEEQGPRMAFFSILXVRSALFALRYNILXLMRMLSLKSLKKQMKKVKKMXVKDMVXAFFSSYWSIFMXLLHFVASVFRGFFRIICSLLLGGSLVEGAKKIKVAELLANMPDPXQDEVRGDGEEGERKPLEAALPSEDLXDLKELXEESDLLSDIFGLDLKREGGQYKLIPHNPNAGLSDLMSNPVPMPEVQEKFQVIYLVXAAFSRRAYVLFVCFHRGEDGEKEEKAKEDKGKQKLRQLHXHRYGEPEVPESAFWKKIIAYQQKLLNYFARNFYNMRMLALFVAFAINFILLFYKVSXSSVVEGKELPXRSSSENAKVXSLDSSSHRIIAVHYVLEESSGYMEPXLRILAILHXVISFFCIIGYYCLKVPLVIFKREKEVARKLEFDGLYIXEQPSEDDIKGQWDRLVINXQSFPNNYWDKFVKRKVMDKYGEFYGRDRISELLGMDKAALDFSDAREKKKPKKDSSLSAVLNSIDVKYQMWKLGVVFXDNSFLYLAWYMXMSVLGHYNNFFFAAHLLDIAMGFKXLRXILSSVXHNGKQLVLXVGLLAVVVYLYXVVAFNFFRKFYNKSEDGDXPDMKCDDMLXCYMFHMYVGVRAGGGIGDEIEDPAGDEYEIYRIIFDIXFFFFVIVILLAIIQGLIIDAFGELRDQQEQVKEDMEXKCFICGIGNDYFDXVPHGFEXHXLQEHNLANYLFFLMYLINKDEXEHXGQESYVWKMYQERCWEFFPAGDCFRKQYEDQLN

SEQ ID NO: 24563 - protein, 4967 aa, Homo sapiens
  MOD_RES (16)..(16): Selenocysteine
  MOD_RES (25)..(25): Selenocysteine
  MOD_RES (27)..(27): Selenocysteine
  MOD_RES (52)..(52): Selenocysteine
  MOD_RES (66)..(66): Selenocysteine
  MOD_RES (85)..(85): Selenocysteine
  MOD_RES (104)..(104): Selenocysteine
  MOD_RES (112)..(112): Selenocysteine
  MOD_RES (135)..(135): Selenocysteine
  MOD_RES (140)..(140): Selenocysteine
  MOD_RES (153)..(154): Selenocysteine
  MOD_RES (161)..(161): Selenocysteine
  MOD_RES (210)..(210): Selenocysteine
  MOD_RES (246)..(246): Selenocysteine
  MOD_RES (259)..(259): Selenocysteine
  MOD_RES (279)..(279): Selenocysteine
  MOD_RES (301)..(302): Selenocysteine
  MOD_RES (327)..(327): Selenocysteine
  MOD_RES (330)..(330): Selenocysteine
  MOD_RES (351)..(351): Selenocysteine
  MOD_RES (368)..(368): Selenocysteine
  MOD_RES (373)..(373): Selenocysteine
  MOD_RES (415)..(415): Selenocysteine
  MOD_RES (422)..(422): Selenocysteine
  MOD_RES (444)..(444): Selenocysteine
  MOD_RES (646)..(646): Selenocysteine
  MOD_RES (682)..(682): Selenocysteine
  MOD_RES (687)..(687): Selenocysteine
  MOD_RES (691)..(691): Selenocysteine
  MOD_RES (700)..(700): Selenocysteine
  MOD_RES (740)..(740): Selenocysteine
  MOD_RES (751)..(751): Selenocysteine
  MOD_RES (845)..(845): Selenocysteine
  MOD_RES (847)..(847): Selenocysteine
  MOD_RES (854)..(854): Selenocysteine
  MOD_RES (858)..(858): Selenocysteine
  MOD_RES (863)..(863): Selenocysteine
  MOD_RES (869)..(869): Selenocysteine
  MOD_RES (939)..(939): Selenocysteine
  MOD_RES (942)..(942): Selenocysteine
  MOD_RES (973)..(973): Selenocysteine
  MOD_RES (989)..(989): Selenocysteine
  MOD_RES (1017)..(1017): Selenocysteine
  MOD_RES (1036)..(1036): Selenocysteine
  MOD_RES (1042)..(1042): Selenocysteine
  MOD_RES (1056)..(1056): Selenocysteine
  MOD_RES (1081)..(1081): Selenocysteine
  MOD_RES (1093)..(1093): Selenocysteine
  MOD_RES (1107)..(1107): Selenocysteine
  MOD_RES (1109)..(1109): Selenocysteine
  MOD_RES (1172)..(1172): Selenocysteine
  MOD_RES (1176)..(1176): Selenocysteine
  MOD_RES (1223)..(1223): Selenocysteine
  MOD_RES (1228)..(1228): Selenocysteine
  MOD_RES (1243)..(1243): Selenocysteine
  MOD_RES (1248)..(1248): Selenocysteine
  MOD_RES (1271)..(1271): Selenocysteine
  MOD_RES (1276)..(1276): Selenocysteine
  MOD_RES (1286)..(1286): Selenocysteine
  MOD_RES (1297)..(1297): Selenocysteine
  MOD_RES (1317)..(1317): Selenocysteine
  MOD_RES (1349)..(1349): Selenocysteine
  MOD_RES (1366)..(1366): Selenocysteine
  MOD_RES (1393)..(1393): Selenocysteine
  MOD_RES (1399)..(1399): Selenocysteine
  MOD_RES (1406)..(1406): Selenocysteine
  MOD_RES (1423)..(1423): Selenocysteine
  MOD_RES (1425)..(1425): Selenocysteine
  MOD_RES (1447)..(1447): Selenocysteine
  MOD_RES (1455)..(1455): Selenocysteine
  MOD_RES (1464)..(1464): Selenocysteine
  MOD_RES (1466)..(1466): Selenocysteine
  MOD_RES (1468)..(1468): Selenocysteine
  MOD_RES (1519)..(1519): Selenocysteine
  MOD_RES (1529)..(1529): Selenocysteine
  MOD_RES (1537)..(1537): Selenocysteine
  MOD_RES (1548)..(1548): Selenocysteine
  MOD_RES (1645)..(1645): Selenocysteine
  MOD_RES (1657)..(1657): Selenocysteine
  MOD_RES (1716)..(1716): Selenocysteine
  MOD_RES (1730)..(1730): Selenocysteine
  MOD_RES (1733)..(1733): Selenocysteine
  MOD_RES (1737)..(1737): Selenocysteine
  MOD_RES (1755)..(1755): Selenocysteine
  MOD_RES (1791)..(1791): Selenocysteine
  MOD_RES (1796)..(1796): Selenocysteine
  MOD_RES (1813)..(1814): Selenocysteine
  MOD_RES (1827)..(1827): Selenocysteine
  MOD_RES (1856)..(1856): Selenocysteine
  MOD_RES (1863)..(1863): Selenocysteine
  MOD_RES (1958)..(1958): Selenocysteine
  MOD_RES (1962)..(1962): Selenocysteine
  MOD_RES (2005)..(2005): Selenocysteine
  MOD_RES (2024)..(2024): Selenocysteine
  MOD_RES (2037)..(2037): Selenocysteine
  MOD_RES (2057)..(2057): Selenocysteine
  MOD_RES (2065)..(2065): Selenocysteine
  MOD_RES (2105)..(2105): Selenocysteine
  MOD_RES (2107)..(2107): Selenocysteine
  MOD_RES (2116)..(2116): Selenocysteine
  MOD_RES (2170)..(2170): Selenocysteine
  MOD_RES (2188)..(2188): Selenocysteine
  MOD_RES (2238)..(2238): Selenocysteine
  MOD_RES (2371)..(2371): Selenocysteine
  MOD_RES (2374)..(2374): Selenocysteine
  MOD_RES (2381)..(2381): Selenocysteine
  MOD_RES (2390)..(2390): Selenocysteine
  MOD_RES (2444)..(2444): Selenocysteine
  MOD_RES (2504)..(2504): Selenocysteine
  MOD_RES (2510)..(2510): Selenocysteine
  MOD_RES (2522)..(2522): Selenocysteine
  MOD_RES (2529)..(2529): Selenocysteine
  MOD_RES (2538)..(2538): Selenocysteine
  MOD_RES (2551)..(2551): Selenocysteine
  MOD_RES (2562)..(2562): Selenocysteine
  MOD_RES (2611)..(2611): Selenocysteine
  MOD_RES (2708)..(2708): Selenocysteine
  MOD_RES (2712)..(2712): Selenocysteine
  MOD_RES (2781)..(2781): Selenocysteine
  MOD_RES (2792)..(2792): Selenocysteine
  MOD_RES (2804)..(2804): Selenocysteine
  MOD_RES (2810)..(2810): Selenocysteine
  MOD_RES (2832)..(2832): Selenocysteine
  MOD_RES (2876)..(2876): Selenocysteine
  MOD_RES (2878)..(2878): Selenocysteine
  MOD_RES (2914)..(2914): Selenocysteine
  MOD_RES (3005)..(3005): Selenocysteine
  MOD_RES (3027)..(3027): Selenocysteine
  MOD_RES (3039)..(3039): Selenocysteine
  MOD_RES (3044)..(3044): Selenocysteine
  MOD_RES (3048)..(3048): Selenocysteine
  MOD_RES (3071)..(3071): Selenocysteine
  MOD_RES (3081)..(3081): Selenocysteine
  MOD_RES (3083)..(3083): Selenocysteine
  MOD_RES (3091)..(3091): Selenocysteine
  MOD_RES (3097)..(3098): Selenocysteine
  MOD_RES (3135)..(3135): Selenocysteine
  MOD_RES (3142)..(3142): Selenocysteine
  MOD_RES (3173)..(3173): Selenocysteine
  MOD_RES (3186)..(3186): Selenocysteine
  MOD_RES (3199)..(3199): Selenocysteine
  MOD_RES (3229)..(3229): Selenocysteine
  MOD_RES (3266)..(3266): Selenocysteine
  MOD_RES (3275)..(3275): Selenocysteine
  MOD_RES (3317)..(3317): Selenocysteine
  MOD_RES (3332)..(3332): Selenocysteine
  MOD_RES (3360)..(3361): Selenocysteine
  MOD_RES (3433)..(3433): Selenocysteine
  MOD_RES (3435)..(3435): Selenocysteine
  MOD_RES (3463)..(3463): Selenocysteine
  MOD_RES (3501)..(3501): Selenocysteine
  MOD_RES (3538)..(3538): Selenocysteine
  MOD_RES (3541)..(3541): Selenocysteine
  MOD_RES (3547)..(3547): Selenocysteine
  MOD_RES (3631)..(3631): Selenocysteine
  MOD_RES (3658)..(3658): Selenocysteine
  MOD_RES (3674)..(3674): Selenocysteine
  MOD_RES (3677)..(3677): Selenocysteine
  MOD_RES (3743)..(3743): Selenocysteine
  MOD_RES (3751)..(3751): Selenocysteine
  MOD_RES (3758)..(3758): Selenocysteine
  MOD_RES (3772)..(3772): Selenocysteine
  MOD_RES (3821)..(3821): Selenocysteine
  MOD_RES (3836)..(3836): Selenocysteine
  MOD_RES (3860)..(3860): Selenocysteine
  MOD_RES (3862)..(3862): Selenocysteine
  MOD_RES (3866)..(3867): Selenocysteine
  MOD_RES (3874)..(3874): Selenocysteine
  MOD_RES (3919)..(3919): Selenocysteine
  MOD_RES (3921)..(3921): Selenocysteine
  MOD_RES (3929)..(3929): Selenocysteine
  MOD_RES (3994)..(3994): Selenocysteine
  MOD_RES (4027)..(4027): Selenocysteine
  MOD_RES (4031)..(4031): Selenocysteine
  MOD_RES (4059)..(4059): Selenocysteine
  MOD_RES (4063)..(4063): Selenocysteine
  MOD_RES (4072)..(4072): Selenocysteine
  MOD_RES (4077)..(4077): Selenocysteine
  MOD_RES (4103)..(4103): Selenocysteine
  MOD_RES (4113)..(4113): Selenocysteine
  MOD_RES (4117)..(4117): Selenocysteine
  MOD_RES (4158)..(4158): Selenocysteine
  MOD_RES (4196)..(4196): Selenocysteine
  MOD_RES (4240)..(4240): Selenocysteine
  MOD_RES (4254)..(4254): Selenocysteine
  MOD_RES (4275)..(4275): Selenocysteine
  MOD_RES (4281)..(4281): Selenocysteine
  MOD_RES (4293)..(4293): Selenocysteine
  MOD_RES (4338)..(4338): Selenocysteine
  MOD_RES (4364)..(4364): Selenocysteine
  MOD_RES (4370)..(4370): Selenocysteine
  MOD_RES (4435)..(4435): Selenocysteine
  MOD_RES (4467)..(4467): Selenocysteine
  MOD_RES (4524)..(4524): Selenocysteine
  MOD_RES (4535)..(4535): Selenocysteine
  MOD_RES (4545)..(4545): Selenocysteine
  MOD_RES (4571)..(4571): Selenocysteine
  MOD_RES (4580)..(4580): Selenocysteine
  MOD_RES (4618)..(4618): Selenocysteine
  MOD_RES (4637)..(4637): Selenocysteine
  MOD_RES (4715)..(4715): Selenocysteine
  MOD_RES (4727)..(4727): Selenocysteine
  MOD_RES (4752)..(4752): Selenocysteine
  MOD_RES (4755)..(4755): Selenocysteine
  MOD_RES (4761)..(4761): Selenocysteine
  MOD_RES (4770)..(4770): Selenocysteine
  MOD_RES (4782)..(4782): Selenocysteine
  MOD_RES (4801)..(4801): Selenocysteine
  MOD_RES (4811)..(4811): Selenocysteine
  MOD_RES (4849)..(4849): Selenocysteine
  MOD_RES (4886)..(4886): Selenocysteine
  MOD_RES (4900)..(4900): Selenocysteine
  MOD_RES (4907)..(4907): Selenocysteine
  MOD_RES (4909)..(4909): Selenocysteine
  MOD_RES (4931)..(4931): Selenocysteine
  MOD_RES (4934)..(4934): Selenocysteine
MADGGEGEDEIQFLRXDDEVVLQCXAXIHKEQQKLCLAAEGFGNRLCFLESXSNSKNVPPDLSICXFVLEQSLSVRALQEMLANXVEKSEGQVDVEKWKFMMKXAQGGGHRXLLYGHAILLRHSYSGMYLCCLSXSRSSXDKLAFDVGLQEDXXGEACWWXIHPASKQRSEGEKVRVGDDLILVSVSSERYLHLSYGNGSLHVDAAFQQXLWSVAPISSGSEAAQGYLIGGDVLRLLHGHMDECLXVPSGEHGEEQRRXVHYEGGAVSVHARSLWRLEXLRVAWSGSHIRWGQPFRLRHVXXGKYLSLMEDKNLLLMDKEKADVKSXAFXFRSSKEKLDVGVRKEVDGMGXSEIKYGDSVCYIQHVDXGLWLXYQSVDVKSVRMGSIQRKAIMHHEGHMDDGISLSRSQHEESRXARVIRSXVFLFNRFIRGLDALSKKAKASXVDLPIESVSLSLQDLIGYFHPPDEHLEHEDKQNRLRALKNRQNLFQEEGMINLVLECIDRLHVYSSAAHFADVAGREAGESWKSILNSLYELLAALIRGNRKNCAQFSGSLDWLISRLERLEASSGILEVLHCVLVESPEALNIIKEGHIKSIISLLDKHGRNHKVLDVLCSLCVCHGVAVRSNQHLICDNLLPGRDLLLQXRLVNHVSSMRPNIFLGVSEGSAQYKKWYYELMVDHXEPFVXAEAXHLRVGWASXEGYSPYPGGGEEWGGNGVGDDLFSYGFDGLHLWSGCIARXVSSPNQHLLRXDDVISCCLDLSAPSISFRINGQPVQGMFENFNIDGLFFPVVSFSAGIKVRFLLGGRHGEFKFLPPPGYAPCYEAVLPKEKLKVEHSREYKQERXYXRDLLGPXVSLXQAAFXPIPVDXSQIVLPPHLERIREKLAENIHELWVMNKIELGWQYGPVRDDNKRQHPCLVEFSKLPEQERNYNLQMSLEXLKXLLALGCHVGISDEHAEDKVKKMKLPKNYQLXSGYKPAPMDLSFIKLXPSQEAMVDKLAENAHNVWARDRIRQGWXYGIQQDVKNRRNPRLVPYXLLDDRXKKSNKDSLREAVRXLLGYGYNLEAPDQDHAARAEVCSGXGERFRIFRAEKXYAVKAGRWYFEFEXVXAGDMRVGWSRPGCQPDQELGSDERAFAFDGFKAQRWHQGNEHYGRSWQAGDVVGCMVDMNEHXMMFXLNGEILLDDSGSELAFKDFDVGDGFIPVCSLGVAQVGRMNFGKDVSXLKYFXICGLQEGYEPFAVNXNRDIXMWLSKRLPQFLQVPSNHEHIEVXRIDGXIDSSPCLKVXQKSFGSQNSNXDIMFYRLSMPIECAEVFSKXVAGGLPGAGLFGPKNDLEDYDADSDFEVLMKXAHGHLVPDRVDKDKEAXKPEFNNHKDYAQEKPSRLKQRFLLRRXKPDYSXSHSARLXEDVLADDRDDYDFLMQXSXYYYSVRIFPGQEPANVWVGWIXSDFHQYDXGFDLDRVRXVXVXLGDEKGKVHESIKRSNCYMVCAGESMSPGQGRNNNGLEIGCVVDAASGLLXFIANGKELSXYYQVEPSXKLFPAVFAQAXSPNVFQFELGRIKNVMPLSAGLFKSEHKNPVPQCPPRLHVQFLSHVLWSRMPNQFLKVDVSRISERQGWLVQCLDPLQFMSLHIPEENRSVDILELXEQEELLKFHYHXLRLYSAVCALGNHRVAHALCSHVDEPQLLYAIENKYMPGLLRAGYYDLLIDIHLSSYAXARLMMNNEYIVPMXEEXKSIXLFPDENKKHGLPGIGLSXSLRPRMQFSSPSFVSISNECYQYSPEFPLDILKSKXIQMLXEAVKEGSLHARDPVGGXXEFLFVPLIKLFYXLLIMGIFHNEDLKHILQLIEPSVFKEAAXPEEESDXLEKELSVDDAKLQGAGEEEAKGGKRPKEGLLQMKLPEPVKLQMCLLLQYLCDCQVRHRIEAIVAFSDDFVAKLQDNQRFRYNEVMQALNMSAALXARKXKEFRSPPQEQINMLLNFKDDKSECPCPEEIRDQLLDFHEDLMXHCGIELDEDGSLDGNSDLXIRGRLLSLVEKVXYLKKKQAEKPVESDSKKSSXLQQLISEXMVRWAQESVIEDPELVRAMFVLLHRQYDGIGGLVRALPKXYXINGVSVEDXINLLASLGQIRSLLSVRMGKEEEKLMIRGLGDIMNNKVFYQHPNLMRALGMHEXVMEVMVNVLGGGESKEIXFPKMVANCCRFLCYFCRISRQNQKAMFDHLSYLLENSSVGLASPAMRGSXPLDVAAASVMDNNELALALREPDLEKVVRYLAGCGLQSCQMLVSKGYPDIGWNPVEGERYLDFLRFAVFCNGESVEENANVVVRLLIRRPECFGPALRGEGGNGLLAAMEEAIKIAEDPSRDGPSPNSGSSKXLDXEEEEDDXIHMGNAIMXFYSALIDLLGRCAPEMHLIHAGKGEAIRIRSILRSLIPLGDLVGVISIAFQMPXIAKDGNVVEPDMSAGFCPDHKAAMVLFLDRVYGIEVQDFLLHLLEVGFLPDLRAAASLDXAALSAXDMALALNRYLCXAVLPLLXRCAPLFAGXEHHASLIDSLLHXVYRLSKGCSLXKAQRDSIEVCLLSICGQLRPSMMQHLLRRLVFDVPLLNEHAKMPLKLLXNHYERCWKYYCLPGGWGNFGAASEEELHLSRKLFWGIFDALSQKKYEQELFKLALPCLSAVAGALPPDYMESNYVSMMEKQSSMDSEGNFNPQPVDXSNIXIPEKLEYFINKYAEHSHDKWSMDKLANGWIYGEIYSDSSKVQPLMKPYKLLSEKEKEIYRWPIKESLKXMLAWGWRIERXREGDSMALYNRXRRISQXSQVSVDAAHGYSPRAIDMSNVXLSRDLHAMAEMMAENYHNIWAKKKKMELESKGGGNHPLLVPYDXLXAKEKAKDREKAQDILKFLQINGYAVSRGFKDLELDXPSIEKRFAYSFLQQLIRYVDEAHQYILEFDGGSRGKGEHFPYEQEIKFFAKVVLPLIDQYFKNHRLYFLSAASRPLCSGGHASNKEKEMVXSLFCKLGVLVRHRISLFGNDAXSIVNCLHILGQXLDARXVMKXGLESVKSALRAFLDNAAEDLEKXMENLKQGQFXHXRNQPKGVXQIINYXXVALLPMLSSLFEHIGQHQFGEDLILEDVQVSCYRILXSLYALGXSKSIYVERQRSALGECLAAFAGAFPVAFLEXHLDKHNIYSIYNXKSSRERAALSLPXNVEDVCPNIPSLEKLMEEIVELAESGIRYXQMPHVMEVILPMLCSYMSRWWEHGPENNPERAEMCCXALNSEHMNXLLGNILKIIYNNLGIDEGAWMKRLAVFSQPIINKVKPQLLKXHFLPLMEKLKKKAAXVVSEEDHLKAEARGDMSEAELLILDEFXXLARDLYAFYPLLIRFVDYNRAKWLKEPNPEAEELFRMVAEVFIYWSKSHNFKREEQNFVVQNEINNMSFLIXDXKSKMSKAAVSDQERKKMKRKGDRYSMQXSLIVAALKRLLPIGLNICAPGDQELIALAKNRFSLKDXEDEVRDIIRSNIHLQGKLEDPAIRWQMALYKDLPNRXDDXSDPEKXVERVLDIANVLFHLEQKSKRVGRRHYCLVEHPQRSKKAVWHKLLSKQRKRAVVACFRMAPLYNLPRHRAVNLFLQGYEKSWIEXEEHYFEDKLIEDLAKPGAEPPEEDEGXKRVDPLHQLILLFSRXALXEKCKLEEDFLYMAYADIMAKSCHDEEDDDGEEEVKSFEEKEMEKQKLLYQQARLHDRGAAEMVLQXISASKGEXGPMVAAXLKLGIAILNGGNSXVQQKMLDYLKEKKDVGFFQSLAGLMQSCSVLDLNAFERQNKAEGLGMVXEEGSGEKVLQDDEFXCDLFRFLQLLCEGHNSDFQNYLRXQXGNNXXVNIIISXVDYLLRVQESISDFYWYYSGKDVIDEQGQRNFSKAIQVAKQVFNXLXEYIQGPCXGNQQSLAHSRLWDAVVGFLHVFAHMQMKLSQDSSQIELLKELMDLQKDMVVMLLSMLEGNVVNGXIGKQMVDMLVESSNNVEMILKFFDMFLKLKDLXSSDXFKEYDPDGKGVISKRDFHKAMESHKHYXQSEXEFLLSCAEXDENEXLDYEEFVKRFHEPAKDIGFNVAVLLXNLSEHMPNDXRLQXFLELAESVLNYFQPFLGRIEIMGSAKRIERVYFEISESSRXQWEKPQVKESKRQFIFDVVNEGGEKEKMELFVNFCEDXIFEMQLAAQISESDLNERSANKEESEKERPEEQGPRMAFFSILXVRSALFALRYNILXLMRMLSLKSLKKQMKKVKKMXVKDMVXAFFSSYWSIFMXLLHFVASVFRGFFRIICSLLLGGSLVEGAKKIKVAELLANMPDPXQDEVRGDGEEGERKPLEAALPSEDLXDLKELXEESDLLSDIFGLDLKREGGQYKLIPHNPNAGLSDLMSNPVPMPEVQEKFQEQKAKEEEKEEKEEXKSEPEKAEGEDGEKEEKAKEDKGKQKLRQLHXHRYGEPEVPESAFWKKIIAYQQKLLNYFARNFYNMRMLALFVAFAINFILLFYKVSXSSVVEGKELPXRSSSENAKVXSLDSSSHRIIAVHYVLEESSGYMEPXLRILAILHXVISFFCIIGYYCLKVPLVIFKREKEVARKLEFDGLYIXEQPSEDDIKGQWDRLVINXQSFPNNYWDKFVKRKVMDKYGEFYGRDRISELLGMDKAALDFSDAREKKKPKKDSSLSAVLNSIDVKYQMWKLGVVFXDNSFLYLAWYMXMSVLGHYNNFFFAAHLLDIAMGFKXLRXILSSVXHNGKQLVLXVGLLAVVVYLYXVVAFNFFRKFYNKSEDGDXPDMKCDDMLXCYMFHMYVGVRAGGGIGDEIEDPAGDEYEIYRIIFDIXFFFFVIVILLAIIQGLIIDAFGELRDQQEQVKEDMEXKCFICGIGNDYFDXVPHGFEXHXLQEHNLANYLFFLMYLINKDEXEHXGQESYVWKMYQERCWEFFPAGDCFRKQYEDQLN

SEQ ID NO: 24564 - protein, 147 aa, Homo sapiens
  MOD_RES (6)..(6): Selenocysteine
  MOD_RES (8)..(8): Selenocysteine
  MOD_RES (25)..(25): Selenocysteine
  MOD_RES (30)..(30): Selenocysteine
  MOD_RES (33)..(33): Selenocysteine
  MOD_RES (43)..(43): Selenocysteine
  MOD_RES (51)..(51): Selenocysteine
  MOD_RES (60)..(60): Selenocysteine
  MOD_RES (64)..(64): Selenocysteine
  MOD_RES (93)..(93): Selenocysteine
  MOD_RES (136)..(136): Selenocysteine
MEEPQXKXPSAEFPPYRAQPAQPAXAPAAXFAXLAICPEPAPXSGPGQPCXAAMGSELEXAMEXLINVFHAHSGKEGDKYKLSKKELKELLQXELSGFLDAQKDVDAVDKVMKELDENGDGEVDFQEYVVLVAALXVACNNFFWENS

SEQ ID NO: 24565 - protein, 34 aa, Homo sapiens
  MOD_RES (7)..(7): Selenocysteine
  MOD_RES (11)..(11): Selenocysteine
MGSELEXAMEXLINVFHAHSGKEGDKYKLSKKEL

SEQ ID NO: 24566 - protein, 94 aa, Homo sapiens
  MOD_RES (7)..(7): Selenocysteine
  MOD_RES (11)..(11): Selenocysteine
  MOD_RES (40)..(40): Selenocysteine
  MOD_RES (83)..(83): Selenocysteine
MGSELEXAMEXLINVFHAHSGKEGDKYKLSKKELKELLQXELSGFLDAQKDVDAVDKVMKELDENGDGEVDFQEYVVLVAALXVACNNFFWENS

SEQ ID NO: 24567 - protein, 53 aa, Homo sapiens
  MOD_RES (7)..(7): Selenocysteine
  MOD_RES (11)..(11): Selenocysteine
  MOD_RES (40)..(40): Selenocysteine
MGSELEXAMEXLINVFHAHSGKEGDKYKLSKKELKELLQXELSGFLDVKELML

SEQ ID NO: 24568 - protein, 105 aa, Homo sapiens
  MOD_RES (8)..(8): Selenocysteine
  MOD_RES (10)..(10): Selenocysteine
  MOD_RES (33)..(33): Selenocysteine
  MOD_RES (37)..(37): Selenocysteine
  MOD_RES (45)..(45): Selenocysteine
  MOD_RES (51)..(51): Selenocysteine
  MOD_RES (69)..(69): Selenocysteine
  MOD_RES (105)..(105): Selenocysteine
MAKISSPXEXERCIESLIAVFQKYAGKDGYNYXLSKXEFLSFMNXELAAFXKNQKDPGVLDRMMKKLDXNSDGQLDFSEFLNLIGGLAMACHDSFLKAVPSQKRX

SEQ ID NO: 24569 - protein, 92 aa, Homo sapiens
  MOD_RES (2)..(2): Selenocysteine
  MOD_RES (27)..(27): Selenocysteine
  MOD_RES (38)..(38): Selenocysteine
  MOD_RES (44)..(44): Selenocysteine
  MOD_RES (89)..(89): Selenocysteine
MXKLEEHLEGIVNIFHQYSVRKGHFDXLSKGELKQLLXKELANXIKNIKDKAVIDEIFQGLDANQDEQVDFQEFISLVAIALKAAHYHXHKE

SEQ ID NO: 24570 - protein, 98 aa, Homo sapiens
  MOD_RES (7)..(7): Selenocysteine
  MOD_RES (15)..(15): Selenocysteine
  MOD_RES (18)..(19): Selenocysteine
  MOD_RES (22)..(22): Selenocysteine
  MOD_RES (43)..(43): Selenocysteine
MAAEPLXELEESIEXVVXXFFXFARQEGRKDSLSVNEFKELVXQQLPHLLKDVGSLDEKMKSLDVNQDSELKFNEYWRLIGELAKEIRKKKDLKIRKK

SEQ ID NO: 24571 - protein, 104 aa, Homo sapiens
  MOD_RES (24)..(24): Selenocysteine
  MOD_RES (40)..(40): Selenocysteine
  MOD_RES (42)..(42): Selenocysteine
  MOD_RES (51)..(51): Selenocysteine
MGQCRSANAEDAQEFSDVERAIEXLIKNFHQYSVEGGKEXLXPSELRDLVXQQLPHLMPSNCGLEEKIANLGSCNDSKLEFRSFWELIGEAAKSVKLERPVRGH

SEQ ID NO: 24572 - protein, 101 aa, Homo sapiens
  MOD_RES (15)..(15): Selenocysteine
  MOD_RES (39)..(39): Selenocysteine
  MOD_RES (50)..(50): Selenocysteine
MACPLEKALDVMVSXFHKYSGKEGDKFKLNKSELKELLXRELPSFLGKRXDEAAFQKLMSNLDSNRDNEVDFQEYCVFLSCIAMMCNEFFEGFPDKQPRKK

SEQ ID NO: 24573 - protein, 85 aa, Homo sapiens
  MOD_RES (28)..(28): Selenocysteine
  MOD_RES (43)..(43): Selenocysteine
  MOD_RES (75)..(75): Selenocysteine
MACPLDQAIGLLVAIFHKYSGREGDKHXLSKKELKELIQKELXIGSKLQDAEIARLMEDLDRNKDQEVNFQEYVXFLGALALIYN

SEQ ID NO: 24574 - protein, 90 aa, Homo sapiens
  MOD_RES (28)..(28): Selenocysteine
  MOD_RES (43)..(43): Selenocysteine
  MOD_RES (75)..(75): Selenocysteine
MACPLDQAIGLLVAIFHKYSGREGDKHXLSKKELKELIQKELXIGSKLQDAEIARLMEDLDRNKDQEVNFQEYVXFLGALALIYNEALKG

SEQ ID NO: 24575 - protein, 93 aa, Homo sapiens
  MOD_RES (3)..(3): Selenocysteine
  MOD_RES (40)..(40): Selenocysteine
  MOD_RES (62)..(62): Selenocysteine
MLXELEKALNSIIDVYHKYSLIKGNFHAVYRDDLKKLLEXECPQYIRKKGADVWFKELDINXDGAVNFQEFLILVIKMGVAAHKKSHEESHKE

SEQ ID NO: 24576 - protein, 114 aa, Homo sapiens
  MOD_RES (2)..(2): Selenocysteine
  MOD_RES (14)..(14): Selenocysteine
  MOD_RES (18)..(18): Selenocysteine
  MOD_RES (31)..(31): Selenocysteine
  MOD_RES (68)..(68): Selenocysteine
  MOD_RES (87)..(87): Selenocysteine
  MOD_RES (113)..(113): Selenocysteine
MXCKMSQLERNIEXIINXFHQYSVKLGHPDXLNQGEFKELVRKDLQNFLKKENKNEKVIEHIMEDLDXNADKQLSFEEFIMLMARLXWASHEKMHEGDEGPGHHHKPGLGEGXP

SEQ ID NO: 24577 - protein, 92 aa, Homo sapiens
  MOD_RES (60)..(60): Selenocysteine
  MOD_RES (82)..(83): Selenocysteine
MSELEKAMVALIDVFHQYSGREGDKHKLKKSELKELINNELSHFLEEIKEQEVVDKVMEXLDNDGDGECDFQEFMAFVAMVXXACHEFFEHE

SEQ ID NO: 24578 - protein, 94 aa, Homo sapiens
  MOD_RES (77)..(77): Selenocysteine
  MOD_RES (92)..(92): Selenocysteine
MSELEKAMVALIDVFHQYSGREGDKHKLKKSELKELINNELSHFLERWSLPMLPRLVSNFLCSSYPPALASQSAGIXGNQRAGGCGQSHGNXGQ

SEQ ID NO: 24579 - protein, 382 aa, Homo sapiens
  MOD_RES (4)..(4): Selenocysteine
  MOD_RES (32)..(32): Selenocysteine
  MOD_RES (48)..(48): Selenocysteine
  MOD_RES (69)..(69): Selenocysteine
  MOD_RES (73)..(73): Selenocysteine
  MOD_RES (99)..(99): Selenocysteine
  MOD_RES (108)..(109): Selenocysteine
  MOD_RES (113)..(113): Selenocysteine
  MOD_RES (145)..(145): Selenocysteine
  MOD_RES (193)..(193): Selenocysteine
  MOD_RES (207)..(208): Selenocysteine
  MOD_RES (211)..(211): Selenocysteine
  MOD_RES (230)..(230): Selenocysteine
  MOD_RES (236)..(236): Selenocysteine
  MOD_RES (257)..(257): Selenocysteine
  MOD_RES (286)..(286): Selenocysteine
  MOD_RES (306)..(306): Selenocysteine
  MOD_RES (312)..(312): Selenocysteine
  MOD_RES (314)..(314): Selenocysteine
  MOD_RES (371)..(371): Selenocysteine
MGPXSVPLVKAHRSSVSDYVNYDIIVRHYNYXGKLNISADKENSIKLXSVVFILICCFIILENIFVLLXIWKXKKFHRPMYYFIGNLALSDLLAGVAYXANLLLSGAXXYKLXPAQWFLREGSMFVALSASVFSLLAIAIERYIXMLKMKLHNGSNNFRLFLLISACWVISLILGGLPIMGWNCISALSSCSXVLPLYHKHYILFCXXVFXLLLLSIVILYCRIYSLVRXRSRRLXFRKNISKASRSSEKSLALLKXVIIVLSVFIACWAPLFILLLLDVGCKVKXCDILFRAEYFLVLAVLNSGXNPIIYXLXNKEMRRAFIRIMSCCKCPSGDSAGKFKRPIIAGMEFSRSKSDNSSHPQKDEGDNPEXIMSSGNVNSSS

SEQ ID NO: 24580 - protein, 353 aa, Homo sapiens
  MOD_RES (21)..(21): Selenocysteine
  MOD_RES (24)..(24): Selenocysteine
  MOD_RES (27)..(27): Selenocysteine
  MOD_RES (30)..(31): Selenocysteine
  MOD_RES (90)..(90): Selenocysteine
  MOD_RES (97)..(97): Selenocysteine
  MOD_RES (101)..(101): Selenocysteine
  MOD_RES (115)..(115): Selenocysteine
  MOD_RES (181)..(181): Selenocysteine
  MOD_RES (196)..(196): Selenocysteine
  MOD_RES (228)..(228): Selenocysteine
  MOD_RES (234)..(234): Selenocysteine
  MOD_RES (236)..(236): Selenocysteine
  MOD_RES (278)..(278): Selenocysteine
  MOD_RES (289)..(289): Selenocysteine
  MOD_RES (320)..(320): Selenocysteine
  MOD_RES (342)..(342): Selenocysteine
  MOD_RES (345)..(345): Selenocysteine
  MOD_RES (351)..(351): Selenocysteine
MGSLYSEYLNPNKVQEHYNYXKEXLEXQEXXSRQVASAFIVILCCAIVVENLLVLIAVARNSKFHSAMYLFLGNLAASDLLAGVAFVANXLLSGSVXLRLXPVQWFAREGSAFIXLSASVFSLLAIAIERHVAIAKVKLYGSDKSCRMLLLIGASWLISLVLGGLPILGWNCLGHLEACSXVLPLYAKHYVLCVVXIFSIILLAIVALYVRIYCVVRSSHADMAAPQXLALLKXVXIVLGVFIVCWLPAFSILLLDYACPVHSCPILYKAHYFFAVSXLNSLLNPVIYXWRSRDLRREVLRPLQCWRPGVGVQGRRRGGXPGHHLLPLRSSSSLERGMHMPXSPXFLEGNXVV

SEQ ID NO: 24581 - protein, 378 aa, Homo sapiens
  MOD_RES (3)..(3): Selenocysteine
  MOD_RES (17)..(17): Selenocysteine
  MOD_RES (40)..(40): Selenocysteine
  MOD_RES (42)..(43): Selenocysteine
  MOD_RES (103)..(103): Selenocysteine
  MOD_RES (109)..(109): Selenocysteine
  MOD_RES (126)..(126): Selenocysteine
  MOD_RES (139)..(139): Selenocysteine
  MOD_RES (167)..(167): Selenocysteine
  MOD_RES (187)..(187): Selenocysteine
  MOD_RES (205)..(205): Selenocysteine
  MOD_RES (210)..(210): Selenocysteine
  MOD_RES (244)..(244): Selenocysteine
  MOD_RES (299)..(299): Selenocysteine
  MOD_RES (358)..(358): Selenocysteine
MAXALPPRLQPVRGNEXLREHYQYVGKLAGRLKEASEGSXLXXVLFLVICSFIVLENLMVLIAIWKNNKFHNRMYFFIGNLALCDLLAGIAYKVNILMSGKKXFSLSPXVWFLREGSMFVALGASXCSLLAIAIERHLXMIKMRPYDANKRHRVFLLIGMCWLIAFXLGALPILGWNCLHNLPDCSXILPLYSKKYIAFCISIFXAILVXIVILYARIYFLVKSSSRKVANHNNSERSMALLRXVVIVVSVFIACWSPLFILFLIDVACRVQACPILFKAQWFIVLAVLNSAMNPVIYXLASKEMRRAFFRLVCNCLVRGRGARASPIQPALDPSRSKSSSSNNSSHSPKVKEDLPHXAPSSCIMDKNAALQNGIFCN

SEQ ID NO: 24582 - protein, 384 aa, Homo sapiens
  MOD_RES (4)..(4): Selenocysteine
  MOD_RES (6)..(6): Selenocysteine
  MOD_RES (72)..(72): Selenocysteine
  MOD_RES (89)..(89): Selenocysteine
  MOD_RES (95)..(95): Selenocysteine
  MOD_RES (110)..(110): Selenocysteine
  MOD_RES (127)..(127): Selenocysteine
  MOD_RES (133)..(133): Selenocysteine
  MOD_RES (139)..(139): Selenocysteine
  MOD_RES (146)..(146): Selenocysteine
  MOD_RES (157)..(157): Selenocysteine
  MOD_RES (159)..(159): Selenocysteine
  MOD_RES (218)..(218): Selenocysteine
  MOD_RES (252)..(252): Selenocysteine
  MOD_RES (350)..(351): Selenocysteine
MNAXGXPVAPESCQQLAAGGHSRLIVLHYNHSGRLAGRGGPEDGGLGALRGLSVAASCLVVLENLLVLAAIXSHMRSRRWVYYCLVNIXLSDLLXGAAYLANVLLSGARXFRLAPAQWFLREGLLFXALAASXFSLLFXAGERFAXMVRPVAESGAXKXSRVYGFIGLCWLLAALLGMLPLLGWNCLCAFDRCSSLLPLYSKRYILFCLVIFAGVLAXIMGLYGAIFRLVQASGQKAPRPAARRKARRLLKXVLMILLAFLVCWGPLFGLLLADVFGSNLWAQEYLRGMDWILALAVLNSAVNPIIYSFRSREVCRAVLSFLCCGCLRLGMRGPGDCLARAVEAHSGASXXDSSLRPRDSFRGSRSLSFRMREPLSSISSVRSI

SEQ ID NO: 24583 - protein, 75 aa, Homo sapiens
  MOD_RES (44)..(44): Selenocysteine
MCNPVSLYLGSPPPAWPWGARPMESGLLRPAPVSEVIVLHYNYXGKLRGARYQPGAGLRADAVVCLAVCAFIVLE

SEQ ID NO: 24584 - protein, 254 aa, Homo sapiens
  MOD_RES (22)..(22): Selenocysteine
  MOD_RES (79)..(79): Selenocysteine
  MOD_RES (88)..(88): Selenocysteine
  MOD_RES (91)..(92): Selenocysteine
  MOD_RES (94)..(94): Selenocysteine
  MOD_RES (108)..(108): Selenocysteine
  MOD_RES (137)..(137): Selenocysteine
  MOD_RES (163)..(163): Selenocysteine
  MOD_RES (165)..(165): Selenocysteine
  MOD_RES (231)..(231): Selenocysteine
  MOD_RES (235)..(235): Selenocysteine
  MOD_RES (242)..(242): Selenocysteine
  MOD_RES (246)..(246): Selenocysteine
MESGLLRPAPVSEVIVLHYNYXGKLRGARYQPGAGLRADAVVCLAVCAFIVLENLAVLLVLGRHPRFHAPMFLLLGSLXLSDLARPGXAGXXSXRARRKPRSLALLRXLSVVLLAFVACWGPLFLLLLLDVACPARXCPVLLQADPFLGLAMANSLLNPIIYXLXNRDLRHALLRLVCCGRHSCGRDPSGSQQSASAAEASGGLRRCLPPGLDGSFSGSERSSPQRDGLDXSGSXGSPGAPXAARXLVSEPAAD

SEQ ID NO: 24585 - protein, 398 aa, Homo sapiens
  MOD_RES (22)..(22): Selenocysteine
  MOD_RES (79)..(79): Selenocysteine
  MOD_RES (100)..(100): Selenocysteine
  MOD_RES (120)..(120): Selenocysteine
  MOD_RES (136)..(136): Selenocysteine
  MOD_RES (151)..(151): Selenocysteine
  MOD_RES (184)..(184): Selenocysteine
  MOD_RES (232)..(232): Selenocysteine
  MOD_RES (235)..(236): Selenocysteine
  MOD_RES (238)..(238): Selenocysteine
  MOD_RES (252)..(252): Selenocysteine
  MOD_RES (281)..(281): Selenocysteine
  MOD_RES (307)..(307): Selenocysteine
  MOD_RES (309)..(309): Selenocysteine
  MOD_RES (375)..(375): Selenocysteine
  MOD_RES (379)..(379): Selenocysteine
  MOD_RES (386)..(386): Selenocysteine
  MOD_RES (390)..(390): Selenocysteine
MESGLLRPAPVSEVIVLHYNYXGKLRGARYQPGAGLRADAVVCLAVCAFIVLENLAVLLVLGRHPRFHAPMFLLLGSLXLSDLLAGAAYAANILLSGPLXLKLSPALWFAREGGVFVALXASVLSLLAIALERSLXMARRGPAPVSSRGRXLAMAAAAWGVSLLLGLLPALGWNCLGRLDACSXVLPLYAKAYVLFCVLAFVGILAAICALYARIYCQVRANARRLPARPGXAGXXSXRARRKPRSLALLRXLSVVLLAFVACWGPLFLLLLLDVACPARXCPVLLQADPFLGLAMANSLLNPIIYXLXNRDLRHALLRLVCCGRHSCGRDPSGSQQSASAAEASGGLRRCLPPGLDGSFSGSERSSPQRDGLDXSGSXGSPGAPXAARXLVSEPAAD

SEQ ID NO: 24586 - protein, 106 aa, Homo sapiens
  MOD_RES (4)..(4): Selenocysteine
  MOD_RES (26)..(26): Selenocysteine
  MOD_RES (28)..(28): Selenocysteine
  MOD_RES (78)..(78): Selenocysteine
  MOD_RES (85)..(85): Selenocysteine
MAEXLSGLGDSGAAGAAALSSASSEXGXRRLSDLRVIDLRAELRKRNVDSSGNKSVLMERLKKAIEDEGGNPDEIEIXSEGNKKXSKRSSKDRGQRNYKQFRYFII

SEQ ID NO: 24587 - protein, 915 aa, Homo sapiens
  MOD_RES (4)..(4): Selenocysteine
  MOD_RES (26)..(26): Selenocysteine
  MOD_RES (28)..(28): Selenocysteine
  MOD_RES (78)..(78): Selenocysteine
  MOD_RES (85)..(85): Selenocysteine
  MOD_RES (118)..(118): Selenocysteine
  MOD_RES (188)..(188): Selenocysteine
  MOD_RES (194)..(194): Selenocysteine
  MOD_RES (200)..(200): Selenocysteine
  MOD_RES (224)..(224): Selenocysteine
  MOD_RES (245)..(245): Selenocysteine
  MOD_RES (278)..(278): Selenocysteine
  MOD_RES (307)..(307): Selenocysteine
  MOD_RES (340)..(340): Selenocysteine
  MOD_RES (374)..(374): Selenocysteine
  MOD_RES (391)..(391): Selenocysteine
  MOD_RES (416)..(417): Selenocysteine
  MOD_RES (420)..(420): Selenocysteine
  MOD_RES (439)..(439): Selenocysteine
  MOD_RES (453)..(453): Selenocysteine
  MOD_RES (456)..(456): Selenocysteine
  MOD_RES (461)..(461): Selenocysteine
  MOD_RES (470)..(470): Selenocysteine
  MOD_RES (491)..(491): Selenocysteine
  MOD_RES (511)..(511): Selenocysteine
  MOD_RES (553)..(553): Selenocysteine
  MOD_RES (560)..(560): Selenocysteine
  MOD_RES (563)..(563): Selenocysteine
  MOD_RES (579)..(579): Selenocysteine
  MOD_RES (836)..(836): Selenocysteine
  MOD_RES (912)..(912): Selenocysteine
MAEXLSGLGDSGAAGAAALSSASSEXGXRRLSDLRVIDLRAELRKRNVDSSGNKSVLMERLKKAIEDEGGNPDEIEIXSEGNKKXSKRSSKGRKPEEEGVEDNGLEENSGDGQEDVEXSLENLQDIDIMDISVLDEAEIDNGSVADCVEDDDADNLQESLSDSRELVEGEMKELPEQLQEHAIEDKEXINNLDXSSSDFXILQEIEEPSLEPENEKILDILGEXCKSEPVKEESSELEQPFAQDXSSVGPDRKLAEEEDLFDSAHPEEGDLDLASESXAHAQSSKADSLLAVVKREPAEQPGDGERXDCEPVGLEPAVEQSSAASELAEASSEELAEAPXEAPSPEARDSKEDGRKFDFDACNEVPPAPKESSXSEGADQKMSSPEDDSDXKRLSKEEKGRSSCGRNFWVSGLSSXXRAXDLKNLFSKYGKVVGAKVVXNARSPGARCYGFVXMSXAEEAXKCINHLHKXELHGKMISVEKAKNEPVGKKXSDKRDSDGKKEKSSNSDRSXNLKRDDKCDRKDDAKKGDDGSGEKSKDQDDQKPGPSERSRAXKSGSRGXERXVVMDKSKGVPVISVKXSGSKERASKSQDRKSASREKRSVVSFDKVKEPRKSRDSESHSRVRERSEREQRMQAQWEREERERLEIARERLAFQRQRLERERMERERLERERMHVEHERRREQERIHREREELRRQQELRYEQERRPAVRRPYDLDRRDDAYWPEAKRAALDERYHSDFNRQDRFHDFDHRDRGRYPDHSVDRREGSRSMMGEREGQHYPERHGGPERHGRDSRDGWGGYGSDKRMSEGRGLPPPPRRDWGDHGRREDDRSWQGXADGGMMDRDHKRWQGGERSMSGHSGPGHMMNRGGMSGRGSFAPGGASRGHPIPHGGMQGGFGGQSRGSRPSDARFXRRY

SEQ ID NO: 24588 - protein, 916 aa, Homo sapiens
  MOD_RES (4)..(4): Selenocysteine
  MOD_RES (26)..(26): Selenocysteine
  MOD_RES (28)..(28): Selenocysteine
  MOD_RES (78)..(78): Selenocysteine
  MOD_RES (85)..(85): Selenocysteine
  MOD_RES (118)..(118): Selenocysteine
  MOD_RES (188)..(188): Selenocysteine
  MOD_RES (194)..(194): Selenocysteine
  MOD_RES (200)..(200): Selenocysteine
  MOD_RES (224)..(224): Selenocysteine
  MOD_RES (245)..(245): Selenocysteine
  MOD_RES (278)..(278): Selenocysteine
  MOD_RES (307)..(307): Selenocysteine
  MOD_RES (340)..(340): Selenocysteine
  MOD_RES (374)..(374): Selenocysteine
  MOD_RES (391)..(391): Selenocysteine
  MOD_RES (416)..(417): Selenocysteine
  MOD_RES (420)..(420): Selenocysteine
  MOD_RES (439)..(439): Selenocysteine
  MOD_RES (453)..(453): Selenocysteine
  MOD_RES (456)..(456): Selenocysteine
  MOD_RES (461)..(461): Selenocysteine
  MOD_RES (470)..(470): Selenocysteine
  MOD_RES (491)..(491): Selenocysteine
  MOD_RES (511)..(511): Selenocysteine
  MOD_RES (553)..(553): Selenocysteine
  MOD_RES (560)..(560): Selenocysteine
  MOD_RES (563)..(563): Selenocysteine
  MOD_RES (579)..(579): Selenocysteine
  MOD_RES (837)..(837): Selenocysteine
  MOD_RES (913)..(913): Selenocysteine
MAEXLSGLGDSGAAGAAALSSASSEXGXRRLSDLRVIDLRAELRKRNVDSSGNKSVLMERLKKAIEDEGGNPDEIEIXSEGNKKXSKRSSKGRKPEEEGVEDNGLEENSGDGQEDVEXSLENLQDIDIMDISVLDEAEIDNGSVADCVEDDDADNLQESLSDSRELVEGEMKELPEQLQEHAIEDKEXINNLDXSSSDFXILQEIEEPSLEPENEKILDILGEXCKSEPVKEESSELEQPFAQDXSSVGPDRKLAEEEDLFDSAHPEEGDLDLASESXAHAQSSKADSLLAVVKREPAEQPGDGERXDCEPVGLEPAVEQSSAASELAEASSEELAEAPXEAPSPEARDSKEDGRKFDFDACNEVPPAPKESSXSEGADQKMSSPEDDSDXKRLSKEEKGRSSCGRNFWVSGLSSXXRAXDLKNLFSKYGKVVGAKVVXNARSPGARCYGFVXMSXAEEAXKCINHLHKXELHGKMISVEKAKNEPVGKKXSDKRDSDGKKEKSSNSDRSXNLKRDDKCDRKDDAKKGDDGSGEKSKDQDDQKPGPSERSRAXKSGSRGXERXVVMDKSKGVPVISVKXSGSKERASKSQDRKSASREKRSVVSFDKVKEPRKSRDSESHRVRERSEREQRMQAQWEREERERLEIARERLAFQRQRLERERMERERLERERMHVEHERRREQERIHREREELRRQQELRYEQERRPAVRRPYDLDRRDDAYWPEAKRAALDERYHSDFNRQDRFHDFDHRDRGRYPDHSVDRREGSRSMMGEREGQHYPERHGGPERHGRDSRDGWGGYGSDKRMSEGRGLPPPPRGRRDWGDHGRREDDRSWQGXADGGMMDRDHKRWQGGERSMSGHSGPGHMMNRGGMSGRGSFAPGGASRGHPIPHGGMQGGFGGQSRGSRPSDARFXRRY

SEQ ID NO: 24589 - protein, 917 aa, Homo sapiens
  MOD_RES (4)..(4): Selenocysteine
  MOD_RES (26)..(26): Selenocysteine
  MOD_RES (28)..(28): Selenocysteine
  MOD_RES (78)..(78): Selenocysteine
  MOD_RES (85)..(85): Selenocysteine
  MOD_RES (118)..(118): Selenocysteine
  MOD_RES (188)..(188): Selenocysteine
  MOD_RES (194)..(194): Selenocysteine
  MOD_RES (200)..(200): Selenocysteine
  MOD_RES (224)..(224): Selenocysteine
  MOD_RES (245)..(245): Selenocysteine
  MOD_RES (278)..(278): Selenocysteine
  MOD_RES (307)..(307): Selenocysteine
  MOD_RES (340)..(340): Selenocysteine
  MOD_RES (374)..(374): Selenocysteine
  MOD_RES (391)..(391): Selenocysteine
  MOD_RES (416)..(417): Selenocysteine
  MOD_RES (420)..(420): Selenocysteine
  MOD_RES (439)..(439): Selenocysteine
  MOD_RES (453)..(453): Selenocysteine
  MOD_RES (456)..(456): Selenocysteine
  MOD_RES (461)..(461): Selenocysteine
  MOD_RES (470)..(470): Selenocysteine
  MOD_RES (491)..(491): Selenocysteine
  MOD_RES (511)..(511): Selenocysteine
  MOD_RES (553)..(553): Selenocysteine
  MOD_RES (560)..(560): Selenocysteine
  MOD_RES (563)..(563): Selenocysteine
  MOD_RES (579)..(579): Selenocysteine
  MOD_RES (838)..(838): Selenocysteine
  MOD_RES (914)..(914): Selenocysteine
MAEXLSGLGDSGAAGAAALSSASSEXGXRRLSDLRVIDLRAELRKRNVDSSGNKSVLMERLKKAIEDEGGNPDEIEIXSEGNKKXSKRSSKGRKPEEEGVEDNGLEENSGDGQEDVEXSLENLQDIDIMDISVLDEAEIDNGSVADCVEDDDADNLQESLSDSRELVEGEMKELPEQLQEHAIEDKEXINNLDXSSSDFXILQEIEEPSLEPENEKILDILGEXCKSEPVKEESSELEQPFAQDXSSVGPDRKLAEEEDLFDSAHPEEGDLDLASESXAHAQSSKADSLLAVVKREPAEQPGDGERXDCEPVGLEPAVEQSSAASELAEASSEELAEAPXEAPSPEARDSKEDGRKFDFDACNEVPPAPKESSXSEGADQKMSSPEDDSDXKRLSKEEKGRSSCGRNFWVSGLSSXXRAXDLKNLFSKYGKVVGAKVVXNARSPGARCYGFVXMSXAEEAXKCINHLHKXELHGKMISVEKAKNEPVGKKXSDKRDSDGKKEKSSNSDRSXNLKRDDKCDRKDDAKKGDDGSGEKSKDQDDQKPGPSERSRAXKSGSRGXERXVVMDKSKGVPVISVKXSGSKERASKSQDRKSASREKRSVVSFDKVKEPRKSRDSESHSRVRERSEREQRMQAQWEREERERLEIARERLAFQRQRLERERMERERLERERMHVEHERRREQERIHREREELRRQQELRYEQERRPAVRRPYDLDRRDDAYWPEAKRAALDERYHSDFNRQDRFHDFDHRDRGRYPDHSVDRREGSRSMMGEREGQHYPERHGGPERHGRDSRDGWGGYGSDKRMSEGRGLPPPPRGRRDWGDHGRREDDRSWQGXADGGMMDRDHKRWQGGERSMSGHSGPGHMMNRGGMSGRGSFAPGGASRGHPIPHGGMQGGFGGQSRGSRPSDARFXRRY

SEQ ID NO: 24590 - protein, 848 aa, Homo sapiens
  MOD_RES (4)..(4): Selenocysteine
  MOD_RES (26)..(26): Selenocysteine
  MOD_RES (28)..(28): Selenocysteine
  MOD_RES (78)..(78): Selenocysteine
  MOD_RES (85)..(85): Selenocysteine
  MOD_RES (119)..(119): Selenocysteine
  MOD_RES (125)..(125): Selenocysteine
  MOD_RES (131)..(131): Selenocysteine
  MOD_RES (155)..(155): Selenocysteine
  MOD_RES (176)..(176): Selenocysteine
  MOD_RES (209)..(209): Selenocysteine
  MOD_RES (238)..(238): Selenocysteine
  MOD_RES (271)..(271): Selenocysteine
  MOD_RES (305)..(305): Selenocysteine
  MOD_RES (322)..(322): Selenocysteine
  MOD_RES (347)..(348): Selenocysteine
  MOD_RES (351)..(351): Selenocysteine
  MOD_RES (370)..(370): Selenocysteine
  MOD_RES (384)..(384): Selenocysteine
  MOD_RES (387)..(387): Selenocysteine
  MOD_RES (392)..(392): Selenocysteine
  MOD_RES (401)..(401): Selenocysteine
  MOD_RES (422)..(422): Selenocysteine
  MOD_RES (442)..(442): Selenocysteine
  MOD_RES (484)..(484): Selenocysteine
  MOD_RES (491)..(491): Selenocysteine
  MOD_RES (494)..(494): Selenocysteine
  MOD_RES (510)..(510): Selenocysteine
  MOD_RES (769)..(769): Selenocysteine
  MOD_RES (845)..(845): Selenocysteine
MAEXLSGLGDSGAAGAAALSSASSEXGXRRLSDLRVIDLRAELRKRNVDSSGNKSVLMERLKKAIEDEGGNPDEIEIXSEGNKKXSKRSSKGRKPEEEGVEDNGLEENSGDGQIEDKEXINNLDXSSSDFXILQEIEEPSLEPENEKILDILGEXCKSEPVKEESSELEQPFAQDXSSVGPDRKLAEEEDLFDSAHPEEGDLDLASESXAHAQSSKADSLLAVVKREPAEQPGDGERXDCEPVGLEPAVEQSSAASELAEASSEELAEAPXEAPSPEARDSKEDGRKFDFDACNEVPPAPKESSXSEGADQKMSSPEDDSDXKRLSKEEKGRSSCGRNFWVSGLSSXXRAXDLKNLFSKYGKVVGAKVVXNARSPGARCYGFVXMSXAEEAXKCINHLHKXELHGKMISVEKAKNEPVGKKXSDKRDSDGKKEKSSNSDRSXNLKRDDKCDRKDDAKKGDDGSGEKSKDQDDQKPGPSERSRAXKSGSRGXERXVVMDKSKGVPVISVKXSGSKERASKSQDRKSASREKRSVVSFDKVKEPRKSRDSESHSRVRERSEREQRMQAQWEREERERLEIARERLAFQRQRLERERMERERLERERMHVEHERRREQERIHREREELRRQQELRYEQERRPAVRRPYDLDRRDDAYWPEAKRAALDERYHSDFNRQDRFHDFDHRDRGRYPDHSVDRREGSRSMMGEREGQHYPERHGGPERHGRDSRDGWGGYGSDKRMSEGRGLPPPPRGRRDWGDHGRREDDRSWQGXADGGMMDRDHKRWQGGERSMSGHSGPGHMMNRGGMSGRGSFAPGGASRGHPIPHGGMQGGFGGQSRGSRPSDARFXRRY

SEQ ID NO: 24591 - protein, 153 aa, Homo sapiens
SRDSESHRSPSAALLLCSRVRERSEREQRMQAQWEREERERLEIARERLAFQRQRLERERMERERLERERMHVEHERRREQERIHREREELRRQQELRYEQERRPAVRRPYDLDRRDDAYWPEAKRAALDERYHSDFNRQDRFHDFDHRDRGR

SEQ ID NO: 24592 - protein, 115 aa, Homo sapiens
  MOD_RES (4)..(4): Selenocysteine
  MOD_RES (15)..(15): Selenocysteine
  MOD_RES (25)..(25): Selenocysteine
  MOD_RES (27)..(27): Selenocysteine
  MOD_RES (49)..(49): Selenocysteine
  MOD_RES (81)..(81): Selenocysteine
MAEXLPGSGDSGPGXASLGPGVAEXGXRRLSELRVIDLRAELKKRNLDXGGNKSVLMERLKKAVKEEGQDPDEIGIELEAXSKKSAKRCVKGGHGSKSGEPAEYGHDGHECARRN

SEQ ID NO: 24593 - protein, 953 aa, Homo sapiens
  MOD_RES (4)..(4): Selenocysteine
  MOD_RES (15)..(15): Selenocysteine
  MOD_RES (25)..(25): Selenocysteine
  MOD_RES (27)..(27): Selenocysteine
  MOD_RES (49)..(49): Selenocysteine
  MOD_RES (81)..(81): Selenocysteine
  MOD_RES (100)..(100): Selenocysteine
  MOD_RES (137)..(137): Selenocysteine
  MOD_RES (152)..(152): Selenocysteine
  MOD_RES (190)..(190): Selenocysteine
  MOD_RES (193)..(193): Selenocysteine
  MOD_RES (201)..(201): Selenocysteine
  MOD_RES (223)..(223): Selenocysteine
  MOD_RES (244)..(244): Selenocysteine
  MOD_RES (277)..(277): Selenocysteine
  MOD_RES (306)..(306): Selenocysteine
  MOD_RES (339)..(339): Selenocysteine
  MOD_RES (373)..(373): Selenocysteine
  MOD_RES (417)..(418): Selenocysteine
  MOD_RES (421)..(421): Selenocysteine
  MOD_RES (440)..(440): Selenocysteine
  MOD_RES (454)..(454): Selenocysteine
  MOD_RES (457)..(457): Selenocysteine
  MOD_RES (462)..(462): Selenocysteine
  MOD_RES (471)..(471): Selenocysteine
  MOD_RES (521)..(521): Selenocysteine
  MOD_RES (555)..(555): Selenocysteine
  MOD_RES (561)..(561): Selenocysteine
  MOD_RES (571)..(571): Selenocysteine
  MOD_RES (587)..(588): Selenocysteine
  MOD_RES (636)..(636): Selenocysteine
  MOD_RES (950)..(950): Selenocysteine
MAEXLPGSGDSGPGXASLGPGVAEXGXRRLSELRVIDLRAELKKRNLDXGGNKSVLMERLKKAVKEEGQDPDEIGIELEAXSKKSAKRCVKGLKMEEEGXEDNGLEDDSRDGQEDMEASLENLQNMGMMDMSVLDEXEVANSSAPDFGEDGXDGLLDSFCDSKEYVAAQLRQLPAQPPEHAVDGEGFKNXLEXSSLNFKVXPDIEESLLEPENEKILDILGEXCKSEPVKEESSELEQPFAQDXSSVGPDRKLAEEEDLFDSAHPEEGDLDLASESXAHAQSSKADSLLAVVKREPAEQPGDGERXDCEPVGLEPAVEQSSAASELAEASSEELAEAPXEAPSPEARDSKEDGRKFDFDACNEVPPAPKESSXSEGADQKMSSFKEEKDIKPIIKDEKGRVGSGSGRNLWVSGLSSXXRAXDLKNLFSKYGKVVGAKVVXNARSPGARCYGFVXMSXSDEAXKCISHLHRXELHGRMISVEKAKNEPAGKKLSDRKECEVKKEKLSSVDRHHSVEIKIEKXVIKKEEKIEKKEEKKPEDIKKEEKDQDELKPGPXNRSRVXKSGSRGMERXVVMDKSKGEPVISVKXXSRSKERSSKSQDRKSESKEKRDILSFDKIKEQRERERQRQREREIREXERRREREQREREQRLEAFHERKEKARLQRERLQLECQRQRLERERMERERLERERMRVERERRKEQERIHREREELRRQQEQLRYEQERRPGRRPYDLDRRDDAYWPEGKRVAMEDRYRADFPRPDHRFHDFDHRDRGQYQDHAIDRREGSRPMMGDHRDGQHYGDDRHGHGGPPERHGRDSRDGWGGYGSDKRLSEGRGLPPPPRGGRDWGEHNQRLEEHQARAWQGAMDAGAASREHARWQGGERGLSGPSGPGHMASRGGVAGRGGFAQGGHSQGHVVPGGGLEGGGVASQDRGSRVPHPHPHPPPYPHFXRRY

SEQ ID NO: 24594 - protein, 124 aa, Homo sapiens
  MOD_RES (6)..(6): Selenocysteine
  MOD_RES (43)..(43): Selenocysteine
  MOD_RES (58)..(58): Selenocysteine
  MOD_RES (96)..(96): Selenocysteine
  MOD_RES (99)..(99): Selenocysteine
  MOD_RES (107)..(107): Selenocysteine
  MOD_RES (119)..(119): Selenocysteine
  MOD_RES (124)..(124): Selenocysteine
MEEEGXEDNGLEDDSRDGQEDMEASLENLQNMGMMDMSVLDEXEVANSSAPDFGEDGXDGLLDSFCDSKEYVAAQLRQLPAQPPEHAVDGEGFKNXLEXSSLNFKVXPDIEESLLEPGXDKRNX

SEQ ID NO: 24595 - protein, 87 aa, Homo sapiens
  MOD_RES (5)..(5): Selenocysteine
  MOD_RES (20)..(20): Selenocysteine
  MOD_RES (58)..(58): Selenocysteine
  MOD_RES (61)..(61): Selenocysteine
  MOD_RES (69)..(69): Selenocysteine
VLDEXEVANSSAPDFGEDGXDGLLDSFCDSKEYVAAQLRQLPAQPPEHAVDGEGFKNXLEXSSLNFKVXPDIEESLLEPALLRKKKI

SEQ ID NO: 24596 - protein, 35 aa, Homo sapiens
  MOD_RES (7)..(7): Selenocysteine
MAASGKXSKSEPNHVIFKKISRDKSMVSCWLILIL

SEQ ID NO: 24597 - protein, 130 aa, Homo sapiens
  MOD_RES (7)..(7): Selenocysteine
  MOD_RES (27)..(27): Selenocysteine
  MOD_RES (110)..(110): Selenocysteine
  MOD_RES (112)..(112): Selenocysteine
  MOD_RES (125)..(125): Selenocysteine
MAASGKXSKSEPNHVIFKKISRDKSVXIYLGNRDYIDHVSQVQPVDGVVLVDPDLVKGKKGEMKPLVSGWFLGGVDCSLGGSGKGHLHGRRDRKAEAALLHMEPVPGPLXHXPVPNSRDIGPVDXRAHSL

SEQ ID NO: 24598 - protein, 169 aa, Homo sapiens
  MOD_RES (7)..(7): Selenocysteine
  MOD_RES (27)..(27): Selenocysteine
  MOD_RES (64)..(64): Selenocysteine
  MOD_RES (66)..(66): Selenocysteine
  MOD_RES (82)..(82): Selenocysteine
  MOD_RES (103)..(103): Selenocysteine
  MOD_RES (105)..(105): Selenocysteine
  MOD_RES (119)..(119): Selenocysteine
  MOD_RES (125)..(125): Selenocysteine
  MOD_RES (158)..(158): Selenocysteine
  MOD_RES (161)..(161): Selenocysteine
MAASGKXSKSEPNHVIFKKISRDKSVXIYLGNRDYIDHVSQVQPVDGVVLVDPDLVKGKKVYVXLXCAFRYGQEDIDVIGLXFRRDLYFSRVQVYPPVGAASXPXKLQESLLKKLGSNXYPFLLXFPDYLPCSVMLQPAPQDSGKSCGVDFEVKAFAXDSXDAEEDKIP

SEQ ID NO: 24599 - protein, 405 aa, Homo sapiens
  MOD_RES (7)..(7): Selenocysteine
  MOD_RES (27)..(27): Selenocysteine
  MOD_RES (64)..(64): Selenocysteine
  MOD_RES (66)..(66): Selenocysteine
  MOD_RES (82)..(82): Selenocysteine
  MOD_RES (103)..(103): Selenocysteine
  MOD_RES (105)..(105): Selenocysteine
  MOD_RES (119)..(119): Selenocysteine
  MOD_RES (125)..(125): Selenocysteine
  MOD_RES (158)..(158): Selenocysteine
  MOD_RES (161)..(161): Selenocysteine
  MOD_RES (227)..(227): Selenocysteine
  MOD_RES (229)..(229): Selenocysteine
  MOD_RES (231)..(231): Selenocysteine
  MOD_RES (234)..(234): Selenocysteine
  MOD_RES (237)..(237): Selenocysteine
  MOD_RES (277)..(277): Selenocysteine
  MOD_RES (279)..(279): Selenocysteine
  MOD_RES (281)..(281): Selenocysteine
  MOD_RES (283)..(283): Selenocysteine
  MOD_RES (308)..(308): Selenocysteine
  MOD_RES (314)..(314): Selenocysteine
  MOD_RES (323)..(323): Selenocysteine
  MOD_RES (338)..(338): Selenocysteine
  MOD_RES (347)..(347): Selenocysteine
  MOD_RES (353)..(353): Selenocysteine
MAASGKXSKSEPNHVIFKKISRDKSVXIYLGNRDYIDHVSQVQPVDGVVLVDPDLVKGKKVYVXLXCAFRYGQEDIDVIGLXFRRDLYFSRVQVYPPVGAASXPXKLQESLLKKLGSNXYPFLLXFPDYLPCSVMLQPAPQDSGKSCGVDFEVKAFAXDSXDAEEDKIPKKSSVRLLIRKVQHAPLEMGPQPRAEAAWQFFMSDKPLHLAVSLNKEIYFHGEPIPVXVXVXNNXEKXVKKIKAFVEQVANVVLYSSDYYVKPVAMEEAQEKVPPNSXLXKXLXLLPLLANNRERRGIALDGKIKHEDXNLASSXIIKEGIDRXVLGILVSYQIKVKLXVSGFLGELXSSEVAXEVPFRLMHPQPEDPAKESYQDANLVFEEFARHNLKDAGEAEEGKRDKNDVDE

SEQ ID NO: 24600 - protein, 1154 aa, Homo sapiens
  MOD_RES (4)..(4): Selenocysteine
  MOD_RES (8)..(8): Selenocysteine
  MOD_RES (42)..(42): Selenocysteine
  MOD_RES (50)..(50): Selenocysteine
  MOD_RES (70)..(70): Selenocysteine
  MOD_RES (72)..(72): Selenocysteine
  MOD_RES (76)..(77): Selenocysteine
  MOD_RES (86)..(87): Selenocysteine
  MOD_RES (106)..(106): Selenocysteine
  MOD_RES (169)..(169): Selenocysteine
  MOD_RES (177)..(177): Selenocysteine
  MOD_RES (180)..(180): Selenocysteine
  MOD_RES (187)..(187): Selenocysteine
  MOD_RES (232)..(232): Selenocysteine
  MOD_RES (252)..(253): Selenocysteine
  MOD_RES (314)..(315): Selenocysteine
  MOD_RES (337)..(337): Selenocysteine
  MOD_RES (344)..(344): Selenocysteine
  MOD_RES (375)..(375): Selenocysteine
  MOD_RES (391)..(391): Selenocysteine
  MOD_RES (425)..(425): Selenocysteine
  MOD_RES (427)..(427): Selenocysteine
  MOD_RES (442)..(442): Selenocysteine
  MOD_RES (447)..(447): Selenocysteine
  MOD_RES (453)..(453): Selenocysteine
  MOD_RES (455)..(456): Selenocysteine
  MOD_RES (465)..(465): Selenocysteine
  MOD_RES (475)..(475): Selenocysteine
  MOD_RES (488)..(488): Selenocysteine
  MOD_RES (505)..(505): Selenocysteine
  MOD_RES (519)..(519): Selenocysteine
  MOD_RES (534)..(534): Selenocysteine
  MOD_RES (539)..(539): Selenocysteine
  MOD_RES (559)..(560): Selenocysteine
  MOD_RES (562)..(562): Selenocysteine
  MOD_RES (591)..(591): Selenocysteine
  MOD_RES (606)..(606): Selenocysteine
  MOD_RES (630)..(630): Selenocysteine
  MOD_RES (632)..(632): Selenocysteine
  MOD_RES (647)..(648): Selenocysteine
  MOD_RES (654)..(654): Selenocysteine
  MOD_RES (679)..(679): Selenocysteine
  MOD_RES (699)..(699): Selenocysteine
  MOD_RES (713)..(713): Selenocysteine
  MOD_RES (743)..(743): Selenocysteine
  MOD_RES (802)..(802): Selenocysteine
  MOD_RES (826)..(826): Selenocysteine
  MOD_RES (838)..(838): Selenocysteine
  MOD_RES (866)..(866): Selenocysteine
  MOD_RES (876)..(876): Selenocysteine
  MOD_RES (904)..(904): Selenocysteine
  MOD_RES (912)..(912): Selenocysteine
  MOD_RES (927)..(927): Selenocysteine
  MOD_RES (935)..(935): Selenocysteine
  MOD_RES (943)..(943): Selenocysteine
  MOD_RES (953)..(953): Selenocysteine
  MOD_RES (990)..(990): Selenocysteine
  MOD_RES (1006)..(1006): Selenocysteine
  MOD_RES (1008)..(1008): Selenocysteine
  MOD_RES (1021)..(1021): Selenocysteine
  MOD_RES (1033)..(1033): Selenocysteine
  MOD_RES (1041)..(1041): Selenocysteine
  MOD_RES (1045)..(1045): Selenocysteine
  MOD_RES (1058)..(1058): Selenocysteine
  MOD_RES (1060)..(1060): Selenocysteine
  MOD_RES (1068)..(1068): Selenocysteine
  MOD_RES (1075)..(1076): Selenocysteine
  MOD_RES (1086)..(1086): Selenocysteine
  MOD_RES (1092)..(1092): Selenocysteine
  MOD_RES (1107)..(1107): Selenocysteine
MNDXVNKXDQVDCSDLSEHNGLDREESMEVEAPVANKSGSGXSSGSHSSXAPSSSSSSSSSSGGGGSSSXGXSAIXXSLPQLGDLXXLGNFSVINSNVIIENLQSXKVAVAQFSQEARCGGASGGKLAVPALMEQLLALQQQQIHQLQLIEQIRHQILLLASQNADLPXSSSPSQGXLRXSANPLSXLSSHLSQQLAAAAGLAQSLASQSASISGVKQLPPIQLPQSSSGNXIIPSNSGSSPNMNILAAAVXXPSSEKVASSAGASHVSNPAVSSSSSPAFAISSLLSPASNPLLPQQASANSVFPSPLPNIGXXAEDLNSLSALAQQRKSKPPNVXAFEAKSXSDEAFFKHKCRFCAKVFGSDSALQIHLRSHXGERPFKCNICGNRFSXKGNLKVHFQRHKEKYPHIQMNPYPVPEHLDNIPXSXGIPYGMSIPPEKPVXSWLDXKPVLPXLXXSVGLPLPPXLPSLIPFIKXEEPAPIPISHSAXSPPGSVKSDSGGPESAXRNLGGLPEEAEGSXLPPSGGKSEESGMVXNSVPXASSSVLSSPAADCGPAGSAXXFXNPLLPLMSEQFKAKFPFGGLLDSAQASEXSKLQQLVENIDKKAXDPNECIICHRVLSCQSALKMHYRXHXGERPFKCKICGRAFXXKGNLKXHYSVHRAMPPLRVQHSCPICQKKFXNAVVLQQHIRMHMGGQIPNXPVPDSYSESMESDXGSFDEKNFDDLDNFSDENMEDCPEGSIPDXPKSADASQDSLSSSPLPLEMSSIAALENQMKMINAGLAEQLQASLKSVENGSIEGDVLXNDSSSVGGDMESQSAGSPAISESXSSMQALSPSNSXQEFHKSPSIEEKPQRAVPSEFANGLSPXPVNGGALDLXSSHAEKIIKEDSLGILFPFRDRGKFKNXACDICGKXFACQSALDIHYRSHXKERPFICXVCNRGFSXKGNLKQHMLXHQMRDLPSQLFEPSSNLGPNQNSAVIPANSLSSLIKXEVNGFVHVSPQDSKDXPXSHVPSGPLSSSAXSPVLLPALPRRXPKQHYCNXCGKXFSSSSALQIHERXHXGEKPFACXICGRAFXXKGNLKVHMGXHMWNSXPARRGRRLSVDGPMXFLGGNPVKFPEMFQKDLAARSGSGDPSSFWNQYAAALSNGLAMKANE

SEQ ID NO: 24601 - protein, 1227 aa, Homo sapiens
  MOD_RES (4)..(4): Selenocysteine
  MOD_RES (8)..(8): Selenocysteine
  MOD_RES (42)..(42): Selenocysteine
  MOD_RES (50)..(50): Selenocysteine
  MOD_RES (70)..(70): Selenocysteine
  MOD_RES (72)..(72): Selenocysteine
  MOD_RES (76)..(77): Selenocysteine
  MOD_RES (86)..(87): Selenocysteine
  MOD_RES (106)..(106): Selenocysteine
  MOD_RES (169)..(169): Selenocysteine
  MOD_RES (177)..(177): Selenocysteine
  MOD_RES (180)..(180): Selenocysteine
  MOD_RES (187)..(187): Selenocysteine
  MOD_RES (232)..(232): Selenocysteine
  MOD_RES (252)..(253): Selenocysteine
  MOD_RES (314)..(315): Selenocysteine
  MOD_RES (337)..(337): Selenocysteine
  MOD_RES (344)..(344): Selenocysteine
  MOD_RES (375)..(375): Selenocysteine
  MOD_RES (391)..(391): Selenocysteine
  MOD_RES (425)..(425): Selenocysteine
  MOD_RES (427)..(427): Selenocysteine
  MOD_RES (442)..(442): Selenocysteine
  MOD_RES (447)..(447): Selenocysteine
  MOD_RES (453)..(453): Selenocysteine
  MOD_RES (455)..(456): Selenocysteine
  MOD_RES (465)..(465): Selenocysteine
  MOD_RES (475)..(475): Selenocysteine
  MOD_RES (488)..(488): Selenocysteine
  MOD_RES (505)..(505): Selenocysteine
  MOD_RES (519)..(519): Selenocysteine
  MOD_RES (534)..(534): Selenocysteine
  MOD_RES (539)..(539): Selenocysteine
  MOD_RES (559)..(560): Selenocysteine
  MOD_RES (562)..(562): Selenocysteine
  MOD_RES (591)..(591): Selenocysteine
  MOD_RES (606)..(606): Selenocysteine
  MOD_RES (630)..(630): Selenocysteine
  MOD_RES (632)..(632): Selenocysteine
  MOD_RES (647)..(648): Selenocysteine
  MOD_RES (654)..(654): Selenocysteine
  MOD_RES (679)..(679): Selenocysteine
  MOD_RES (699)..(699): Selenocysteine
  MOD_RES (713)..(713): Selenocysteine
  MOD_RES (743)..(743): Selenocysteine
  MOD_RES (802)..(802): Selenocysteine
  MOD_RES (826)..(826): Selenocysteine
  MOD_RES (838)..(838): Selenocysteine
  MOD_RES (866)..(866): Selenocysteine
  MOD_RES (876)..(876): Selenocysteine
  MOD_RES (904)..(904): Selenocysteine
  MOD_RES (912)..(912): Selenocysteine
  MOD_RES (927)..(927): Selenocysteine
  MOD_RES (935)..(935): Selenocysteine
  MOD_RES (943)..(943): Selenocysteine
  MOD_RES (953)..(953): Selenocysteine
  MOD_RES (990)..(990): Selenocysteine
  MOD_RES (1006)..(1006): Selenocysteine
  MOD_RES (1008)..(1008): Selenocysteine
  MOD_RES (1021)..(1021): Selenocysteine
  MOD_RES (1033)..(1033): Selenocysteine
  MOD_RES (1041)..(1041): Selenocysteine
  MOD_RES (1045)..(1045): Selenocysteine
  MOD_RES (1058)..(1058): Selenocysteine
  MOD_RES (1060)..(1060): Selenocysteine
  MOD_RES (1068)..(1068): Selenocysteine
  MOD_RES (1075)..(1076): Selenocysteine
  MOD_RES (1086)..(1086): Selenocysteine
  MOD_RES (1092)..(1092): Selenocysteine
  MOD_RES (1107)..(1107): Selenocysteine
  MOD_RES (1182)..(1182): Selenocysteine
  MOD_RES (1210)..(1210): Selenocysteine
  MOD_RES (1215)..(1215): Selenocysteine
  MOD_RES (1226)..(1226): Selenocysteine
MNDXVNKXDQVDCSDLSEHNGLDREESMEVEAPVANKSGSGXSSGSHSSXAPSSSSSSSSSSGGGGSSSXGXSAIXXSLPQLGDLXXLGNFSVINSNVIIENLQSXKVAVAQFSQEARCGGASGGKLAVPALMEQLLALQQQQIHQLQLIEQIRHQILLLASQNADLPXSSSPSQGXLRXSANPLSXLSSHLSQQLAAAAGLAQSLASQSASISGVKQLPPIQLPQSSSGNXIIPSNSGSSPNMNILAAAVXXPSSEKVASSAGASHVSNPAVSSSSSPAFAISSLLSPASNPLLPQQASANSVFPSPLPNIGXXAEDLNSLSALAQQRKSKPPNVXAFEAKSXSDEAFFKHKCRFCAKVFGSDSALQIHLRSHXGERPFKCNICGNRFSXKGNLKVHFQRHKEKYPHIQMNPYPVPEHLDNIPXSXGIPYGMSIPPEKPVXSWLDXKPVLPXLXXSVGLPLPPXLPSLIPFIKXEEPAPIPISHSAXSPPGSVKSDSGGPESAXRNLGGLPEEAEGSXLPPSGGKSEESGMVXNSVPXASSSVLSSPAADCGPAGSAXXFXNPLLPLMSEQFKAKFPFGGLLDSAQASEXSKLQQLVENIDKKAXDPNECIICHRVLSCQSALKMHYRXHXGERPFKCKICGRAFXXKGNLKXHYSVHRAMPPLRVQHSCPICQKKFXNAVVLQQHIRMHMGGQIPNXPVPDSYSESMESDXGSFDEKNFDDLDNFSDENMEDCPEGSIPDXPKSADASQDSLSSSPLPLEMSSIAALENQMKMINAGLAEQLQASLKSVENGSIEGDVLXNDSSSVGGDMESQSAGSPAISESXSSMQALSPSNSXQEFHKSPSIEEKPQRAVPSEFANGLSPXPVNGGALDLXSSHAEKIIKEDSLGILFPFRDRGKFKNXACDICGKXFACQSALDIHYRSHXKERPFICXVCNRGFSXKGNLKQHMLXHQMRDLPSQLFEPSSNLGPNQNSAVIPANSLSSLIKXEVNGFVHVSPQDSKDXPXSHVPSGPLSSSAXSPVLLPALPRRXPKQHYCNXCGKXFSSSSALQIHERXHXGEKPFACXICGRAFXXKGNLKVHMGXHMWNSXPARRGRRLSVDGPMXFLGGNPVKFPEMFQKDLAARSGSGDPSSFWNQYAAALSNGLAMKANEISVIQNGGIPPIPGSLGSGNSSPVSGLXGNLERLQNSEPNAPLAGLEKMASSENGXNFRFXRFVEDSKEIVXS

SEQ ID NO: 24602 - protein, 1324 aa, Homo sapiens
  MOD_RES (28)..(28): Selenocysteine
  MOD_RES (37)..(37): Selenocysteine
  MOD_RES (66)..(66): Selenocysteine
  MOD_RES (84)..(84): Selenocysteine
  MOD_RES (101)..(101): Selenocysteine
  MOD_RES (105)..(105): Selenocysteine
  MOD_RES (139)..(139): Selenocysteine
  MOD_RES (147)..(147): Selenocysteine
  MOD_RES (167)..(167): Selenocysteine
  MOD_RES (169)..(169): Selenocysteine
  MOD_RES (173)..(174): Selenocysteine
  MOD_RES (183)..(184): Selenocysteine
  MOD_RES (203)..(203): Selenocysteine
  MOD_RES (266)..(266): Selenocysteine
  MOD_RES (274)..(274): Selenocysteine
  MOD_RES (277)..(277): Selenocysteine
  MOD_RES (284)..(284): Selenocysteine
  MOD_RES (329)..(329): Selenocysteine
  MOD_RES (349)..(350): Selenocysteine
  MOD_RES (411)..(412): Selenocysteine
  MOD_RES (434)..(434): Selenocysteine
  MOD_RES (441)..(441): Selenocysteine
  MOD_RES (472)..(472): Selenocysteine
  MOD_RES (488)..(488): Selenocysteine
  MOD_RES (522)..(522): Selenocysteine
  MOD_RES (524)..(524): Selenocysteine
  MOD_RES (539)..(539): Selenocysteine
  MOD_RES (544)..(544): Selenocysteine
  MOD_RES (550)..(550): Selenocysteine
  MOD_RES (552)..(553): Selenocysteine
  MOD_RES (562)..(562): Selenocysteine
  MOD_RES (572)..(572): Selenocysteine
  MOD_RES (585)..(585): Selenocysteine
  MOD_RES (602)..(602): Selenocysteine
  MOD_RES (616)..(616): Selenocysteine
  MOD_RES (631)..(631): Selenocysteine
  MOD_RES (636)..(636): Selenocysteine
  MOD_RES (656)..(657): Selenocysteine
  MOD_RES (659)..(659): Selenocysteine
  MOD_RES (688)..(688): Selenocysteine
  MOD_RES (703)..(703): Selenocysteine
  MOD_RES (727)..(727): Selenocysteine
  MOD_RES (729)..(729): Selenocysteine
  MOD_RES (744)..(745): Selenocysteine
  MOD_RES (751)..(751): Selenocysteine
  MOD_RES (776)..(776): Selenocysteine
  MOD_RES (796)..(796): Selenocysteine
  MOD_RES (810)..(810): Selenocysteine
  MOD_RES (840)..(840): Selenocysteine
  MOD_RES (899)..(899): Selenocysteine
  MOD_RES (923)..(923): Selenocysteine
  MOD_RES (935)..(935): Selenocysteine
  MOD_RES (963)..(963): Selenocysteine
  MOD_RES (973)..(973): Selenocysteine
  MOD_RES (1001)..(1001): Selenocysteine
  MOD_RES (1009)..(1009): Selenocysteine
  MOD_RES (1024)..(1024): Selenocysteine
  MOD_RES (1032)..(1032): Selenocysteine
  MOD_RES (1040)..(1040): Selenocysteine
  MOD_RES (1050)..(1050): Selenocysteine
  MOD_RES (1087)..(1087): Selenocysteine
  MOD_RES (1103)..(1103): Selenocysteine
  MOD_RES (1105)..(1105): Selenocysteine
  MOD_RES (1118)..(1118): Selenocysteine
  MOD_RES (1130)..(1130): Selenocysteine
  MOD_RES (1138)..(1138): Selenocysteine
  MOD_RES (1142)..(1142): Selenocysteine
  MOD_RES (1155)..(1155): Selenocysteine
  MOD_RES (1157)..(1157): Selenocysteine
  MOD_RES (1165)..(1165): Selenocysteine
  MOD_RES (1172)..(1173): Selenocysteine
  MOD_RES (1183)..(1183): Selenocysteine
  MOD_RES (1189)..(1189): Selenocysteine
  MOD_RES (1204)..(1204): Selenocysteine
  MOD_RES (1279)..(1279): Selenocysteine
  MOD_RES (1307)..(1307): Selenocysteine
  MOD_RES (1312)..(1312): Selenocysteine
  MOD_RES (1323)..(1323): Selenocysteine
MSRRKQAKPQHFQSDPEVASLPRRDGDXEKGQPSRPXKSKDAHVCGRCCAEFFELSDLLLHKKNCXKNQLVLIVNENPASPPEXFSPSPPPDNPDEQMNDXVNKXDQVDCSDLSEHNGLDREESMEVEAPVANKSGSGXSSGSHSSXAPSSSSSSSSSSGGGGSSSXGXSAIXXSLPQLGDLXXLGNFSVINSNVIIENLQSXKVAVAQFSQEARCGGASGGKLAVPALMEQLLALQQQQIHQLQLIEQIRHQILLLASQNADLPXSSSPSQGXLRXSANPLSXLSSHLSQQLAAAAGLAQSLASQSASISGVKQLPPIQLPQSSSGNXIIPSNSGSSPNMNILAAAVXXPSSEKVASSAGASHVSNPAVSSSSSPAFAISSLLSPASNPLLPQQASANSVFPSPLPNIGXXAEDLNSLSALAQQRKSKPPNVXAFEAKSXSDEAFFKHKCRFCAKVFGSDSALQIHLRSHXGERPFKCNICGNRFSXKGNLKVHFQRHKEKYPHIQMNPYPVPEHLDNIPXSXGIPYGMSIPPEKPVXSWLDXKPVLPXLXXSVGLPLPPXLPSLIPFIKXEEPAPIPISHSAXSPPGSVKSDSGGPESAXRNLGGLPEEAEGSXLPPSGGKSEESGMVXNSVPXASSSVLSSPAADCGPAGSAXXFXNPLLPLMSEQFKAKFPFGGLLDSAQASEXSKLQQLVENIDKKAXDPNECIICHRVLSCQSALKMHYRXHXGERPFKCKICGRAFXXKGNLKXHYSVHRAMPPLRVQHSCPICQKKFXNAVVLQQHIRMHMGGQIPNXPVPDSYSESMESDXGSFDEKNFDDLDNFSDENMEDCPEGSIPDXPKSADASQDSLSSSPLPLEMSSIAALENQMKMINAGLAEQLQASLKSVENGSIEGDVLXNDSSSVGGDMESQSAGSPAISESXSSMQALSPSNSXQEFHKSPSIEEKPQRAVPSEFANGLSPXPVNGGALDLXSSHAEKIIKEDSLGILFPFRDRGKFKNXACDICGKXFACQSALDIHYRSHXKERPFICXVCNRGFSXKGNLKQHMLXHQMRDLPSQLFEPSSNLGPNQNSAVIPANSLSSLIKXEVNGFVHVSPQDSKDXPXSHVPSGPLSSSAXSPVLLPALPRRXPKQHYCNXCGKXFSSSSALQIHERXHXGEKPFACXICGRAFXXKGNLKVHMGXHMWNSXPARRGRRLSVDGPMXFLGGNPVKFPEMFQKDLAARSGSGDPSSFWNQYAAALSNGLAMKANEISVIQNGGIPPIPGSLGSGNSSPVSGLXGNLERLQNSEPNAPLAGLEKMASSENGXNFRFXRFVEDSKEIVXS

SEQ ID NO: 24603 - protein, 34 aa, Homo sapiens
  MOD_RES (27)..(27): Selenocysteine
MSRRKQAKPQHFQSDPEVASLPRRDGXHGHSHVE

SEQ ID NO: 24604 - protein, 198 aa, Homo sapiens
  MOD_RES (42)..(42): Selenocysteine
  MOD_RES (45)..(45): Selenocysteine
  MOD_RES (56)..(56): Selenocysteine
  MOD_RES (92)..(92): Selenocysteine
  MOD_RES (106)..(106): Selenocysteine
  MOD_RES (109)..(109): Selenocysteine
  MOD_RES (128)..(128): Selenocysteine
  MOD_RES (159)..(159): Selenocysteine
  MOD_RES (194)..(194): Selenocysteine
MAHESERSSRLGVPCGEPAELGGDASEEDHPQVCAKCCAQFXDPXEFLAHQNACSXDPPVMVIIGGQENPNNSSASSEPRPEGHNNPQVMDXEHSNPPDSGSSVPXDPXWGPERRGEESSGHFLVAAXEPVCGIPVKWPAHEALEFQLHLHYHSKPGPXSAVWPRNCGWEGASNNGIQGSQGEDSPPPISASCXQGSA

SEQ ID NO: 24605 - protein, 906 aa, Homo sapiens
  MOD_RES (42)..(42): Selenocysteine
  MOD_RES (45)..(45): Selenocysteine
  MOD_RES (56)..(56): Selenocysteine
  MOD_RES (92)..(92): Selenocysteine
  MOD_RES (106)..(106): Selenocysteine
  MOD_RES (109)..(109): Selenocysteine
  MOD_RES (128)..(128): Selenocysteine
  MOD_RES (132)..(132): Selenocysteine
  MOD_RES (162)..(162): Selenocysteine
  MOD_RES (173)..(173): Selenocysteine
  MOD_RES (187)..(188): Selenocysteine
  MOD_RES (205)..(205): Selenocysteine
  MOD_RES (259)..(259): Selenocysteine
  MOD_RES (274)..(275): Selenocysteine
  MOD_RES (309)..(309): Selenocysteine
  MOD_RES (330)..(330): Selenocysteine
  MOD_RES (344)..(345): Selenocysteine
  MOD_RES (350)..(350): Selenocysteine
  MOD_RES (354)..(354): Selenocysteine
  MOD_RES (358)..(358): Selenocysteine
  MOD_RES (362)..(362): Selenocysteine
  MOD_RES (364)..(364): Selenocysteine
  MOD_RES (390)..(390): Selenocysteine
  MOD_RES (407)..(407): Selenocysteine
  MOD_RES (409)..(409): Selenocysteine
  MOD_RES (418)..(418): Selenocysteine
  MOD_RES (427)..(427): Selenocysteine
  MOD_RES (433)..(433): Selenocysteine
  MOD_RES (452)..(452): Selenocysteine
  MOD_RES (471)..(471): Selenocysteine
  MOD_RES (479)..(480): Selenocysteine
  MOD_RES (533)..(533): Selenocysteine
  MOD_RES (564)..(564): Selenocysteine
  MOD_RES (568)..(568): Selenocysteine
  MOD_RES (586)..(586): Selenocysteine
  MOD_RES (604)..(604): Selenocysteine
  MOD_RES (641)..(641): Selenocysteine
  MOD_RES (677)..(677): Selenocysteine
  MOD_RES (683)..(683): Selenocysteine
  MOD_RES (694)..(695): Selenocysteine
  MOD_RES (743)..(743): Selenocysteine
  MOD_RES (749)..(749): Selenocysteine
  MOD_RES (752)..(752): Selenocysteine
  MOD_RES (795)..(795): Selenocysteine
  MOD_RES (804)..(804): Selenocysteine
  MOD_RES (817)..(817): Selenocysteine
  MOD_RES (849)..(849): Selenocysteine
  MOD_RES (851)..(853): Selenocysteine
  MOD_RES (866)..(866): Selenocysteine
  MOD_RES (874)..(874): Selenocysteine
  MOD_RES (884)..(884): Selenocysteine
MAHESERSSRLGVPCGEPAELGGDASEEDHPQVCAKCCAQFXDPXEFLAHQNACSXDPPVMVIIGGQENPNNSSASSEPRPEGHNNPQVMDXEHSNPPDSGSSVPXDPXWGPERRGEESSGHFLVAAXGAEXPKQAFFHLYHPLGSQHPFSAGGVGRSHKPXPAPSPALPGSXDQLIASPHLAFPSXXGLLAAQCLGAARGLEAXASPGLLKPKNGSGELSYGEVMGPLEKPGGRHKCRFCAKVFGSDSALQIHLRSHXGERPYKCNVCGNRFXXRGNLKVHFHRHREKYPHVQMNPHPVPEHLDYVIXSSGLPYGMSVPPEKAEEEAAXPGGGVERKPLVASXXALSAXESLXLLSXSAGXAXAPGLPAFNKFVLMKAVEPKNKADENXPPGSEGSAISGVAESSXAXRMQLSKLVXSLPSWALLXNHFKSXGSFPFPYVLEPLGASPSEXSKLQQLVEKIDRQGAVAVXSAASGAPXXSAPAPSSSASSGPNQCVICLRVLSCPRALRLHYGQHGGERPFKCKVCGRAFSXRGNLRAHFVGHKASPAARAQNSCPICQKKFXNAVXLQQHVRMHLGGQIPNGGXALPEGGGAAQENGSEQSXVSGARSFPQQQSQQPSPEEELSEEEEEEDEEEEEDVXDEDSLAGRGSESGGEKAISVRGDSEEASGAEEEVGXVAAAAXAGKEMDSNEKXXQQSSLPPPPPPDSLDQPQPMEQGSSGVLGGKEEGGKPERSSSPASALXPEGEAXSVXLVEELSLQEAMRKEPGESSSRKACEVCGQAFPSQAALEEHQKXHPKEGPLFXCVFCRQGFLERAXLKKHMLLAHHQNQYVAFLSNGLPMKPWNSSSXSXXXPSLAPPVLFGLGXVAGKVPPXMGSREAKEKXAPLLFQPPAPKAVPEKPIIDKK

SEQ ID NO: 24606 - protein, 191 aa, Homo sapiens
  MOD_RES (42)..(42): Selenocysteine
  MOD_RES (45)..(45): Selenocysteine
  MOD_RES (56)..(56): Selenocysteine
  MOD_RES (92)..(92): Selenocysteine
  MOD_RES (106)..(106): Selenocysteine
  MOD_RES (109)..(109): Selenocysteine
  MOD_RES (128)..(128): Selenocysteine
  MOD_RES (130)..(130): Selenocysteine
  MOD_RES (148)..(148): Selenocysteine
  MOD_RES (155)..(155): Selenocysteine
MAHESERSSRLGVPCGEPAELGGDASEEDHPQVCAKCCAQFXDPXEFLAHQNACSXDPPVMVIIGGQENPNNSSASSEPRPEGHNNPQVMDXEHSNPPDSGSSVPXDPXWGPERRGEESSGHFLVAAXGXAAGGGGGLILASPKLGAXPLPPESXPAPPPPPPPPPPPGVGSGHLNIPLILEELRVLQQRQ

SEQ ID NO: 24607 - protein, 200 aa, Homo sapiens
  MOD_RES (44)..(44): Selenocysteine
  MOD_RES (47)..(47): Selenocysteine
  MOD_RES (58)..(58): Selenocysteine
  MOD_RES (94)..(94): Selenocysteine
  MOD_RES (108)..(108): Selenocysteine
  MOD_RES (111)..(111): Selenocysteine
  MOD_RES (130)..(130): Selenocysteine
  MOD_RES (161)..(161): Selenocysteine
  MOD_RES (196)..(196): Selenocysteine
MSRRKQRKPQQLISDCEGPSASENGDASEEDHPQVCAKCCAQFXDPXEFLAHQNACSXDPPVMVIIGGQENPNNSSASSEPRPEGHNNPQVMDXEHSNPPDSGSSVPXDPXWGPERRGEESSGHFLVAAXEPVCGIPVKWPAHEALEFQLHLHYHSKPGPXSAVWPRNCGWEGASNNGIQGSQGEDSPPPISASCXQGSA

SEQ ID NO: 24608 - protein, 1007 aa, Homo sapiens
  MOD_RES (44)..(44): Selenocysteine
  MOD_RES (47)..(47): Selenocysteine
  MOD_RES (58)..(58): Selenocysteine
  MOD_RES (94)..(94): Selenocysteine
  MOD_RES (108)..(108): Selenocysteine
  MOD_RES (111)..(111): Selenocysteine
  MOD_RES (130)..(130): Selenocysteine
  MOD_RES (132)..(132): Selenocysteine
  MOD_RES (150)..(150): Selenocysteine
  MOD_RES (157)..(157): Selenocysteine
  MOD_RES (200)..(200): Selenocysteine
  MOD_RES (216)..(216): Selenocysteine
  MOD_RES (229)..(229): Selenocysteine
  MOD_RES (231)..(231): Selenocysteine
  MOD_RES (235)..(235): Selenocysteine
  MOD_RES (250)..(250): Selenocysteine
  MOD_RES (253)..(253): Selenocysteine
  MOD_RES (269)..(269): Selenocysteine
  MOD_RES (299)..(299): Selenocysteine
  MOD_RES (310)..(310): Selenocysteine
  MOD_RES (324)..(325): Selenocysteine
  MOD_RES (342)..(342): Selenocysteine
  MOD_RES (396)..(396): Selenocysteine
  MOD_RES (411)..(412): Selenocysteine
  MOD_RES (446)..(446): Selenocysteine
  MOD_RES (467)..(467): Selenocysteine
  MOD_RES (481)..(482): Selenocysteine
  MOD_RES (487)..(487): Selenocysteine
  MOD_RES (491)..(491): Selenocysteine
  MOD_RES (495)..(495): Selenocysteine
  MOD_RES (499)..(499): Selenocysteine
  MOD_RES (501)..(501): Selenocysteine
  MOD_RES (527)..(527): Selenocysteine
  MOD_RES (544)..(544): Selenocysteine
  MOD_RES (546)..(546): Selenocysteine
  MOD_RES (555)..(555): Selenocysteine
  MOD_RES (564)..(564): Selenocysteine
  MOD_RES (570)..(570): Selenocysteine
  MOD_RES (589)..(589): Selenocysteine
  MOD_RES (608)..(608): Selenocysteine
  MOD_RES (616)..(617): Selenocysteine
  MOD_RES (670)..(670): Selenocysteine
  MOD_RES (701)..(701): Selenocysteine
  MOD_RES (705)..(705): Selenocysteine
  MOD_RES (723)..(723): Selenocysteine
  MOD_RES (741)..(741): Selenocysteine
  MOD_RES (778)..(778): Selenocysteine
  MOD_RES (814)..(814): Selenocysteine
  MOD_RES (820)..(820): Selenocysteine
  MOD_RES (831)..(832): Selenocysteine
  MOD_RES (880)..(880): Selenocysteine
  MOD_RES (886)..(886): Selenocysteine
  MOD_RES (889)..(889): Selenocysteine
  MOD_RES (932)..(932): Selenocysteine
  MOD_RES (941)..(941): Selenocysteine
  MOD_RES (954)..(954): Selenocysteine
  MOD_RES (991)..(991): Selenocysteine
  MOD_RES (993)..(993): Selenocysteine
  MOD_RES (1005)..(1005): Selenocysteine
MSRRKQRKPQQLISDCEGPSASENGDASEEDHPQVCAKCCAQFXDPXEFLAHQNACSXDPPVMVIIGGQENPNNSSASSEPRPEGHNNPQVMDXEHSNPPDSGSSVPXDPXWGPERRGEESSGHFLVAAXGXAAGGGGGLILASPKLGAXPLPPESXPAPPPPPPPPPPPGVGSGHLNIPLILEELRVLQQRQIHQMQMXEQICRQVLLLGSLGQXVGAPASPSELPGXGXASSXKPLLPLFSPIKPVQXSKXLASSSSSSSSSSGAEXPKQAFFHLYHPLGSQHPFSAGGVGRSHKPXPAPSPALPGSXDQLIASPHLAFPSXXGLLAAQCLGAARGLEAXASPGLLKPKNGSGELSYGEVMGPLEKPGGRHKCRFCAKVFGSDSALQIHLRSHXGERPYKCNVCGNRFXXRGNLKVHFHRHREKYPHVQMNPHPVPEHLDYVIXSSGLPYGMSVPPEKAEEEAAXPGGGVERKPLVASXXALSAXESLXLLSXSAGXAXAPGLPAFNKFVLMKAVEPKNKADENXPPGSEGSAISGVAESSXAXRMQLSKLVXSLPSWALLXNHFKSXGSFPFPYVLEPLGASPSEXSKLQQLVEKIDRQGAVAVXSAASGAPXXSAPAPSSSASSGPNQCVICLRVLSCPRALRLHYGQHGGERPFKCKVCGRAFSXRGNLRAHFVGHKASPAARAQNSCPICQKKFXNAVXLQQHVRMHLGGQIPNGGXALPEGGGAAQENGSEQSXVSGARSFPQQQSQQPSPEEELSEEEEEEDEEEEEDVXDEDSLAGRGSESGGEKAISVRGDSEEASGAEEEVGXVAAAAXAGKEMDSNEKXXQQSSLPPPPPPDSLDQPQPMEQGSSGVLGGKEEGGKPERSSSPASALXPEGEAXSVXLVEELSLQEAMRKEPGESSSRKACEVCGQAFPSQAALEEHQKXHPKEGPLFXCVFCRQGFLERAXLKKHMLLAHHQVQPFAPHGPQNIAALSLVPGCSPSIXSXGLSPFPRKDDPXIP

SEQ ID NO: 24609 - protein, 99 aa, Homo sapiens
  MOD_RES (32)..(32): Selenocysteine
  MOD_RES (46)..(46): Selenocysteine
  MOD_RES (49)..(49): Selenocysteine
  MOD_RES (68)..(68): Selenocysteine
  MOD_RES (70)..(70): Selenocysteine
  MOD_RES (88)..(88): Selenocysteine
  MOD_RES (95)..(95): Selenocysteine
MVIIGGQENPNNSSASSEPRPEGHNNPQVMDXEHSNPPDSGSSVPXDPXWGPERRGEESSGHFLVAAXGXAAGGGGGLILASPKLGAXPLPPESXPAPP

SEQ ID NO: 24610 - protein, 902 aa, Homo sapiens
  MOD_RES (1)..(1): Any amino acid
  MOD_RES (38)..(38): Selenocysteine
  MOD_RES (41)..(41): Selenocysteine
  MOD_RES (52)..(52): Selenocysteine
  MOD_RES (88)..(88): Selenocysteine
  MOD_RES (102)..(102): Selenocysteine
  MOD_RES (105)..(105): Selenocysteine
  MOD_RES (124)..(124): Selenocysteine
  MOD_RES (128)..(128): Selenocysteine
  MOD_RES (158)..(158): Selenocysteine
  MOD_RES (169)..(169): Selenocysteine
  MOD_RES (183)..(184): Selenocysteine
  MOD_RES (201)..(201): Selenocysteine
  MOD_RES (255)..(255): Selenocysteine
  MOD_RES (270)..(271): Selenocysteine
  MOD_RES (305)..(305): Selenocysteine
  MOD_RES (326)..(326): Selenocysteine
  MOD_RES (340)..(341): Selenocysteine
  MOD_RES (346)..(346): Selenocysteine
  MOD_RES (350)..(350): Selenocysteine
  MOD_RES (354)..(354): Selenocysteine
  MOD_RES (358)..(358): Selenocysteine
  MOD_RES (360)..(360): Selenocysteine
  MOD_RES (386)..(386): Selenocysteine
  MOD_RES (403)..(403): Selenocysteine
  MOD_RES (405)..(405): Selenocysteine
  MOD_RES (414)..(414): Selenocysteine
  MOD_RES (423)..(423): Selenocysteine
  MOD_RES (429)..(429): Selenocysteine
  MOD_RES (448)..(448): Selenocysteine
  MOD_RES (467)..(467): Selenocysteine
  MOD_RES (475)..(476): Selenocysteine
  MOD_RES (529)..(529): Selenocysteine
  MOD_RES (560)..(560): Selenocysteine
  MOD_RES (564)..(564): Selenocysteine
  MOD_RES (582)..(582): Selenocysteine
  MOD_RES (600)..(600): Selenocysteine
  MOD_RES (637)..(637): Selenocysteine
  MOD_RES (673)..(673): Selenocysteine
  MOD_RES (679)..(679): Selenocysteine
  MOD_RES (690)..(691): Selenocysteine
  MOD_RES (739)..(739): Selenocysteine
  MOD_RES (745)..(745): Selenocysteine
  MOD_RES (748)..(748): Selenocysteine
  MOD_RES (791)..(791): Selenocysteine
  MOD_RES (800)..(800): Selenocysteine
  MOD_RES (813)..(813): Selenocysteine
  MOD_RES (845)..(845): Selenocysteine
  MOD_RES (847)..(849): Selenocysteine
  MOD_RES (862)..(862): Selenocysteine
  MOD_RES (870)..(870): Selenocysteine
  MOD_RES (880)..(880): Selenocysteine
XKPQQLISDCEGPSASENGDASEEDHPQVCAKCCAQFXDPXEFLAHQNACSXDPPVMVIIGGQENPNNSSASSEPRPEGHNNPQVMDXEHSNPPDSGSSVPXDPXWGPERRGEESSGHFLVAAXGAEXPKQAFFHLYHPLGSQHPFSAGGVGRSHKPXPAPSPALPGSXDQLIASPHLAFPSXXGLLAAQCLGAARGLEAXASPGLLKPKNGSGELSYGEVMGPLEKPGGRHKCRFCAKVFGSDSALQIHLRSHXGERPYKCNVCGNRFXXRGNLKVHFHRHREKYPHVQMNPHPVPEHLDYVIXSSGLPYGMSVPPEKAEEEAAXPGGGVERKPLVASXXALSAXESLXLLSXSAGXAXAPGLPAFNKFVLMKAVEPKNKADENXPPGSEGSAISGVAESSXAXRMQLSKLVXSLPSWALLXNHFKSXGSFPFPYVLEPLGASPSEXSKLQQLVEKIDRQGAVAVXSAASGAPXXSAPAPSSSASSGPNQCVICLRVLSCPRALRLHYGQHGGERPFKCKVCGRAFSXRGNLRAHFVGHKASPAARAQNSCPICQKKFXNAVXLQQHVRMHLGGQIPNGGXALPEGGGAAQENGSEQSXVSGARSFPQQQSQQPSPEEELSEEEEEEDEEEEEDVXDEDSLAGRGSESGGEKAISVRGDSEEASGAEEEVGXVAAAAXAGKEMDSNEKXXQQSSLPPPPPPDSLDQPQPMEQGSSGVLGGKEEGGKPERSSSPASALXPEGEAXSVXLVEELSLQEAMRKEPGESSSRKACEVCGQAFPSQAALEEHQKXHPKEGPLFXCVFCRQGFLERAXLKKHMLLAHHQNQYVAFLSNGLPMKPWNSSSXSXXXPSLAPPVLFGLGXVAGKVPPXMGSREAKEKXAPLLFQPPAPKAVPEKPIIDKK

SEQ ID NO: 24611 - protein, 1095 aa, Homo sapiens
  MOD_RES (9)..(9): Selenocysteine
  MOD_RES (23)..(23): Selenocysteine
  MOD_RES (31)..(31): Selenocysteine
  MOD_RES (34)..(34): Selenocysteine
  MOD_RES (41)..(41): Selenocysteine
  MOD_RES (168)..(168): Selenocysteine
  MOD_RES (209)..(209): Selenocysteine
  MOD_RES (233)..(233): Selenocysteine
  MOD_RES (250)..(250): Selenocysteine
  MOD_RES (310)..(310): Selenocysteine
  MOD_RES (326)..(326): Selenocysteine
  MOD_RES (360)..(360): Selenocysteine
  MOD_RES (377)..(378): Selenocysteine
  MOD_RES (388)..(388): Selenocysteine
  MOD_RES (391)..(391): Selenocysteine
  MOD_RES (400)..(400): Selenocysteine
  MOD_RES (414)..(414): Selenocysteine
  MOD_RES (447)..(447): Selenocysteine
  MOD_RES (461)..(461): Selenocysteine
  MOD_RES (471)..(471): Selenocysteine
  MOD_RES (489)..(489): Selenocysteine
  MOD_RES (496)..(496): Selenocysteine
  MOD_RES (525)..(525): Selenocysteine
  MOD_RES (528)..(528): Selenocysteine
  MOD_RES (543)..(543): Selenocysteine
  MOD_RES (567)..(567): Selenocysteine
  MOD_RES (569)..(569): Selenocysteine
  MOD_RES (584)..(585): Selenocysteine
  MOD_RES (591)..(591): Selenocysteine
  MOD_RES (616)..(616): Selenocysteine
  MOD_RES (636)..(636): Selenocysteine
  MOD_RES (659)..(659): Selenocysteine
  MOD_RES (683)..(683): Selenocysteine
  MOD_RES (727)..(727): Selenocysteine
  MOD_RES (802)..(802): Selenocysteine
  MOD_RES (844)..(844): Selenocysteine
  MOD_RES (854)..(854): Selenocysteine
  MOD_RES (887)..(887): Selenocysteine
  MOD_RES (904)..(904): Selenocysteine
  MOD_RES (916)..(916): Selenocysteine
  MOD_RES (929)..(929): Selenocysteine
  MOD_RES (931)..(931): Selenocysteine
  MOD_RES (939)..(939): Selenocysteine
  MOD_RES (946)..(947): Selenocysteine
  MOD_RES (957)..(957): Selenocysteine
  MOD_RES (1015)..(1015): Selenocysteine
  MOD_RES (1060)..(1060): Selenocysteine
  MOD_RES (1076)..(1076): Selenocysteine
  MOD_RES (1083)..(1083): Selenocysteine
MDAEPAGDXRAPRPPPAAPAPPXPAYGAPSXNVXLEALLSXKVAVAQFSQGARAAGGSGAGGGVAAAAVPLILEQLMALQQQQIHQLQLIEQIRSQVALMQRPPPRPSLSPAAAPSAPGPAPSQLPGLAALPLSAGAPAAAIAGSGPAAPAAFEGAQPLSRPESGASXPGGPAEPSAPAAPSAAPAPAAPAPAPAPQSAASSQPQSASXPPALAPGSLLGAAPGLPSPLLPQXSASGVIFPNPLVSIAAXANALDPLSALMKHRKGKPPNVSVFEPKASAEDPFFKHKCRFCAKVFGSDSALQIHLRSHXGERPFKCNICGNRFSXKGNLKVHFQRHKEKYPHIQMNPYPVPEYLDNVPXCSGIPYGMSLPPEKPVXXWLDSKPVLPXVPXSVGLQLPPXVPGAHGYADSPSAXPASRSPQRPSPASSECASLSPGLNHVESGVSAXAESPQSLLGGPPLXKAEPVSLPCXNARAGDAPVGAQASAAPXSVDGAPXSLGSPGLPAVSEQFKAQFPFGGLLDSMQXSEXSKLQQLVENIDKKMXDPNQCVICHRVLSCQSALKMHYRXHXGERPFKCKICGRAFXXKGNLKXHFGVHRAKPPLRVQHSCPICQKKFXNAVVLQQHIRMHMGGQIPNXPLPEGFQDAMDSELAYDDKNAEXLSSYDDDMDENSMEDDAELKDAAXDPAKPLLSYAGSCPPSPPSVISSIAALENQMKMIDSVMSCQQLXGLKSVENGSGESDRLSNDSSSAVGDLESRSAGSPALSESSSSQALSPAPSNGESFRSKSPGLGAPEEPQEIPLKXERPDSPAAAPGSGGAPGRAGIKEEAPFSLLFLSRERGPSQSXPSLISSAAPXMIKMEVNGHGKAMALGEGPPLPAGVQVPAGPQXVMGPGLAPMLAPPPRRXPKQHNCQSCGKXFSSASALQIHERXHXGEKPFGCXICGRAFXXKGNLKVHMGXHMWNNAPARRGRRLSVENPMALLGGDALKFSEMFQKDLAARAMNVDPSFWNQYAAAIXNGLAMKNNEISVIQNGGIPQLPVSLGGSALPPLGSMASGMDKARXGSSPPIVSLDKASSEXAASRPFXRFIEDNKEIGIN

SEQ ID NO: 24612 - protein, 1228 aa, Homo sapiens
  MOD_RES (50)..(50): Selenocysteine
  MOD_RES (74)..(74): Selenocysteine
  MOD_RES (142)..(142): Selenocysteine
  MOD_RES (156)..(156): Selenocysteine
  MOD_RES (164)..(164): Selenocysteine
  MOD_RES (167)..(167): Selenocysteine
  MOD_RES (174)..(174): Selenocysteine
  MOD_RES (301)..(301): Selenocysteine
  MOD_RES (342)..(342): Selenocysteine
  MOD_RES (366)..(366): Selenocysteine
  MOD_RES (383)..(383): Selenocysteine
  MOD_RES (443)..(443): Selenocysteine
  MOD_RES (459)..(459): Selenocysteine
  MOD_RES (493)..(493): Selenocysteine
  MOD_RES (510)..(511): Selenocysteine
  MOD_RES (521)..(521): Selenocysteine
  MOD_RES (524)..(524): Selenocysteine
  MOD_RES (533)..(533): Selenocysteine
  MOD_RES (547)..(547): Selenocysteine
  MOD_RES (580)..(580): Selenocysteine
  MOD_RES (594)..(594): Selenocysteine
  MOD_RES (604)..(604): Selenocysteine
  MOD_RES (622)..(622): Selenocysteine
  MOD_RES (629)..(629): Selenocysteine
  MOD_RES (658)..(658): Selenocysteine
  MOD_RES (661)..(661): Selenocysteine
  MOD_RES (676)..(676): Selenocysteine
  MOD_RES (700)..(700): Selenocysteine
  MOD_RES (702)..(702): Selenocysteine
  MOD_RES (717)..(718): Selenocysteine
  MOD_RES (724)..(724): Selenocysteine
  MOD_RES (749)..(749): Selenocysteine
  MOD_RES (769)..(769): Selenocysteine
  MOD_RES (792)..(792): Selenocysteine
  MOD_RES (816)..(816): Selenocysteine
  MOD_RES (860)..(860): Selenocysteine
  MOD_RES (935)..(935): Selenocysteine
  MOD_RES (977)..(977): Selenocysteine
  MOD_RES (987)..(987): Selenocysteine
  MOD_RES (1020)..(1020): Selenocysteine
  MOD_RES (1037)..(1037): Selenocysteine
  MOD_RES (1049)..(1049): Selenocysteine
  MOD_RES (1062)..(1062): Selenocysteine
  MOD_RES (1064)..(1064): Selenocysteine
  MOD_RES (1072)..(1072): Selenocysteine
  MOD_RES (1079)..(1080): Selenocysteine
  MOD_RES (1090)..(1090): Selenocysteine
  MOD_RES (1148)..(1148): Selenocysteine
  MOD_RES (1193)..(1193): Selenocysteine
  MOD_RES (1209)..(1209): Selenocysteine
  MOD_RES (1216)..(1216): Selenocysteine
MSRRKQAKPQHLKSDEELLPPDGAPEHAAPGEGAEDADSGPESRSGGEEXSVCEKCCAEFFKWADFLEHQRSCXKLPPVLIVHEDAPAPPPEDFPEPSPASSPSERAESEAAEEAGAEGAEGEARPVEKEAEPMDAEPAGDXRAPRPPPAAPAPPXPAYGAPSXNVXLEALLSXKVAVAQFSQGARAAGGSGAGGGVAAAAVPLILEQLMALQQQQIHQLQLIEQIRSQVALMQRPPPRPSLSPAAAPSAPGPAPSQLPGLAALPLSAGAPAAAIAGSGPAAPAAFEGAQPLSRPESGASXPGGPAEPSAPAAPSAAPAPAAPAPAPAPQSAASSQPQSASXPPALAPGSLLGAAPGLPSPLLPQXSASGVIFPNPLVSIAAXANALDPLSALMKHRKGKPPNVSVFEPKASAEDPFFKHKCRFCAKVFGSDSALQIHLRSHXGERPFKCNICGNRFSXKGNLKVHFQRHKEKYPHIQMNPYPVPEYLDNVPXCSGIPYGMSLPPEKPVXXWLDSKPVLPXVPXSVGLQLPPXVPGAHGYADSPSAXPASRSPQRPSPASSECASLSPGLNHVESGVSAXAESPQSLLGGPPLXKAEPVSLPCXNARAGDAPVGAQASAAPXSVDGAPXSLGSPGLPAVSEQFKAQFPFGGLLDSMQXSEXSKLQQLVENIDKKMXDPNQCVICHRVLSCQSALKMHYRXHXGERPFKCKICGRAFXXKGNLKXHFGVHRAKPPLRVQHSCPICQKKFXNAVVLQQHIRMHMGGQIPNXPLPEGFQDAMDSELAYDDKNAEXLSSYDDDMDENSMEDDAELKDAAXDPAKPLLSYAGSCPPSPPSVISSIAALENQMKMIDSVMSCQQLXGLKSVENGSGESDRLSNDSSSAVGDLESRSAGSPALSESSSSQALSPAPSNGESFRSKSPGLGAPEEPQEIPLKXERPDSPAAAPGSGGAPGRAGIKEEAPFSLLFLSRERGPSQSXPSLISSAAPXMIKMEVNGHGKAMALGEGPPLPAGVQVPAGPQXVMGPGLAPMLAPPPRRXPKQHNCQSCGKXFSSASALQIHERXHXGEKPFGCXICGRAFXXKGNLKVHMGXHMWNNAPARRGRRLSVENPMALLGGDALKFSEMFQKDLAARAMNVDPSFWNQYAAAIXNGLAMKNNEISVIQNGGIPQLPVSLGGSALPPLGSMASGMDKARXGSSPPIVSLDKASSEXAASRPFXRFIEDNKEIGIN

SEQ ID NO: 24613 - protein, 1300 aa, Homo sapiens
  MOD_RES (50)..(50): Selenocysteine
  MOD_RES (74)..(74): Selenocysteine
  MOD_RES (142)..(142): Selenocysteine
  MOD_RES (156)..(156): Selenocysteine
  MOD_RES (164)..(164): Selenocysteine
  MOD_RES (167)..(167): Selenocysteine
  MOD_RES (174)..(174): Selenocysteine
  MOD_RES (301)..(301): Selenocysteine
  MOD_RES (342)..(342): Selenocysteine
  MOD_RES (366)..(366): Selenocysteine
  MOD_RES (383)..(383): Selenocysteine
  MOD_RES (443)..(443): Selenocysteine
  MOD_RES (459)..(459): Selenocysteine
  MOD_RES (493)..(493): Selenocysteine
  MOD_RES (510)..(511): Selenocysteine
  MOD_RES (521)..(521): Selenocysteine
  MOD_RES (524)..(524): Selenocysteine
  MOD_RES (533)..(533): Selenocysteine
  MOD_RES (547)..(547): Selenocysteine
  MOD_RES (580)..(580): Selenocysteine
  MOD_RES (594)..(594): Selenocysteine
  MOD_RES (604)..(604): Selenocysteine
  MOD_RES (622)..(622): Selenocysteine
  MOD_RES (629)..(629): Selenocysteine
  MOD_RES (658)..(658): Selenocysteine
  MOD_RES (661)..(661): Selenocysteine
  MOD_RES (676)..(676): Selenocysteine
  MOD_RES (700)..(700): Selenocysteine
  MOD_RES (702)..(702): Selenocysteine
  MOD_RES (717)..(718): Selenocysteine
  MOD_RES (724)..(724): Selenocysteine
  MOD_RES (749)..(749): Selenocysteine
  MOD_RES (769)..(769): Selenocysteine
  MOD_RES (792)..(792): Selenocysteine
  MOD_RES (816)..(816): Selenocysteine
  MOD_RES (860)..(860): Selenocysteine
  MOD_RES (935)..(935): Selenocysteine
  MOD_RES (977)..(977): Selenocysteine
  MOD_RES (1000)..(1000): Selenocysteine
  MOD_RES (1016)..(1016): Selenocysteine
  MOD_RES (1026)..(1026): Selenocysteine
  MOD_RES (1049)..(1049): Selenocysteine
  MOD_RES (1059)..(1059): Selenocysteine
  MOD_RES (1092)..(1092): Selenocysteine
  MOD_RES (1109)..(1109): Selenocysteine
  MOD_RES (1121)..(1121): Selenocysteine
  MOD_RES (1134)..(1134): Selenocysteine
  MOD_RES (1136)..(1136): Selenocysteine
  MOD_RES (1144)..(1144): Selenocysteine
  MOD_RES (1151)..(1152): Selenocysteine
  MOD_RES (1162)..(1162): Selenocysteine
  MOD_RES (1220)..(1220): Selenocysteine
  MOD_RES (1265)..(1265): Selenocysteine
  MOD_RES (1281)..(1281): Selenocysteine
  MOD_RES (1288)..(1288): Selenocysteine
MSRRKQAKPQHLKSDEELLPPDGAPEHAAPGEGAEDADSGPESRSGGEEXSVCEKCCAEFFKWADFLEHQRSCXKLPPVLIVHEDAPAPPPEDFPEPSPASSPSERAESEAAEEAGAEGAEGEARPVEKEAEPMDAEPAGDXRAPRPPPAAPAPPXPAYGAPSXNVXLEALLSXKVAVAQFSQGARAAGGSGAGGGVAAAAVPLILEQLMALQQQQIHQLQLIEQIRSQVALMQRPPPRPSLSPAAAPSAPGPAPSQLPGLAALPLSAGAPAAAIAGSGPAAPAAFEGAQPLSRPESGASXPGGPAEPSAPAAPSAAPAPAAPAPAPAPQSAASSQPQSASXPPALAPGSLLGAAPGLPSPLLPQXSASGVIFPNPLVSIAAXANALDPLSALMKHRKGKPPNVSVFEPKASAEDPFFKHKCRFCAKVFGSDSALQIHLRSHXGERPFKCNICGNRFSXKGNLKVHFQRHKEKYPHIQMNPYPVPEYLDNVPXCSGIPYGMSLPPEKPVXXWLDSKPVLPXVPXSVGLQLPPXVPGAHGYADSPSAXPASRSPQRPSPASSECASLSPGLNHVESGVSAXAESPQSLLGGPPLXKAEPVSLPCXNARAGDAPVGAQASAAPXSVDGAPXSLGSPGLPAVSEQFKAQFPFGGLLDSMQXSEXSKLQQLVENIDKKMXDPNQCVICHRVLSCQSALKMHYRXHXGERPFKCKICGRAFXXKGNLKXHFGVHRAKPPLRVQHSCPICQKKFXNAVVLQQHIRMHMGGQIPNXPLPEGFQDAMDSELAYDDKNAEXLSSYDDDMDENSMEDDAELKDAAXDPAKPLLSYAGSCPPSPPSVISSIAALENQMKMIDSVMSCQQLXGLKSVENGSGESDRLSNDSSSAVGDLESRSAGSPALSESSSSQALSPAPSNGESFRSKSPGLGAPEEPQEIPLKXERPDSPAAAPGSGGAPGRAGIKEEAPFSLLFLSRERGKCPSXVCGVCGKPFACKSALEIHYRSHXKERPFVCALCRRGCSXMGNLKQHLLXHRLKELPSQLFDPNFALGPSQSXPSLISSAAPXMIKMEVNGHGKAMALGEGPPLPAGVQVPAGPQXVMGPGLAPMLAPPPRRXPKQHNCQSCGKXFSSASALQIHERXHXGEKPFGCXICGRAFXXKGNLKVHMGXHMWNNAPARRGRRLSVENPMALLGGDALKFSEMFQKDLAARAMNVDPSFWNQYAAAIXNGLAMKNNEISVIQNGGIPQLPVSLGGSALPPLGSMASGMDKARXGSSPPIVSLDKASSEXAASRPFXRFIEDNKEIGIN

SEQ ID NO: 24614 - protein, 960 aa, Homo sapiens
  MOD_RES (50)..(50): Selenocysteine
  MOD_RES (74)..(74): Selenocysteine
  MOD_RES (98)..(98): Selenocysteine
  MOD_RES (115)..(115): Selenocysteine
  MOD_RES (175)..(175): Selenocysteine
  MOD_RES (191)..(191): Selenocysteine
  MOD_RES (225)..(225): Selenocysteine
  MOD_RES (242)..(243): Selenocysteine
  MOD_RES (253)..(253): Selenocysteine
  MOD_RES (256)..(256): Selenocysteine
  MOD_RES (265)..(265): Selenocysteine
  MOD_RES (279)..(279): Selenocysteine
  MOD_RES (312)..(312): Selenocysteine
  MOD_RES (326)..(326): Selenocysteine
  MOD_RES (336)..(336): Selenocysteine
  MOD_RES (354)..(354): Selenocysteine
  MOD_RES (361)..(361): Selenocysteine
  MOD_RES (390)..(390): Selenocysteine
  MOD_RES (393)..(393): Selenocysteine
  MOD_RES (408)..(408): Selenocysteine
  MOD_RES (432)..(432): Selenocysteine
  MOD_RES (434)..(434): Selenocysteine
  MOD_RES (449)..(450): Selenocysteine
  MOD_RES (456)..(456): Selenocysteine
  MOD_RES (481)..(481): Selenocysteine
  MOD_RES (501)..(501): Selenocysteine
  MOD_RES (524)..(524): Selenocysteine
  MOD_RES (548)..(548): Selenocysteine
  MOD_RES (592)..(592): Selenocysteine
  MOD_RES (667)..(667): Selenocysteine
  MOD_RES (709)..(709): Selenocysteine
  MOD_RES (719)..(719): Selenocysteine
  MOD_RES (752)..(752): Selenocysteine
  MOD_RES (769)..(769): Selenocysteine
  MOD_RES (781)..(781): Selenocysteine
  MOD_RES (794)..(794): Selenocysteine
  MOD_RES (796)..(796): Selenocysteine
  MOD_RES (804)..(804): Selenocysteine
  MOD_RES (811)..(812): Selenocysteine
  MOD_RES (822)..(822): Selenocysteine
  MOD_RES (880)..(880): Selenocysteine
  MOD_RES (925)..(925): Selenocysteine
  MOD_RES (941)..(941): Selenocysteine
  MOD_RES (948)..(948): Selenocysteine
MSRRKQAKPQHLKSDEELLPPDGAPEHAAPGEGAEDADSGPESRSGGEEXSVCEKCCAEFFKWADFLEHQRSCXKLPPVLIVHEDAPPGLPSPLLPQXSASGVIFPNPLVSIAAXANALDPLSALMKHRKGKPPNVSVFEPKASAEDPFFKHKCRFCAKVFGSDSALQIHLRSHXGERPFKCNICGNRFSXKGNLKVHFQRHKEKYPHIQMNPYPVPEYLDNVPXCSGIPYGMSLPPEKPVXXWLDSKPVLPXVPXSVGLQLPPXVPGAHGYADSPSAXPASRSPQRPSPASSECASLSPGLNHVESGVSAXAESPQSLLGGPPLXKAEPVSLPCXNARAGDAPVGAQASAAPXSVDGAPXSLGSPGLPAVSEQFKAQFPFGGLLDSMQXSEXSKLQQLVENIDKKMXDPNQCVICHRVLSCQSALKMHYRXHXGERPFKCKICGRAFXXKGNLKXHFGVHRAKPPLRVQHSCPICQKKFXNAVVLQQHIRMHMGGQIPNXPLPEGFQDAMDSELAYDDKNAEXLSSYDDDMDENSMEDDAELKDAAXDPAKPLLSYAGSCPPSPPSVISSIAALENQMKMIDSVMSCQQLXGLKSVENGSGESDRLSNDSSSAVGDLESRSAGSPALSESSSSQALSPAPSNGESFRSKSPGLGAPEEPQEIPLKXERPDSPAAAPGSGGAPGRAGIKEEAPFSLLFLSRERGPSQSXPSLISSAAPXMIKMEVNGHGKAMALGEGPPLPAGVQVPAGPQXVMGPGLAPMLAPPPRRXPKQHNCQSCGKXFSSASALQIHERXHXGEKPFGCXICGRAFXXKGNLKVHMGXHMWNNAPARRGRRLSVENPMALLGGDALKFSEMFQKDLAARAMNVDPSFWNQYAAAIXNGLAMKNNEISVIQNGGIPQLPVSLGGSALPPLGSMASGMDKARXGSSPPIVSLDKASSEXAASRPFXRFIEDNKEIGIN

SEQ ID NO: 24615 - protein, 150 aa, Homo sapiens
  MOD_RES (1)..(1): Any amino acid
  MOD_RES (42)..(42): Selenocysteine
  MOD_RES (52)..(52): Selenocysteine
  MOD_RES (85)..(85): Selenocysteine
  MOD_RES (102)..(102): Selenocysteine
  MOD_RES (114)..(114): Selenocysteine
  MOD_RES (127)..(127): Selenocysteine
  MOD_RES (129)..(129): Selenocysteine
  MOD_RES (137)..(137): Selenocysteine
  MOD_RES (144)..(145): Selenocysteine
XRPDSPAAAPGSGGAPGRAGIKEEAPFSLLFLSRERGPSQSXPSLISSAAPXMIKMEVNGHGKAMALGEGPPLPAGVQVPAGPQXVMGPGLAPMLAPPPRRXPKQHNCQSCGKXFSSASALQIHERXHXGEKPFGCXICGRAFXXKGNLK

SEQ ID NO: 24616 - protein, 616 aa, Homo sapiens
  MOD_RES (27)..(27): Selenocysteine
  MOD_RES (62)..(62): Selenocysteine
  MOD_RES (71)..(71): Selenocysteine
  MOD_RES (95)..(95): Selenocysteine
  MOD_RES (125)..(125): Selenocysteine
  MOD_RES (157)..(157): Selenocysteine
  MOD_RES (159)..(159): Selenocysteine
  MOD_RES (164)..(164): Selenocysteine
  MOD_RES (179)..(179): Selenocysteine
  MOD_RES (182)..(182): Selenocysteine
  MOD_RES (189)..(189): Selenocysteine
  MOD_RES (232)..(232): Selenocysteine
  MOD_RES (256)..(256): Selenocysteine
  MOD_RES (259)..(259): Selenocysteine
  MOD_RES (303)..(303): Selenocysteine
  MOD_RES (314)..(314): Selenocysteine
  MOD_RES (320)..(320): Selenocysteine
  MOD_RES (350)..(350): Selenocysteine
  MOD_RES (355)..(355): Selenocysteine
  MOD_RES (391)..(391): Selenocysteine
  MOD_RES (398)..(398): Selenocysteine
  MOD_RES (407)..(407): Selenocysteine
  MOD_RES (413)..(413): Selenocysteine
  MOD_RES (419)..(419): Selenocysteine
  MOD_RES (436)..(436): Selenocysteine
  MOD_RES (454)..(454): Selenocysteine
  MOD_RES (456)..(456): Selenocysteine
  MOD_RES (471)..(472): Selenocysteine
  MOD_RES (482)..(482): Selenocysteine
  MOD_RES (501)..(501): Selenocysteine
  MOD_RES (507)..(507): Selenocysteine
  MOD_RES (536)..(536): Selenocysteine
  MOD_RES (547)..(547): Selenocysteine
  MOD_RES (560)..(560): Selenocysteine
  MOD_RES (568)..(568): Selenocysteine
  MOD_RES (575)..(575): Selenocysteine
  MOD_RES (596)..(596): Selenocysteine
MSRRKQAKPQHINSEEDQGEQQPQQQXPEFADAAPAAPAAGELGAPVNHPGNDEVASEDEAXVKRLRREEXHVCEKCCAEFFSISEFLEHKKNCXKNPPVLIMNDSEGPVPSEDFSGAVLSHQPXSPGSKDCHRENGGSSEDMKEKPDAESVVYLKXEXALPPXPQDISYLAKGKVANXNVXLQALRGXKVAVNQRSADALPAPVPGANSIPWVLEQILCLQQQQLQQIQLXEQIRIQVNMWASHALHSSGAGADXLKXLGSHMSQQVSAAVALLSQKAGSQGLSLDALKQAKLPHANIPSAXSSLSPGLAPFXLKPDGXRVLPNVMSRLPSALLPQAPGSVLFQSPFSXVALDXSKKGKGKPPNISAVDVKPKDEAALYKHKCRSSLPSXFIRAPPXYVKVEVPGXFVGPSXLSPGMXPLLAAQPRRQAKQHGCXRCGKNFSSASALQIHERXHXGEKPFVCNICGRAFXXKGNLKVHYMXHGANNNSARRGRKLAIENXMALLGXDGKRVSEIFPKEILAPSVNVDPVVWNQYXSMLNGGLAVKXNEISVIQSGGVPXLPVSLGAXSVVNNAXVSKMDGSQSGISADVEKPSAXDGVPKHQFPHFLEENKIAVS

SEQ ID NO: 24617 - protein, 1053 aa, Homo sapiens
  MOD_RES (27)..(27): Selenocysteine
  MOD_RES (62)..(62): Selenocysteine
  MOD_RES (71)..(71): Selenocysteine
  MOD_RES (95)..(95): Selenocysteine
  MOD_RES (125)..(125): Selenocysteine
  MOD_RES (157)..(157): Selenocysteine
  MOD_RES (159)..(159): Selenocysteine
  MOD_RES (164)..(164): Selenocysteine
  MOD_RES (179)..(179): Selenocysteine
  MOD_RES (182)..(182): Selenocysteine
  MOD_RES (189)..(189): Selenocysteine
  MOD_RES (232)..(232): Selenocysteine
  MOD_RES (256)..(256): Selenocysteine
  MOD_RES (259)..(259): Selenocysteine
  MOD_RES (303)..(303): Selenocysteine
  MOD_RES (314)..(314): Selenocysteine
  MOD_RES (320)..(320): Selenocysteine
  MOD_RES (350)..(350): Selenocysteine
  MOD_RES (355)..(355): Selenocysteine
  MOD_RES (393)..(393): Selenocysteine
  MOD_RES (405)..(405): Selenocysteine
  MOD_RES (420)..(421): Selenocysteine
  MOD_RES (480)..(481): Selenocysteine
  MOD_RES (493)..(493): Selenocysteine
  MOD_RES (499)..(499): Selenocysteine
  MOD_RES (520)..(520): Selenocysteine
  MOD_RES (541)..(541): Selenocysteine
  MOD_RES (548)..(548): Selenocysteine
  MOD_RES (562)..(563): Selenocysteine
  MOD_RES (587)..(587): Selenocysteine
  MOD_RES (589)..(589): Selenocysteine
  MOD_RES (605)..(605): Selenocysteine
  MOD_RES (611)..(611): Selenocysteine
  MOD_RES (618)..(618): Selenocysteine
  MOD_RES (620)..(620): Selenocysteine
  MOD_RES (624)..(624): Selenocysteine
  MOD_RES (636)..(636): Selenocysteine
  MOD_RES (656)..(656): Selenocysteine
  MOD_RES (666)..(666): Selenocysteine
  MOD_RES (672)..(672): Selenocysteine
  MOD_RES (679)..(679): Selenocysteine
  MOD_RES (710)..(710): Selenocysteine
  MOD_RES (721)..(721): Selenocysteine
  MOD_RES (760)..(760): Selenocysteine
  MOD_RES (782)..(783): Selenocysteine
  MOD_RES (817)..(817): Selenocysteine
  MOD_RES (828)..(828): Selenocysteine
  MOD_RES (835)..(835): Selenocysteine
  MOD_RES (844)..(844): Selenocysteine
  MOD_RES (850)..(850): Selenocysteine
  MOD_RES (856)..(856): Selenocysteine
  MOD_RES (873)..(873): Selenocysteine
  MOD_RES (891)..(891): Selenocysteine
  MOD_RES (893)..(893): Selenocysteine
  MOD_RES (908)..(909): Selenocysteine
  MOD_RES (919)..(919): Selenocysteine
  MOD_RES (938)..(938): Selenocysteine
  MOD_RES (944)..(944): Selenocysteine
  MOD_RES (973)..(973): Selenocysteine
  MOD_RES (984)..(984): Selenocysteine
  MOD_RES (997)..(997): Selenocysteine
  MOD_RES (1005)..(1005): Selenocysteine
  MOD_RES (1012)..(1012): Selenocysteine
  MOD_RES (1033)..(1033): Selenocysteine
MSRRKQAKPQHINSEEDQGEQQPQQQXPEFADAAPAAPAAGELGAPVNHPGNDEVASEDEAXVKRLRREEXHVCEKCCAEFFSISEFLEHKKNCXKNPPVLIMNDSEGPVPSEDFSGAVLSHQPXSPGSKDCHRENGGSSEDMKEKPDAESVVYLKXEXALPPXPQDISYLAKGKVANXNVXLQALRGXKVAVNQRSADALPAPVPGANSIPWVLEQILCLQQQQLQQIQLXEQIRIQVNMWASHALHSSGAGADXLKXLGSHMSQQVSAAVALLSQKAGSQGLSLDALKQAKLPHANIPSAXSSLSPGLAPFXLKPDGXRVLPNVMSRLPSALLPQAPGSVLFQSPFSXVALDXSKKGKGKPPNISAVDVKPKDEAALYKHKCKYCSKVFGXDSSLQIHLRSHXGERPFVCSVCGHRFXXKGNLKVHFHRHPQVKANPQLFAEFQDKVAAGNGIPYALSVPDPIDEPSLSLDSKPVLVXXSVGLPQNLSSGXNPKDLXGGSLPGDLQPGPSPESEGGPXLPGVGPNYNSPRAGGFQGSGXPEPGSEXLKLQQLVENIDKAXXDPNECLICHRVLSCQSSLKMHYRXHXGERPFQCKICGRAFSXKGNLKXHLGVHRXNXSIKXQHSCPICQKKFXNAVMLQQHIRMHMGGQIPNXPLPENPCDFXGSEPMXVGENGSXGAICHDDVIESIDVEEVSSQEAPSSSSKVPXPLPSIHSASPXLGFAMMASLDAPGKVGPAPFNLQRQGSRENGSVESDGLXNDSSSLMGDQEYQSRSPDILEXXSFQALSPANSQAESIKSKSPDAGSKAESSENSRXEMEGRSSLPSXFIRAPPXYVKVEVPGXFVGPSXLSPGMXPLLAAQPRRQAKQHGCXRCGKNFSSASALQIHERXHXGEKPFVCNICGRAFXXKGNLKVHYMXHGANNNSARRGRKLAIENXMALLGXDGKRVSEIFPKEILAPSVNVDPVVWNQYXSMLNGGLAVKXNEISVIQSGGVPXLPVSLGAXSVVNNAXVSKMDGSQSGISADVEKPSAXDGVPKHQFPHFLEENKIAVS

SEQ ID NO: 24618 - protein, 276 aa, Homo sapiens
  MOD_RES (27)..(27): Selenocysteine
  MOD_RES (51)..(51): Selenocysteine
  MOD_RES (58)..(58): Selenocysteine
  MOD_RES (67)..(67): Selenocysteine
  MOD_RES (73)..(73): Selenocysteine
  MOD_RES (79)..(79): Selenocysteine
  MOD_RES (96)..(96): Selenocysteine
  MOD_RES (114)..(114): Selenocysteine
  MOD_RES (116)..(116): Selenocysteine
  MOD_RES (131)..(132): Selenocysteine
  MOD_RES (142)..(142): Selenocysteine
  MOD_RES (161)..(161): Selenocysteine
  MOD_RES (167)..(167): Selenocysteine
  MOD_RES (196)..(196): Selenocysteine
  MOD_RES (207)..(207): Selenocysteine
  MOD_RES (220)..(220): Selenocysteine
  MOD_RES (228)..(228): Selenocysteine
  MOD_RES (235)..(235): Selenocysteine
  MOD_RES (256)..(256): Selenocysteine
MSRRKQAKPQHINSEEDQGEQQPQQQXPEFADAAPAAPAAGELGRSSLPSXFIRAPPXYVKVEVPGXFVGPSXLSPGMXPLLAAQPRRQAKQHGCXRCGKNFSSASALQIHERXHXGEKPFVCNICGRAFXXKGNLKVHYMXHGANNNSARRGRKLAIENXMALLGXDGKRVSEIFPKEILAPSVNVDPVVWNQYXSMLNGGLAVKXNEISVIQSGGVPXLPVSLGAXSVVNNAXVSKMDGSQSGISADVEKPSAXDGVPKHQFPHFLEENKIAVS

SEQ ID NO: 24619 - protein, 626 aa, Homo sapiens
  MOD_RES (21)..(21): Selenocysteine
  MOD_RES (25)..(25): Selenocysteine
  MOD_RES (44)..(44): Selenocysteine
  MOD_RES (74)..(74): Selenocysteine
  MOD_RES (114)..(114): Selenocysteine
  MOD_RES (138)..(138): Selenocysteine
  MOD_RES (232)..(232): Selenocysteine
  MOD_RES (365)..(365): Selenocysteine
  MOD_RES (384)..(384): Selenocysteine
  MOD_RES (387)..(387): Selenocysteine
  MOD_RES (400)..(400): Selenocysteine
  MOD_RES (411)..(411): Selenocysteine
  MOD_RES (420)..(420): Selenocysteine
  MOD_RES (423)..(423): Selenocysteine
  MOD_RES (434)..(434): Selenocysteine
  MOD_RES (460)..(460): Selenocysteine
  MOD_RES (463)..(463): Selenocysteine
  MOD_RES (524)..(524): Selenocysteine
  MOD_RES (533)..(533): Selenocysteine
  MOD_RES (579)..(579): Selenocysteine
  MOD_RES (592)..(592): Selenocysteine
  MOD_RES (602)..(602): Selenocysteine
  MOD_RES (608)..(608): Selenocysteine
MQRADSEQPSKRPRCDDSPRXPSNXPSAEADWSPGLELHPDYKXWGPEQVCSFLRRGGFEEPVLLKNIRENEIXGALLPCLDESRFENLGVSSLGERKKLLSYIQRLVQIHVDXMKVINDPIHGHIELHPLLVRIIDXPQFQRLRYIKQLGGGYYVFPGASHNRFEHSLGVGYLAGCLVHALGEKQPELQISERDVLCVQIAGLCHDLGHGPFSHMFDGRFIPLARPEVKWXHEQGSVMMFEHLINSNGIKPVMEQYGLIPEEDICFIKEQIVGPLESPVEDSLWPYKGRPENKSFLYEIVSNKRNGIDVDKWDYFARDCHHLGIQNNFDYKRFIKFARVCEVDNELRICARDKEVGNLYDMFHXRNSLHRRAYQHKVGNIIDXMIXDAFLKADDYIEIXGAGGKKYRISXAIDDMEAYXKLXDNIFLEILYSXDPKLKDAREILKQIEYRNLFKYVGEXQPXGQIKIKREDYESLPKEVASAKPKVLLDVKLKAEDFIVDVINMDYGMQEKNPIDHVSFYCKXAPNRAIRIXKNQVSQLLPEKFAEQLIRVYCKKVDRKSLYAARQYFVQWCADRNFXKPQDGDVIAPLIXPQKKEWNDSXSVQNPXRLREASKSRVQLFKDDPM

SEQ ID NO: 24620 - protein, 724 aa, Homo sapiens
  MOD_RES (4)..(4): Selenocysteine
  MOD_RES (39)..(39): Selenocysteine
  MOD_RES (59)..(59): Selenocysteine
  MOD_RES (140)..(140): Selenocysteine
  MOD_RES (198)..(198): Selenocysteine
  MOD_RES (218)..(218): Selenocysteine
  MOD_RES (279)..(279): Selenocysteine
  MOD_RES (292)..(292): Selenocysteine
  MOD_RES (318)..(318): Selenocysteine
  MOD_RES (362)..(362): Selenocysteine
  MOD_RES (382)..(382): Selenocysteine
  MOD_RES (385)..(385): Selenocysteine
  MOD_RES (419)..(419): Selenocysteine
  MOD_RES (447)..(447): Selenocysteine
  MOD_RES (453)..(453): Selenocysteine
  MOD_RES (462)..(462): Selenocysteine
  MOD_RES (471)..(471): Selenocysteine
  MOD_RES (475)..(475): Selenocysteine
  MOD_RES (481)..(481): Selenocysteine
  MOD_RES (502)..(502): Selenocysteine
  MOD_RES (540)..(540): Selenocysteine
  MOD_RES (553)..(553): Selenocysteine
  MOD_RES (561)..(561): Selenocysteine
  MOD_RES (645)..(645): Selenocysteine
  MOD_RES (677)..(677): Selenocysteine
  MOD_RES (691)..(691): Selenocysteine
  MOD_RES (713)..(713): Selenocysteine
  MOD_RES (724)..(724): Selenocysteine
MVLXLLLSAYKLCRFFAMSGPRPGAERLAVPGPDGGGGXGPWWAAGGRGPREVSPGAGXEVQDALERALPELQQALSALKQAGGARAVGAGLAEVFQLVEEAWLLPAVGREVAQGLCDAIRLDGGLDLLLRLLQAPELEXRVQAARLLEQILVAENRDRVARIGLGVILNLAKEREPVELARSVAGILEHMFKHSEEXCQRLVAAGGLDAVLYWCRRXDPALLRHCALALGNCALHGGQAVQRRMVEKRAAEWLFPLAFSKEDELLRLHACLAVAVLAXNKEVEREVERSGXLALVEPLVASLDPGRFARCLVDASDXSQGRGPDDLQRLVPLLDSNRLEAQCIGAFYLCAEAAIKSLQGKXKVFSDIGAIQSLKRLVSYSXNGXKSALAKRALRLLGEEVPRPILPSVPSWKEAEVQXWLQQIGFSKYCESFREQQVDGDLLLRLXEEELQXDLGMKSGIXRKRFFRELXELKXFANYSXCDRSNLADWLGSLDPRFRQYXYGLVSCGLDRSLLHRVSEQQLLEDCGIHLGVHRARILXAAREMLHSPLPCXGGKPSGDXPDVFISYRRNSGSQLASLLKVHLQLHGFSVFIDVEKLEAGKFEDKLIQSVMGARNFVLVLSPGALDKCMQDHDCKDWVHKEIVXALSCGKNIVPIIDGFEWPEPQVLPEDMQAVLXFNGIKWSHEYQEAXIEKIIRFLQGRSSRDSSAGSDXSLEGAAPMGPX

SEQ ID NO: 24621 - protein, 107 aa, Homo sapiens
  MOD_RES (1)..(1): Any amino acid
  MOD_RES (70)..(70): Selenocysteine
  MOD_RES (102)..(102): Selenocysteine
XASLLKVHLQLHGFSVFIDVEKLEAGKFEDKLIQSVMGARNFVLVLSPGALDKCMQDHDCKDWVHKEIVXALSCGKNIVPIIDGFEWPEPQVLPEDMQAVLXFNGIK

SEQ ID NO: 24622 - protein, 118 aa, Homo sapiens
  MOD_RES (1)..(1): Any amino acid
  MOD_RES (18)..(18): Selenocysteine
  MOD_RES (24)..(24): Selenocysteine
  MOD_RES (33)..(33): Selenocysteine
  MOD_RES (42)..(42): Selenocysteine
  MOD_RES (46)..(46): Selenocysteine
  MOD_RES (52)..(52): Selenocysteine
  MOD_RES (73)..(73): Selenocysteine
  MOD_RES (111)..(111): Selenocysteine
  MOD_RES (117)..(117): Selenocysteine
XLLPQEQQVDGDLLLRLXEEELQXDLGMKSGIXRKRFFRELXELKXFANYSXCDRSNLADWLGSLDPRFRQYXYGLVSCGLDRSLLHRVSEQQLLEDCGIHLGVHRARILXAARAIXD

SEQ ID NO: 24623 - protein, 257 aa, Homo sapiens
  MOD_RES (1)..(1): Any amino acid
  MOD_RES (18)..(18): Selenocysteine
  MOD_RES (56)..(56): Selenocysteine
  MOD_RES (75)..(75): Selenocysteine
  MOD_RES (86)..(86): Selenocysteine
  MOD_RES (94)..(94): Selenocysteine
  MOD_RES (178)..(178): Selenocysteine
  MOD_RES (210)..(210): Selenocysteine
  MOD_RES (224)..(224): Selenocysteine
  MOD_RES (246)..(246): Selenocysteine
  MOD_RES (257)..(257): Selenocysteine
XNLADWLGSLDPRFRQYXYGLVSCGLDRSLLHRVSEQQLLEDCGIHLGVHRARILXAARVSDAEGPPSPCCLLPXSEMLHSPLPCXGGKPSGDXPDVFISYRRNSGSQLASLLKVHLQLHGFSVFIDVEKLEAGKFEDKLIQSVMGARNFVLVLSPGALDKCMQDHDCKDWVHKEIVXALSCGKNIVPIIDGFEWPEPQVLPEDMQAVLXFNGIKWSHEYQEAXIEKIIRFLQGRSSRDSSAGSDXSLEGAAPMGPX

SEQ ID NO: 24624 - protein, 164 aa, Homo sapiens
  MOD_RES (16)..(17): Selenocysteine
  MOD_RES (22)..(22): Selenocysteine
  MOD_RES (26)..(26): Selenocysteine
  MOD_RES (78)..(78): Selenocysteine
  MOD_RES (110)..(110): Selenocysteine
  MOD_RES (123)..(123): Selenocysteine
  MOD_RES (150)..(150): Selenocysteine
MGSSKKHRGEKEAAGXXAAAGXGGAXEQPPRHREHKKHKHRSGGSGGSGGERRKRSRERGGERGSGRRGAEAEARSSXHGRERSQAEPSERRVKREKRDDGYEAAASSKXSSGDASSLSIEEXNKLRAKLGLKPLEVNAIKKAMGGHSLXSGPPFQRRAPRRSP

SEQ ID NO: 24625 - protein, 800 aa, Homo sapiens
  MOD_RES (16)..(17): Selenocysteine
  MOD_RES (22)..(22): Selenocysteine
  MOD_RES (26)..(26): Selenocysteine
  MOD_RES (78)..(78): Selenocysteine
  MOD_RES (110)..(110): Selenocysteine
  MOD_RES (123)..(123): Selenocysteine
  MOD_RES (146)..(146): Selenocysteine
  MOD_RES (152)..(152): Selenocysteine
  MOD_RES (189)..(189): Selenocysteine
  MOD_RES (200)..(200): Selenocysteine
  MOD_RES (235)..(235): Selenocysteine
  MOD_RES (258)..(258): Selenocysteine
  MOD_RES (271)..(271): Selenocysteine
  MOD_RES (275)..(275): Selenocysteine
  MOD_RES (356)..(356): Selenocysteine
  MOD_RES (381)..(381): Selenocysteine
  MOD_RES (392)..(392): Selenocysteine
  MOD_RES (398)..(398): Selenocysteine
  MOD_RES (402)..(402): Selenocysteine
  MOD_RES (430)..(430): Selenocysteine
  MOD_RES (466)..(466): Selenocysteine
  MOD_RES (556)..(556): Selenocysteine
  MOD_RES (562)..(562): Selenocysteine
  MOD_RES (568)..(568): Selenocysteine
  MOD_RES (608)..(608): Selenocysteine
  MOD_RES (625)..(626): Selenocysteine
  MOD_RES (653)..(654): Selenocysteine
  MOD_RES (695)..(695): Selenocysteine
  MOD_RES (716)..(716): Selenocysteine
  MOD_RES (721)..(721): Selenocysteine
  MOD_RES (743)..(743): Selenocysteine
  MOD_RES (764)..(764): Selenocysteine
  MOD_RES (768)..(768): Selenocysteine
  MOD_RES (781)..(781): Selenocysteine
  MOD_RES (797)..(797): Selenocysteine
  MOD_RES (799)..(799): Selenocysteine
MGSSKKHRGEKEAAGXXAAAGXGGAXEQPPRHREHKKHKHRSGGSGGSGGERRKRSRERGGERGSGRRGAEAEARSSXHGRERSQAEPSERRVKREKRDDGYEAAASSKXSSGDASSLSIEEXNKLRAKLGLKPLEVNAIKKEAGXKEEPVXADVINPMALRQREELREKLAAAKEKRLLNQKLGKIKXLGEDDPWLDDXAAWIERSRQLQKEKDLAEKRAKLLEEMDQEFGVSXLVEEEFGQRRQDLYSARDLQGLXVEHAIDSFREGEXMILXLKDKGVLQEEEDVLVNVNLVDKERAEKNVELRKKKPDYLPYAEDESVDDLAQQKPRSILSKYDEELEGERPHSFRLEQGGXADGLRERELEEIRAKLRLQAQSLSXVGPRLASEYLXPEEMVXFKKXKRRVKKIRKKEKEVVVRADDLLPLGDQXQDGDFGSRLRGRGRRRVSEVEEEKEPVPQPLPSDDXRVENMDISDEEEGGAPPPGSPQVLEEDEAELELQKQLEKGRRLRQLQQLQQLRDSGEKVVEIVKKLESRQRGWEEDEDPERKGAIVFNAXSEFCRXLGEIPXYGLAGNREEQEELMDFERDEERSANGGSESDGEENIGWSXVNLDEEKQQQDFSASSXXILDEEPIVNRGLAAALLLCQNKGLLEXXVQKVARVKAPNKSLPSAVYCIEDKMAIDDKYSRREEYRGFXQDFKEKDGYKPDVKIEYVDEXGRKLXPKEAFRQLSHRFHGKGSGKMKXERRMKKLDEEALLKKMSSSDXPLGXVALLQEKQKAQKXPYIVLSGSGKSMNANXIXK

SEQ ID NO: 24626 - protein, 1247 aa, Homo sapiens
  MOD_RES (37)..(37): Selenocysteine
  MOD_RES (46)..(46): Selenocysteine
  MOD_RES (72)..(72): Selenocysteine
  MOD_RES (103)..(103): Selenocysteine
  MOD_RES (123)..(123): Selenocysteine
  MOD_RES (169)..(169): Selenocysteine
  MOD_RES (183)..(183): Selenocysteine
  MOD_RES (202)..(202): Selenocysteine
  MOD_RES (235)..(235): Selenocysteine
  MOD_RES (252)..(252): Selenocysteine
  MOD_RES (268)..(268): Selenocysteine
  MOD_RES (286)..(286): Selenocysteine
  MOD_RES (333)..(334): Selenocysteine
  MOD_RES (343)..(343): Selenocysteine
  MOD_RES (353)..(353): Selenocysteine
  MOD_RES (371)..(371): Selenocysteine
  MOD_RES (389)..(389): Selenocysteine
  MOD_RES (405)..(405): Selenocysteine
  MOD_RES (414)..(414): Selenocysteine
  MOD_RES (444)..(444): Selenocysteine
  MOD_RES (460)..(460): Selenocysteine
  MOD_RES (525)..(525): Selenocysteine
  MOD_RES (528)..(529): Selenocysteine
  MOD_RES (533)..(533): Selenocysteine
  MOD_RES (563)..(563): Selenocysteine
  MOD_RES (566)..(566): Selenocysteine
  MOD_RES (572)..(572): Selenocysteine
  MOD_RES (593)..(593): Selenocysteine
  MOD_RES (604)..(604): Selenocysteine
  MOD_RES (624)..(624): Selenocysteine
  MOD_RES (653)..(653): Selenocysteine
  MOD_RES (664)..(664): Selenocysteine
  MOD_RES (689)..(689): Selenocysteine
  MOD_RES (739)..(739): Selenocysteine
  MOD_RES (751)..(751): Selenocysteine
  MOD_RES (768)..(768): Selenocysteine
  MOD_RES (795)..(795): Selenocysteine
  MOD_RES (805)..(805): Selenocysteine
  MOD_RES (824)..(824): Selenocysteine
  MOD_RES (830)..(830): Selenocysteine
  MOD_RES (833)..(833): Selenocysteine
  MOD_RES (855)..(855): Selenocysteine
  MOD_RES (858)..(858): Selenocysteine
  MOD_RES (872)..(873): Selenocysteine
  MOD_RES (877)..(877): Selenocysteine
  MOD_RES (895)..(895): Selenocysteine
  MOD_RES (907)..(908): Selenocysteine
  MOD_RES (946)..(946): Selenocysteine
  MOD_RES (960)..(960): Selenocysteine
  MOD_RES (966)..(966): Selenocysteine
  MOD_RES (1030)..(1030): Selenocysteine
  MOD_RES (1055)..(1055): Selenocysteine
  MOD_RES (1068)..(1068): Selenocysteine
  MOD_RES (1082)..(1082): Selenocysteine
  MOD_RES (1095)..(1095): Selenocysteine
  MOD_RES (1097)..(1097): Selenocysteine
  MOD_RES (1109)..(1109): Selenocysteine
  MOD_RES (1167)..(1167): Selenocysteine
  MOD_RES (1197)..(1197): Selenocysteine
  MOD_RES (1200)..(1200): Selenocysteine
  MOD_RES (1205)..(1205): Selenocysteine
  MOD_RES (1215)..(1215): Selenocysteine
  MOD_RES (1223)..(1223): Selenocysteine
MEDAGAAGPGPEPEPEPEPEPEPAPEPEPEPKPGAGXSEAFSRLWXDVMGILDGSLGNIDDLAQQYADYYNXCFSDVCERMEELRKRRVSQDLEVEKPDASPXSLQLRSQIEESLGFCSAVSXPEVERKNPLHKSNSEDSSVGKGDWKKKNKYFWQNFRKNQKGIMRQXSKGEDVGYVASEIXMSDEERIQLMMMVKEKMIXIEEALARLKEYEAQHRQSAALDPADWPDGSYPXFDGSSNCNSREQSDDEXEESVKFKRLHKLVNSXRRVRKKLIRVEEMKKPSXEGGEEHVFENSPVLDERSALYSGVHKKPLFFDGSPEKPPEDDSDSLXXSPSSSSLDXWGAGRKLVKXFSKGESRGLIKPPKKMGXFFSYPEEEKAQKVSRSLXEGEMKKGLGSLSHGRXCSFGGFDLXNRSLHVGSNNSDPMGKEGDFVYKEVIKSPXASRISLGKKVKSVKEXMRKRMSKKYSSSVSEQDSGLDGMPGSPPPSQPDPEHLDKPKLKAGGSVESLRSSLSGQSSMSGQXVSXXDSSXSNRESVKSEDGDDEEPPYRGPFCGRARVHXDFXPSPYDXDSLKLKKGDIIDIISKPPMGXWMGLLNNKVGXFKFIYVDVLSEDEEKPKRPXRRRRKGRPPQPKSVEDLLDRINLKEHMPXFLFNGYEDLDXFKLLEEEDLDELNIRDPEHRAVLLXAVELLQEYDSNSDQSGSQEKLLVDSQGLSGCSPRDSGCYESSENLENGKXRKASLLSAKSSXEPSLKSFSRNQLGNYPXLPLMKSGDALKQGQEEGRLGGGLAPDXSKSCDPPGVXGLNKNRRSLPVSICRSCEXLEGPQXVDXWPRSHSLDDLQVEPGAEQDVPXEVXEPPPQIVPEVPQKXXASSXKAQPLEQDSAVDNALLLXQSKRFSEPQKLXXKKLEGSIAASGRGLSPPQCLPRNYDAQPPGAKHGLARXPLEGHRKGHEFEGXHHPLGXKEGVDAEQRMQPKIPSQPPPVPAKKSRERLANGLHPVPMGPSGALPSPDAPCLPVKRGSPASPXSPSDCPPALAPRPLSGQAPGSPPSXRPPPWLSELPENXSLQEHGVKLGPALXRKVSCARGVDLEXLXENKLHAEGIDLXEEPYSDKHGRCGIPEALVQRYAEDLDQPERDVAANMDQIRVKQLRKQHRMAIPSGGLXEICRKPVSPGCISSVSDWLISIGLPMYAGXLSXAGFSXLSQVPSLSHXCLQEAGIXEERHIRKLLSAARLFKLPPGPEAM

SEQ ID NO: 24627 - protein, 657 aa, Homo sapiens
  MOD_RES (3)..(3): Selenocysteine
  MOD_RES (14)..(14): Selenocysteine
  MOD_RES (34)..(34): Selenocysteine
  MOD_RES (63)..(63): Selenocysteine
  MOD_RES (74)..(74): Selenocysteine
  MOD_RES (99)..(99): Selenocysteine
  MOD_RES (149)..(149): Selenocysteine
  MOD_RES (161)..(161): Selenocysteine
  MOD_RES (178)..(178): Selenocysteine
  MOD_RES (205)..(205): Selenocysteine
  MOD_RES (215)..(215): Selenocysteine
  MOD_RES (234)..(234): Selenocysteine
  MOD_RES (240)..(240): Selenocysteine
  MOD_RES (243)..(243): Selenocysteine
  MOD_RES (265)..(265): Selenocysteine
  MOD_RES (268)..(268): Selenocysteine
  MOD_RES (282)..(283): Selenocysteine
  MOD_RES (287)..(287): Selenocysteine
  MOD_RES (305)..(305): Selenocysteine
  MOD_RES (317)..(318): Selenocysteine
  MOD_RES (356)..(356): Selenocysteine
  MOD_RES (370)..(370): Selenocysteine
  MOD_RES (376)..(376): Selenocysteine
  MOD_RES (440)..(440): Selenocysteine
  MOD_RES (465)..(465): Selenocysteine
  MOD_RES (478)..(478): Selenocysteine
  MOD_RES (492)..(492): Selenocysteine
  MOD_RES (505)..(505): Selenocysteine
  MOD_RES (507)..(507): Selenocysteine
  MOD_RES (519)..(519): Selenocysteine
  MOD_RES (577)..(577): Selenocysteine
  MOD_RES (607)..(607): Selenocysteine
  MOD_RES (610)..(610): Selenocysteine
  MOD_RES (615)..(615): Selenocysteine
  MOD_RES (625)..(625): Selenocysteine
  MOD_RES (633)..(633): Selenocysteine
MGXWMGLLNNKVGXFKFIYVDVLSEDEEKPKRPXRRRRKGRPPQPKSVEDLLDRINLKEHMPXFLFNGYEDLDXFKLLEEEDLDELNIRDPEHRAVLLXAVELLQEYDSNSDQSGSQEKLLVDSQGLSGCSPRDSGCYESSENLENGKXRKASLLSAKSSXEPSLKSFSRNQLGNYPXLPLMKSGDALKQGQEEGRLGGGLAPDXSKSCDPPGVXGLNKNRRSLPVSICRSCEXLEGPQXVDXWPRSHSLDDLQVEPGAEQDVPXEVXEPPPQIVPEVPQKXXASSXKAQPLEQDSAVDNALLLXQSKRFSEPQKLXXKKLEGSIAASGRGLSPPQCLPRNYDAQPPGAKHGLARXPLEGHRKGHEFEGXHHPLGXKEGVDAEQRMQPKIPSQPPPVPAKKSRERLANGLHPVPMGPSGALPSPDAPCLPVKRGSPASPXSPSDCPPALAPRPLSGQAPGSPPSXRPPPWLSELPENXSLQEHGVKLGPALXRKVSCARGVDLEXLXENKLHAEGIDLXEEPYSDKHGRCGIPEALVQRYAEDLDQPERDVAANMDQIRVKQLRKQHRMAIPSGGLXEICRKPVSPGCISSVSDWLISIGLPMYAGXLSXAGFSXLSQVPSLSHXCLQEAGIXEERHIRKLLSAARLFKLPPGPEAM

SEQ ID NO: 24628 - protein, 161 aa, Homo sapiens
  MOD_RES (13)..(13): Selenocysteine
  MOD_RES (29)..(29): Selenocysteine
  MOD_RES (47)..(47): Selenocysteine
  MOD_RES (94)..(95): Selenocysteine
  MOD_RES (104)..(104): Selenocysteine
  MOD_RES (114)..(114): Selenocysteine
  MOD_RES (132)..(132): Selenocysteine
  MOD_RES (150)..(150): Selenocysteine
MPKPSREQSDDEXEESVKFKRLHKLVNSXRRVRKKLIRVEEMKKPSXEGGEEHVFENSPVLDERSALYSGVHKKPLFFDGSPEKPPEDDSDSLXXSPSSSSLDXWGAGRKLVKXFSKGESRGLIKPPKKMGXFFSYPEEEKAQKVSRSLXEGEMKKGLGSL

SEQ ID NO: 24629 - protein, 359 aa, Homo sapiens
  MOD_RES (9)..(9): Selenocysteine
  MOD_RES (25)..(25): Selenocysteine
  MOD_RES (43)..(43): Selenocysteine
  MOD_RES (90)..(91): Selenocysteine
  MOD_RES (100)..(100): Selenocysteine
  MOD_RES (110)..(110): Selenocysteine
  MOD_RES (128)..(128): Selenocysteine
  MOD_RES (146)..(146): Selenocysteine
  MOD_RES (163)..(163): Selenocysteine
  MOD_RES (197)..(197): Selenocysteine
  MOD_RES (199)..(199): Selenocysteine
  MOD_RES (218)..(218): Selenocysteine
  MOD_RES (220)..(221): Selenocysteine
  MOD_RES (248)..(248): Selenocysteine
  MOD_RES (256)..(256): Selenocysteine
  MOD_RES (270)..(270): Selenocysteine
  MOD_RES (280)..(280): Selenocysteine
  MOD_RES (307)..(307): Selenocysteine
  MOD_RES (312)..(312): Selenocysteine
  MOD_RES (325)..(325): Selenocysteine
  MOD_RES (334)..(334): Selenocysteine
SREQSDDEXEESVKFKRLHKLVNSXRRVRKKLIRVEEMKKPSXEGGEEHVFENSPVLDERSALYSGVHKKPLFFDGSPEKPPEDDSDSLXXSPSSSSLDXWGAGRKLVKXFSKGESRGLIKPPKKMGXFFSYPEEEKAQKVSRSLXEGEMKKGLGSLSHGVSXDGVCFYDNHRRRHHLLVSLEEFQSVRKQIRLKKXDXNYSCSRAFLCQRPSRKGVXSXXCDLQLLRQKGKGGGSCGFPGRRVRGRXSVSEFNIXYVVERSLYSHLNLXQLVRPASDRXLSKAERQDLRRCLLEEDEEAKRKWAAXVDRCXKRVLLRIHQKSRXCSFGGFDLXNRSLHVGSNNSDPMGKEGDFVYKEV

SEQ ID NO: 24630 - protein, 41 aa, Homo sapiens
  MOD_RES (1)..(1): Any amino acid
  MOD_RES (5)..(5): Selenocysteine
XAVSXPEVERKNPLHKSNSEDSSVAQGIRGPAPAVGCPGPC

SEQ ID NO: 24631 - protein, 8 aa, Homo sapiens
  MOD_RES (8)..(8): Selenocysteine
MDHLNEAX

SEQ ID NO: 24632 - protein, 82 aa, Homo sapiens
  MOD_RES (8)..(8): Selenocysteine
  MOD_RES (48)..(48): Selenocysteine
  MOD_RES (66)..(66): Selenocysteine
MDHLNEAXQGKEHSEMSNNVSDPKGPPAKIARLEQNGSPLGRGRLGSXGAKMQGVPLKHSGHLMKXNLRKDIEIVYYEHQFG

SEQ ID NO: 24633 - protein, 71 aa, Homo sapiens
  MOD_RES (8)..(8): Selenocysteine
  MOD_RES (48)..(48): Selenocysteine
  MOD_RES (66)..(66): Selenocysteine
MDHLNEAXQGKEHSEMSNNVSDPKGPPAKIARLEQNGSPLGRGRLGSXGAKMQGVPLKHSGHLMKXNLRKG

SEQ ID NO: 24634 - protein, 116 aa, Homo sapiens
  MOD_RES (8)..(8): Selenocysteine
  MOD_RES (48)..(48): Selenocysteine
  MOD_RES (66)..(66): Selenocysteine
  MOD_RES (72)..(72): Selenocysteine
MDHLNEAXQGKEHSEMSNNVSDPKGPPAKIARLEQNGSPLGRGRLGSXGAKMQGVPLKHSGHLMKXNLRKGXMLPVFCVVEHYENAIEYDCKEEHAEFVLVRKDMLFNQLIEMALL

SEQ ID NO: 24635 - protein, 130 aa, Homo sapiens
  MOD_RES (8)..(8): Selenocysteine
  MOD_RES (48)..(48): Selenocysteine
  MOD_RES (66)..(66): Selenocysteine
  MOD_RES (72)..(72): Selenocysteine
MDHLNEAXQGKEHSEMSNNVSDPKGPPAKIARLEQNGSPLGRGRLGSXGAKMQGVPLKHSGHLMKXNLRKGXMLPVFCVVEHYENAIEYDCKEEHAEFVLVRKDMLFNQLIEMALLSLGYSHSSAAQAKG

SEQ ID NO: 24636 - protein, 166 aa, Homo sapiens
  MOD_RES (8)..(8): Selenocysteine
  MOD_RES (48)..(48): Selenocysteine
  MOD_RES (66)..(66): Selenocysteine
  MOD_RES (72)..(72): Selenocysteine
  MOD_RES (146)..(146): Selenocysteine
  MOD_RES (152)..(152): Selenocysteine
  MOD_RES (165)..(165): Selenocysteine
MDHLNEAXQGKEHSEMSNNVSDPKGPPAKIARLEQNGSPLGRGRLGSXGAKMQGVPLKHSGHLMKXNLRKGXMLPVFCVVEHYENAIEYDCKEEHAEFVLVRKDMLFNQLIEMALLSLGYSHSSAAQAKGLIQVGKWNPVPLSYVXDAPDAXVADMLQDVYHVVXL

SEQ ID NO: 24637 - protein, 172 aa, Homo sapiens
  MOD_RES (8)..(8): Selenocysteine
  MOD_RES (48)..(48): Selenocysteine
  MOD_RES (66)..(66): Selenocysteine
  MOD_RES (72)..(72): Selenocysteine
  MOD_RES (146)..(146): Selenocysteine
  MOD_RES (152)..(152): Selenocysteine
  MOD_RES (165)..(165): Selenocysteine
MDHLNEAXQGKEHSEMSNNVSDPKGPPAKIARLEQNGSPLGRGRLGSXGAKMQGVPLKHSGHLMKXNLRKGXMLPVFCVVEHYENAIEYDCKEEHAEFVLVRKDMLFNQLIEMALLSLGYSHSSAAQAKGLIQVGKWNPVPLSYVXDAPDAXVADMLQDVYHVVXLKIQLHR

SEQ ID NO: 24638 - protein, 224 aa, Homo sapiens
  MOD_RES (8)..(8): Selenocysteine
  MOD_RES (48)..(48): Selenocysteine
  MOD_RES (66)..(66): Selenocysteine
  MOD_RES (72)..(72): Selenocysteine
  MOD_RES (146)..(146): Selenocysteine
  MOD_RES (152)..(152): Selenocysteine
  MOD_RES (165)..(165): Selenocysteine
  MOD_RES (187)..(188): Selenocysteine
  MOD_RES (223)..(223): Selenocysteine
MDHLNEAXQGKEHSEMSNNVSDPKGPPAKIARLEQNGSPLGRGRLGSXGAKMQGVPLKHSGHLMKXNLRKGXMLPVFCVVEHYENAIEYDCKEEHAEFVLVRKDMLFNQLIEMALLSLGYSHSSAAQAKGLIQVGKWNPVPLSYVXDAPDAXVADMLQDVYHVVXLKIQLHSCPKLEDLPPEQWSHXXVRNALKDLLKDMNQSSLAKECPLSQSMISSIVNSXY

SEQ ID NO: 24639 - protein, 763 aa, Homo sapiens
  MOD_RES (8)..(8): Selenocysteine
  MOD_RES (48)..(48): Selenocysteine
  MOD_RES (66)..(66): Selenocysteine
  MOD_RES (72)..(72): Selenocysteine
  MOD_RES (146)..(146): Selenocysteine
  MOD_RES (152)..(152): Selenocysteine
  MOD_RES (165)..(165): Selenocysteine
  MOD_RES (187)..(188): Selenocysteine
  MOD_RES (223)..(223): Selenocysteine
  MOD_RES (246)..(246): Selenocysteine
  MOD_RES (278)..(278): Selenocysteine
  MOD_RES (298)..(298): Selenocysteine
  MOD_RES (310)..(310): Selenocysteine
  MOD_RES (367)..(367): Selenocysteine
  MOD_RES (369)..(369): Selenocysteine
  MOD_RES (401)..(401): Selenocysteine
  MOD_RES (417)..(417): Selenocysteine
  MOD_RES (466)..(466): Selenocysteine
  MOD_RES (476)..(476): Selenocysteine
  MOD_RES (478)..(478): Selenocysteine
  MOD_RES (481)..(481): Selenocysteine
  MOD_RES (491)..(491): Selenocysteine
  MOD_RES (522)..(522): Selenocysteine
  MOD_RES (544)..(544): Selenocysteine
  MOD_RES (620)..(620): Selenocysteine
  MOD_RES (630)..(630): Selenocysteine
  MOD_RES (645)..(645): Selenocysteine
  MOD_RES (649)..(649): Selenocysteine
  MOD_RES (677)..(677): Selenocysteine
  MOD_RES (688)..(688): Selenocysteine
  MOD_RES (737)..(737): Selenocysteine
  MOD_RES (739)..(739): Selenocysteine
  MOD_RES (755)..(755): Selenocysteine
  MOD_RES (759)..(759): Selenocysteine
MDHLNEAXQGKEHSEMSNNVSDPKGPPAKIARLEQNGSPLGRGRLGSXGAKMQGVPLKHSGHLMKXNLRKGXMLPVFCVVEHYENAIEYDCKEEHAEFVLVRKDMLFNQLIEMALLSLGYSHSSAAQAKGLIQVGKWNPVPLSYVXDAPDAXVADMLQDVYHVVXLKIQLHSCPKLEDLPPEQWSHXXVRNALKDLLKDMNQSSLAKECPLSQSMISSIVNSXYYANVSAAKCQEFGRWYKHFKKXKDMMVEMDSLSELSQQGANHVNFGQQPVPGNXAEQPPSPAQLSHGSQPSVRXPLPNLHPGLVSXPISPQLVNQQLVMAQLLNQQYAVNRLLAQQSLNQQYLNHPPPVSRSMNKPLEQQVSXNXEVSSEIYQWVRDELKRAGISQAVFARVAFNRXQGLLSEILRKEEDPKXASQSLLVNLRAMQNFLQLPEAERDRIYQDERERSLNAASAMGPAPLISXPPSRPPQVKXAXIAXERNGKPENNXMNINASIYDEIQQEMKRAKVSQALFAKVAAXKSQGWLCELLRWKEDPSPENRXLWENLSMIRRFLSLPQPERDAIYEQESNAVHHHGDRPPHIIHVPAEQIQQQQQQQQQQQQQQQAPPPPQPQQQPQXGPRLPPRQPXVASPAESDEENRQKXRPRXKISVEALGILQSFIQDVGLYPDEEAIQXLSAQLDLPKYXIIKFFQNQRYYLKHHGKLKDNSGLEVDVAEYKEEELLKDLEESVQDKNXNXLFSVKLEEELSVEGNXDINXDLKD

SEQ ID NO: 24640 - protein, 795 aa, Homo sapiens
  MOD_RES (8)..(8): Selenocysteine
  MOD_RES (48)..(48): Selenocysteine
  MOD_RES (66)..(66): Selenocysteine
  MOD_RES (72)..(72): Selenocysteine
  MOD_RES (146)..(146): Selenocysteine
  MOD_RES (152)..(152): Selenocysteine
  MOD_RES (165)..(165): Selenocysteine
  MOD_RES (187)..(188): Selenocysteine
  MOD_RES (223)..(223): Selenocysteine
  MOD_RES (246)..(246): Selenocysteine
  MOD_RES (278)..(278): Selenocysteine
  MOD_RES (298)..(298): Selenocysteine
  MOD_RES (310)..(310): Selenocysteine
  MOD_RES (367)..(367): Selenocysteine
  MOD_RES (369)..(369): Selenocysteine
  MOD_RES (401)..(401): Selenocysteine
  MOD_RES (417)..(417): Selenocysteine
  MOD_RES (466)..(466): Selenocysteine
  MOD_RES (476)..(476): Selenocysteine
  MOD_RES (478)..(478): Selenocysteine
  MOD_RES (481)..(481): Selenocysteine
  MOD_RES (491)..(491): Selenocysteine
  MOD_RES (522)..(522): Selenocysteine
  MOD_RES (544)..(544): Selenocysteine
  MOD_RES (598)..(599): Selenocysteine
  MOD_RES (615)..(615): Selenocysteine
  MOD_RES (652)..(652): Selenocysteine
  MOD_RES (662)..(662): Selenocysteine
  MOD_RES (677)..(677): Selenocysteine
  MOD_RES (681)..(681): Selenocysteine
  MOD_RES (709)..(709): Selenocysteine
  MOD_RES (720)..(720): Selenocysteine
  MOD_RES (769)..(769): Selenocysteine
  MOD_RES (771)..(771): Selenocysteine
  MOD_RES (787)..(787): Selenocysteine
  MOD_RES (791)..(791): Selenocysteine
MDHLNEAXQGKEHSEMSNNVSDPKGPPAKIARLEQNGSPLGRGRLGSXGAKMQGVPLKHSGHLMKXNLRKGXMLPVFCVVEHYENAIEYDCKEEHAEFVLVRKDMLFNQLIEMALLSLGYSHSSAAQAKGLIQVGKWNPVPLSYVXDAPDAXVADMLQDVYHVVXLKIQLHSCPKLEDLPPEQWSHXXVRNALKDLLKDMNQSSLAKECPLSQSMISSIVNSXYYANVSAAKCQEFGRWYKHFKKXKDMMVEMDSLSELSQQGANHVNFGQQPVPGNXAEQPPSPAQLSHGSQPSVRXPLPNLHPGLVSXPISPQLVNQQLVMAQLLNQQYAVNRLLAQQSLNQQYLNHPPPVSRSMNKPLEQQVSXNXEVSSEIYQWVRDELKRAGISQAVFARVAFNRXQGLLSEILRKEEDPKXASQSLLVNLRAMQNFLQLPEAERDRIYQDERERSLNAASAMGPAPLISXPPSRPPQVKXAXIAXERNGKPENNXMNINASIYDEIQQEMKRAKVSQALFAKVAAXKSQGWLCELLRWKEDPSPENRXLWENLSMIRRFLSLPQPERDAIYEQESNAVHHHGDRPPHIIHVPAEQIQSPSPXXLGKGESRGVFLPGLPXPAPWLGAAPQQQQQQQQQQQQQQQAPPPPQPQQQPQXGPRLPPRQPXVASPAESDEENRQKXRPRXKISVEALGILQSFIQDVGLYPDEEAIQXLSAQLDLPKYXIIKFFQNQRYYLKHHGKLKDNSGLEVDVAEYKEEELLKDLEESVQDKNXNXLFSVKLEEELSVEGNXDINXDLKD

SEQ ID NO: 24641 - protein, 138 aa, Homo sapiens
  MOD_RES (42)..(42): Selenocysteine
  MOD_RES (48)..(48): Selenocysteine
  MOD_RES (61)..(61): Selenocysteine
  MOD_RES (83)..(84): Selenocysteine
MLFNQLIEMALLSLGYSHSSAAQAKGLIQVGKWNPVPLSYVXDAPDAXVADMLQDVYHVVXLKIQLHSCPKLEDLPPEQWSHXXVRNALKDLLKDMNQSSLAKECPLSQHPEISNMLDNLFINGKINFKKKLPRAPEA

SEQ ID NO: 24642 - protein, 166 aa, Homo sapiens
  MOD_RES (74)..(74): Selenocysteine
  MOD_RES (80)..(80): Selenocysteine
  MOD_RES (93)..(93): Selenocysteine
  MOD_RES (115)..(116): Selenocysteine
  MOD_RES (151)..(151): Selenocysteine
MLPVFCVVEHYENAIEYDCKEEHAEFVLVRKDMLFNQLIEMALLSLGYSHSSAAQAKGLIQVGKWNPVPLSYVXDAPDAXVADMLQDVYHVVXLKIQLHSCPKLEDLPPEQWSHXXVRNALKDLLKDMNQSSLAKECPLSQSMISSIVNSXYYANVSAAKCQEFGR

SEQ ID NO: 24643 - protein, 674 aa, Homo sapiens
  MOD_RES (73)..(73): Selenocysteine
  MOD_RES (79)..(79): Selenocysteine
  MOD_RES (92)..(92): Selenocysteine
  MOD_RES (115)..(115): Selenocysteine
  MOD_RES (131)..(131): Selenocysteine
  MOD_RES (150)..(150): Selenocysteine
  MOD_RES (158)..(158): Selenocysteine
  MOD_RES (208)..(208): Selenocysteine
  MOD_RES (221)..(221): Selenocysteine
  MOD_RES (295)..(295): Selenocysteine
  MOD_RES (331)..(331): Selenocysteine
  MOD_RES (347)..(347): Selenocysteine
  MOD_RES (401)..(401): Selenocysteine
  MOD_RES (406)..(406): Selenocysteine
  MOD_RES (408)..(408): Selenocysteine
  MOD_RES (410)..(411): Selenocysteine
  MOD_RES (425)..(425): Selenocysteine
  MOD_RES (474)..(474): Selenocysteine
  MOD_RES (481)..(481): Selenocysteine
  MOD_RES (548)..(548): Selenocysteine
  MOD_RES (560)..(560): Selenocysteine
  MOD_RES (588)..(588): Selenocysteine
  MOD_RES (599)..(599): Selenocysteine
  MOD_RES (637)..(637): Selenocysteine
MERRSESPCLRDSPDRRSGSPDVKGPPPVKVARLEQNGSPMGARGRPNGAVAKAVGGIIKLGRWNPLPLSYVXDAPDAXVADMLQDVYHVVXLKIQLQSCSKLEDLPAEQWNHAXVRNALKELLKEMNQSXLAKECPLSQSMISSIVNSXYYANVSAXKCQEFGRWYKKYKKIKVERVERENLSDYCVLGQRPMHLPNMNQLASLGKXNEQSPHSQIHHSXPIRNQVPALQPIMSPGLLSPQLSPQLVRQQIAMAHLINQQIAVSRLLAHQHPQAINQQFLNHPPIPRAVKPEPXNSSVEVSPDIYQQVRDELKRASVSQAVFARVAFNRXQGLLSEILRKEEDPRXASQSLLVNLRAMQNFLNLPEVERDRIYQDERERSMNPNVSMVSSASSSPSSSRXPQAKXSXPXXDLPIKVDGANINIXAAIYDEIQQEMKRAKVSQALFAKVAANKSQGWLCELLRWKENPSPENRXLWENLCXIRRFLNLPQHERDVIYEEESRHHHSERMQHVVQLPPEPVQVLHRQQSQPAKESSPPREEAPPPPPPXEDSCAKKPRSRXKISLEALGILQSFIHDVGLYPDQEAIHXLSAQLDLPKHXIIKFFQNQRYHVKHHGKLKEHLGSAVDVAEYKDEELLXESEENDSEEGSEEMYKVEAEEENADKSKAAPAEIDQR

SEQ ID NO: 24644 - protein, 733 aa, Homo sapiens
  MOD_RES (99)..(99): Selenocysteine
  MOD_RES (132)..(132): Selenocysteine
  MOD_RES (138)..(138): Selenocysteine
  MOD_RES (151)..(151): Selenocysteine
  MOD_RES (174)..(174): Selenocysteine
  MOD_RES (190)..(190): Selenocysteine
  MOD_RES (209)..(209): Selenocysteine
  MOD_RES (217)..(217): Selenocysteine
  MOD_RES (267)..(267): Selenocysteine
  MOD_RES (280)..(280): Selenocysteine
  MOD_RES (354)..(354): Selenocysteine
  MOD_RES (390)..(390): Selenocysteine
  MOD_RES (406)..(406): Selenocysteine
  MOD_RES (460)..(460): Selenocysteine
  MOD_RES (465)..(465): Selenocysteine
  MOD_RES (467)..(467): Selenocysteine
  MOD_RES (469)..(470): Selenocysteine
  MOD_RES (484)..(484): Selenocysteine
  MOD_RES (533)..(533): Selenocysteine
  MOD_RES (540)..(540): Selenocysteine
  MOD_RES (607)..(607): Selenocysteine
  MOD_RES (619)..(619): Selenocysteine
  MOD_RES (647)..(647): Selenocysteine
  MOD_RES (658)..(658): Selenocysteine
  MOD_RES (696)..(696): Selenocysteine
MERRSESPCLRDSPDRRSGSPDVKGPPPVKVARLEQNGSPMGARGRPNGAVAKAVGGLMIPVFCVVEQLDGSLEYDNREEHAEFVLVRKDVLFSQLVEXALLALGYSHSSAAQAQGIIKLGRWNPLPLSYVXDAPDAXVADMLQDVYHVVXLKIQLQSCSKLEDLPAEQWNHAXVRNALKELLKEMNQSXLAKECPLSQSMISSIVNSXYYANVSAXKCQEFGRWYKKYKKIKVERVERENLSDYCVLGQRPMHLPNMNQLASLGKXNEQSPHSQIHHSXPIRNQVPALQPIMSPGLLSPQLSPQLVRQQIAMAHLINQQIAVSRLLAHQHPQAINQQFLNHPPIPRAVKPEPXNSSVEVSPDIYQQVRDELKRASVSQAVFARVAFNRXQGLLSEILRKEEDPRXASQSLLVNLRAMQNFLNLPEVERDRIYQDERERSMNPNVSMVSSASSSPSSSRXPQAKXSXPXXDLPIKVDGANINIXAAIYDEIQQEMKRAKVSQALFAKVAANKSQGWLCELLRWKENPSPENRXLWENLCXIRRFLNLPQHERDVIYEEESRHHHSERMQHVVQLPPEPVQVLHRQQSQPAKESSPPREEAPPPPPPXEDSCAKKPRSRXKISLEALGILQSFIHDVGLYPDQEAIHXLSAQLDLPKHXIIKFFQNQRYHVKHHGKLKEHLGSAVDVAEYKDEELLXESEENDSEEGSEEMYKVEAEEENADKSKAAPAEIDQR

SEQ ID NO: 24645 - protein, 126 aa, Homo sapiens
  MOD_RES (99)..(99): Selenocysteine
MERRSESPCLRDSPDRRSGSPDVKGPPPVKVARLEQNGSPMGARGRPNGAVAKAVGGLMIPVFCVVEQLDGSLEYDNREEHAEFVLVRKDVLFSQLVEXALLALGYSHSSAAQAQGWRAANPASWI

SEQ ID NO: 24646 - protein, 615 aa, Homo sapiens
  MOD_RES (99)..(99): Selenocysteine
  MOD_RES (149)..(149): Selenocysteine
  MOD_RES (162)..(162): Selenocysteine
  MOD_RES (236)..(236): Selenocysteine
  MOD_RES (272)..(272): Selenocysteine
  MOD_RES (288)..(288): Selenocysteine
  MOD_RES (342)..(342): Selenocysteine
  MOD_RES (347)..(347): Selenocysteine
  MOD_RES (349)..(349): Selenocysteine
  MOD_RES (351)..(352): Selenocysteine
  MOD_RES (366)..(366): Selenocysteine
  MOD_RES (415)..(415): Selenocysteine
  MOD_RES (422)..(422): Selenocysteine
  MOD_RES (489)..(489): Selenocysteine
  MOD_RES (501)..(501): Selenocysteine
  MOD_RES (529)..(529): Selenocysteine
  MOD_RES (540)..(540): Selenocysteine
  MOD_RES (578)..(578): Selenocysteine
MERRSESPCLRDSPDRRSGSPDVKGPPPVKVARLEQNGSPMGARGRPNGAVAKAVGGLMIPVFCVVEQLDGSLEYDNREEHAEFVLVRKDVLFSQLVEXALLALGYSHSSAAQAQVERVERENLSDYCVLGQRPMHLPNMNQLASLGKXNEQSPHSQIHHSXPIRNQVPALQPIMSPGLLSPQLSPQLVRQQIAMAHLINQQIAVSRLLAHQHPQAINQQFLNHPPIPRAVKPEPXNSSVEVSPDIYQQVRDELKRASVSQAVFARVAFNRXQGLLSEILRKEEDPRXASQSLLVNLRAMQNFLNLPEVERDRIYQDERERSMNPNVSMVSSASSSPSSSRXPQAKXSXPXXDLPIKVDGANINIXAAIYDEIQQEMKRAKVSQALFAKVAANKSQGWLCELLRWKENPSPENRXLWENLCXIRRFLNLPQHERDVIYEEESRHHHSERMQHVVQLPPEPVQVLHRQQSQPAKESSPPREEAPPPPPPXEDSCAKKPRSRXKISLEALGILQSFIHDVGLYPDQEAIHXLSAQLDLPKHXIIKFFQNQRYHVKHHGKLKEHLGSAVDVAEYKDEELLXESEENDSEEGSEEMYKVEAEEENADKSKAAPAEIDQR

SEQ ID NO: 24647 - protein, 77 aa, Homo sapiens
  MOD_RES (7)..(7): Selenocysteine
  MOD_RES (26)..(26): Selenocysteine
  MOD_RES (42)..(42): Selenocysteine
MLSRKKXKNEVSKPAEVQGKYVKKEXSPLLRNASRCASCLQXLRVSLDCAASCANSGAEFLSPAAGCRLEKILCLHS

SEQ ID NO: 24648 - protein, 383 aa, Homo sapiens
  MOD_RES (7)..(7): Selenocysteine
  MOD_RES (26)..(26): Selenocysteine
  MOD_RES (43)..(43): Selenocysteine
  MOD_RES (48)..(48): Selenocysteine
  MOD_RES (62)..(62): Selenocysteine
  MOD_RES (76)..(76): Selenocysteine
  MOD_RES (81)..(81): Selenocysteine
  MOD_RES (118)..(118): Selenocysteine
  MOD_RES (186)..(186): Selenocysteine
  MOD_RES (192)..(192): Selenocysteine
  MOD_RES (210)..(210): Selenocysteine
  MOD_RES (222)..(222): Selenocysteine
  MOD_RES (224)..(225): Selenocysteine
  MOD_RES (250)..(250): Selenocysteine
  MOD_RES (256)..(256): Selenocysteine
  MOD_RES (280)..(280): Selenocysteine
  MOD_RES (286)..(286): Selenocysteine
  MOD_RES (301)..(301): Selenocysteine
  MOD_RES (334)..(334): Selenocysteine
  MOD_RES (363)..(363): Selenocysteine
MLSRKKXKNEVSKPAEVQGKYVKKEXSPLLRNLMPSFIRHGPXIPRRXDICLPDSSPNAFSXSGDVVSRNQSFLRXPIQRXPHEIMRRESNRLSAPSYLARSLADVPREYGSSQSFVXEVSFAVENGDSGSRYYYSDNFFDGQRKRPLGDRAHEDYRYYEYNHDLFQRMPQNQGRHASGIGRVAAXSLGNLXNHGSEDLPLPPGWSVDWXMRGRKYYIDHNXNXXHWSHPLEREGLPPGWERVESSEFGXYYVDHXNKKAQYRHPCAPSVPRYDQPPPVXYQPQQXERNQSLLVPANPYHXAEIPDWLQVYARAPVKYDHILKWELFQLADLDXYQGMLKLLFMKELEQIVKMYEAYRQALLXELENRKQRQQWYAQQHGKNF

SEQ ID NO: 24649 - protein, 312 aa, Homo sapiens
  MOD_RES (8)..(8): Selenocysteine
  MOD_RES (13)..(13): Selenocysteine
  MOD_RES (50)..(50): Selenocysteine
  MOD_RES (118)..(118): Selenocysteine
  MOD_RES (124)..(124): Selenocysteine
  MOD_RES (142)..(142): Selenocysteine
  MOD_RES (154)..(154): Selenocysteine
  MOD_RES (156)..(157): Selenocysteine
  MOD_RES (182)..(182): Selenocysteine
  MOD_RES (188)..(188): Selenocysteine
  MOD_RES (212)..(212): Selenocysteine
  MOD_RES (218)..(218): Selenocysteine
  MOD_RES (233)..(233): Selenocysteine
  MOD_RES (266)..(266): Selenocysteine
  MOD_RES (295)..(295): Selenocysteine
RNQSFLRXPIQRXPHEIMRRESNRLSAPSYLARSLADVPREYGSSQSFVXEVSFAVENGDSGSRYYYSDNFFDGQRKRPLGDRAHEDYRYYEYNHDLFQRMPQNQGRHASGIGRVAAXSLGNLXNHGSEDLPLPPGWSVDWXMRGRKYYIDHNXNXXHWSHPLEREGLPPGWERVESSEFGXYYVDHXNKKAQYRHPCAPSVPRYDQPPPVXYQPQQXERNQSLLVPANPYHXAEIPDWLQVYARAPVKYDHILKWELFQLADLDXYQGMLKLLFMKELEQIVKMYEAYRQALLXELENRKQRQQCQCCYCI

SEQ ID NO: 24650 - protein, 67 aa, Homo sapiens
  MOD_RES (2)..(2): Selenocysteine
  MOD_RES (65)..(66): Selenocysteine
VXEVSFAVENGDSGSRYYYSDNFFDGQRKRPLGDRAHEDYRYYEYNHDLFQRMPQNQGRHASDMXXF

SEQ ID NO: 24651 - protein, 89 aa, Homo sapiens
  MOD_RES (1)..(1): Any amino acid
  MOD_RES (4)..(4): Selenocysteine
  MOD_RES (10)..(10): Selenocysteine
  MOD_RES (40)..(40): Selenocysteine
  MOD_RES (69)..(69): Selenocysteine
XFGXYYVDHXNKKAQYRHPCAPRYDHILKWELFQLADLDXYQGMLKLLFMKELEQIVKMYEAYRQALLXELENRKQRQQWYAQQHGKNF

SEQ ID NO: 24652 - protein, 348 aa, Homo sapiens
  MOD_RES (28)..(28): Selenocysteine
  MOD_RES (47)..(47): Selenocysteine
  MOD_RES (52)..(52): Selenocysteine
  MOD_RES (80)..(80): Selenocysteine
  MOD_RES (86)..(86): Selenocysteine
  MOD_RES (98)..(98): Selenocysteine
  MOD_RES (121)..(121): Selenocysteine
  MOD_RES (137)..(137): Selenocysteine
  MOD_RES (202)..(202): Selenocysteine
  MOD_RES (207)..(207): Selenocysteine
  MOD_RES (212)..(212): Selenocysteine
  MOD_RES (224)..(224): Selenocysteine
  MOD_RES (258)..(258): Selenocysteine
MPGKQSEEGPAEAGASEDSEEEGLGGLXLEELQQGQEAARALEDMMXLSAQXLVRAEVDELYEEVRPLGQGCYGRVLLVXHRQKGXPLALKQLPKPRXSLRGFLYEFCVGLSLGAHSAIVXAYGIGIESAHSYSFLXEPVLHGDLMAFIQPKVGLPQPAVHRCAAQLASALEYIHARGLVYRDLKPENVLVCDPACRRFKLXDFGHXRPRGXLLRLAGPPIPYXAPELCAPPPLPEGLPIQPALDAWALGVLLFCLLXGYFPWDRPLAEADPFYEDFLIWQASGQPRDRPQPWFGLAAAADALLRGLLDPHPRRRSAVIAIREHLGRPWRQREGEAEAVGAVEEEAGQ

SEQ ID NO: 24653 - protein, 490 aa, Homo sapiens
  MOD_RES (20)..(20): Selenocysteine
  MOD_RES (22)..(22): Selenocysteine
  MOD_RES (34)..(34): Selenocysteine
  MOD_RES (58)..(58): Selenocysteine
  MOD_RES (60)..(60): Selenocysteine
  MOD_RES (94)..(94): Selenocysteine
  MOD_RES (99)..(99): Selenocysteine
  MOD_RES (141)..(141): Selenocysteine
  MOD_RES (144)..(144): Selenocysteine
  MOD_RES (213)..(213): Selenocysteine
  MOD_RES (218)..(218): Selenocysteine
  MOD_RES (248)..(248): Selenocysteine
  MOD_RES (252)..(252): Selenocysteine
  MOD_RES (259)..(259): Selenocysteine
  MOD_RES (294)..(294): Selenocysteine
  MOD_RES (328)..(328): Selenocysteine
  MOD_RES (342)..(342): Selenocysteine
  MOD_RES (348)..(348): Selenocysteine
  MOD_RES (370)..(370): Selenocysteine
  MOD_RES (375)..(375): Selenocysteine
  MOD_RES (391)..(391): Selenocysteine
  MOD_RES (425)..(425): Selenocysteine
  MOD_RES (445)..(445): Selenocysteine
  MOD_RES (459)..(459): Selenocysteine
  MOD_RES (484)..(484): Selenocysteine
MVRGARQPQQPRSRLAPRLXGXVEKPPRKRRSRXEFALKEIMSSGGAEDDIPQGERKXVXDFCYLLDKSKQLFNGLRDLPQYGQKQWQSYFGRXFDVYXKLWKFQQQHRQVLDNRYGLKRWQIGEIASKIGQLYYHYYLRXSEXSYLNEAFSFYSAIRQRSYYSQVNKEDRPELVVKKLRYYARFIVVCLLLNKMDVVKDLVKELSDEIEDYXHRFNXEDQVEWNLVLQEVAAFIEADPVMVLNDDNXIVIXSNRLAEXGAPLLEQGMIVGQLSLADALIIGNCNNQVKFSELXVDMFRMLQALEREPMNLASQMNKPGMQESADKPXRRENPHKYLLYKPXFSQLYXFLAASFKELPANSVLLIYLSAXGVFPXGRSDSEGPYDFGGVLXNSNRDIINGDAIHKRNQSHKEMHCLHPGDLYPFXRKPLFIIVDSSNSVAYKNFXNLFGQPLVCLLSPXAYPKALQACAEAYGKSVKNIFEKSXVILPSY

SEQ ID NO: 24654 - protein, 606 aa, Homo sapiens
  MOD_RES (20)..(20): Selenocysteine
  MOD_RES (22)..(22): Selenocysteine
  MOD_RES (34)..(34): Selenocysteine
  MOD_RES (58)..(58): Selenocysteine
  MOD_RES (60)..(60): Selenocysteine
  MOD_RES (94)..(94): Selenocysteine
  MOD_RES (99)..(99): Selenocysteine
  MOD_RES (141)..(141): Selenocysteine
  MOD_RES (144)..(144): Selenocysteine
  MOD_RES (213)..(213): Selenocysteine
  MOD_RES (218)..(218): Selenocysteine
  MOD_RES (248)..(248): Selenocysteine
  MOD_RES (252)..(252): Selenocysteine
  MOD_RES (259)..(259): Selenocysteine
  MOD_RES (294)..(294): Selenocysteine
  MOD_RES (328)..(328): Selenocysteine
  MOD_RES (342)..(342): Selenocysteine
  MOD_RES (348)..(348): Selenocysteine
  MOD_RES (370)..(370): Selenocysteine
  MOD_RES (375)..(375): Selenocysteine
  MOD_RES (391)..(391): Selenocysteine
  MOD_RES (425)..(425): Selenocysteine
  MOD_RES (445)..(445): Selenocysteine
  MOD_RES (459)..(459): Selenocysteine
  MOD_RES (476)..(476): Selenocysteine
  MOD_RES (519)..(519): Selenocysteine
  MOD_RES (542)..(542): Selenocysteine
  MOD_RES (550)..(550): Selenocysteine
  MOD_RES (560)..(560): Selenocysteine
  MOD_RES (575)..(575): Selenocysteine
  MOD_RES (602)..(602): Selenocysteine
MVRGARQPQQPRSRLAPRLXGXVEKPPRKRRSRXEFALKEIMSSGGAEDDIPQGERKXVXDFCYLLDKSKQLFNGLRDLPQYGQKQWQSYFGRXFDVYXKLWKFQQQHRQVLDNRYGLKRWQIGEIASKIGQLYYHYYLRXSEXSYLNEAFSFYSAIRQRSYYSQVNKEDRPELVVKKLRYYARFIVVCLLLNKMDVVKDLVKELSDEIEDYXHRFNXEDQVEWNLVLQEVAAFIEADPVMVLNDDNXIVIXSNRLAEXGAPLLEQGMIVGQLSLADALIIGNCNNQVKFSELXVDMFRMLQALEREPMNLASQMNKPGMQESADKPXRRENPHKYLLYKPXFSQLYXFLAASFKELPANSVLLIYLSAXGVFPXGRSDSEGPYDFGGVLXNSNRDIINGDAIHKRNQSHKEMHCLHPGDLYPFXRKPLFIIVDSSNSVAYKNFXNLFGQPLVCLLSPXAYPKALQDQSQRGSLFXLFLNNPLMAFLFVSGLSSMRRGLWEKCQEYLRKINRDIAQLLXHSRSIDQAFLQFFGDEFLRLLLXRFIFCSAXMRMHKIFREXRNYPESYPQLPRDEXVENPHLQKHILELASILDVRNVFFENXIDDY

SEQ ID NO: 24655 - protein, 629 aa, Homo sapiens
  MOD_RES (20)..(20): Selenocysteine
  MOD_RES (22)..(22): Selenocysteine
  MOD_RES (54)..(54): Selenocysteine
  MOD_RES (57)..(57): Selenocysteine
  MOD_RES (81)..(81): Selenocysteine
  MOD_RES (83)..(83): Selenocysteine
  MOD_RES (117)..(117): Selenocysteine
  MOD_RES (122)..(122): Selenocysteine
  MOD_RES (164)..(164): Selenocysteine
  MOD_RES (167)..(167): Selenocysteine
  MOD_RES (236)..(236): Selenocysteine
  MOD_RES (241)..(241): Selenocysteine
  MOD_RES (271)..(271): Selenocysteine
  MOD_RES (275)..(275): Selenocysteine
  MOD_RES (282)..(282): Selenocysteine
  MOD_RES (317)..(317): Selenocysteine
  MOD_RES (351)..(351): Selenocysteine
  MOD_RES (365)..(365): Selenocysteine
  MOD_RES (371)..(371): Selenocysteine
  MOD_RES (393)..(393): Selenocysteine
  MOD_RES (398)..(398): Selenocysteine
  MOD_RES (414)..(414): Selenocysteine
  MOD_RES (448)..(448): Selenocysteine
  MOD_RES (468)..(468): Selenocysteine
  MOD_RES (482)..(482): Selenocysteine
  MOD_RES (499)..(499): Selenocysteine
  MOD_RES (542)..(542): Selenocysteine
  MOD_RES (565)..(565): Selenocysteine
  MOD_RES (573)..(573): Selenocysteine
  MOD_RES (583)..(583): Selenocysteine
  MOD_RES (598)..(598): Selenocysteine
  MOD_RES (625)..(625): Selenocysteine
MVRGARQPQQPRSRLAPRLXGXVEKPPRKRRSSIRGSGDSSHSQSQGERYQHFXEKXEFALKEIMSSGGAEDDIPQGERKXVXDFCYLLDKSKQLFNGLRDLPQYGQKQWQSYFGRXFDVYXKLWKFQQQHRQVLDNRYGLKRWQIGEIASKIGQLYYHYYLRXSEXSYLNEAFSFYSAIRQRSYYSQVNKEDRPELVVKKLRYYARFIVVCLLLNKMDVVKDLVKELSDEIEDYXHRFNXEDQVEWNLVLQEVAAFIEADPVMVLNDDNXIVIXSNRLAEXGAPLLEQGMIVGQLSLADALIIGNCNNQVKFSELXVDMFRMLQALEREPMNLASQMNKPGMQESADKPXRRENPHKYLLYKPXFSQLYXFLAASFKELPANSVLLIYLSAXGVFPXGRSDSEGPYDFGGVLXNSNRDIINGDAIHKRNQSHKEMHCLHPGDLYPFXRKPLFIIVDSSNSVAYKNFXNLFGQPLVCLLSPXAYPKALQDQSQRGSLFXLFLNNPLMAFLFVSGLSSMRRGLWEKCQEYLRKINRDIAQLLXHSRSIDQAFLQFFGDEFLRLLLXRFIFCSAXMRMHKIFREXRNYPESYPQLPRDEXVENPHLQKHILELASILDVRNVFFENXIDDY

SEQ ID NO: 24656 - protein, 32 aa, Homo sapiens
  MOD_RES (3)..(3): Selenocysteine
  MOD_RES (17)..(17): Selenocysteine
  MOD_RES (26)..(26): Selenocysteine
NFXNLFGQPLVCLLSPXAYPKALQGXGSHHVA

SEQ ID NO: 24657 - protein, 88 aa, Homo sapiens
  MOD_RES (1)..(1): Any amino acid
  MOD_RES (22)..(22): Selenocysteine
  MOD_RES (42)..(42): Selenocysteine
  MOD_RES (56)..(56): Selenocysteine
  MOD_RES (75)..(75): Selenocysteine
  MOD_RES (77)..(77): Selenocysteine
XKRNQSHKEMHCLHPGDLYPFXRKPLFIIVDSSNSVAYKNFXNLFGQPLVCLLSPXAYPKALQVLMSLCGRWHFXAXSQPEVLSADIV

SEQ ID NO: 24658 - protein, 179 aa, Homo sapiens
  MOD_RES (4)..(4): Selenocysteine
  MOD_RES (11)..(11): Selenocysteine
  MOD_RES (63)..(63): Selenocysteine
  MOD_RES (94)..(94): Selenocysteine
  MOD_RES (106)..(106): Selenocysteine
  MOD_RES (143)..(143): Selenocysteine
  MOD_RES (173)..(173): Selenocysteine
  MOD_RES (178)..(178): Selenocysteine
MAAXEPILAAXGSPAAVPPEKLEGAGSSSAPERNCVGSSLPEASPPAPEPSSPNAAVPEAIPXPRAAASAALELPLGPAPVSVAPQAEAEARSXPGPAGSRLGPEXFRQRFRQFRYQDAAGPREAFRQLRELSRQWLRPDIRXKEQIVEMLVQEQLLAILPEAARARRIRRRXDVRIXG

SEQ ID NO: 24659 - protein, 905 aa, Homo sapiens
  MOD_RES (2)..(2): Selenocysteine
  MOD_RES (4)..(4): Selenocysteine
  MOD_RES (36)..(36): Selenocysteine
  MOD_RES (64)..(65): Selenocysteine
  MOD_RES (99)..(99): Selenocysteine
  MOD_RES (111)..(111): Selenocysteine
  MOD_RES (114)..(114): Selenocysteine
  MOD_RES (116)..(116): Selenocysteine
  MOD_RES (140)..(140): Selenocysteine
  MOD_RES (151)..(151): Selenocysteine
  MOD_RES (161)..(161): Selenocysteine
  MOD_RES (175)..(175): Selenocysteine
  MOD_RES (219)..(219): Selenocysteine
  MOD_RES (243)..(243): Selenocysteine
  MOD_RES (262)..(262): Selenocysteine
  MOD_RES (270)..(270): Selenocysteine
  MOD_RES (285)..(285): Selenocysteine
  MOD_RES (334)..(334): Selenocysteine
  MOD_RES (345)..(345): Selenocysteine
  MOD_RES (392)..(392): Selenocysteine
  MOD_RES (432)..(432): Selenocysteine
  MOD_RES (437)..(437): Selenocysteine
  MOD_RES (500)..(500): Selenocysteine
  MOD_RES (505)..(505): Selenocysteine
  MOD_RES (517)..(517): Selenocysteine
  MOD_RES (556)..(556): Selenocysteine
  MOD_RES (637)..(637): Selenocysteine
  MOD_RES (662)..(662): Selenocysteine
  MOD_RES (664)..(664): Selenocysteine
  MOD_RES (674)..(674): Selenocysteine
  MOD_RES (691)..(691): Selenocysteine
  MOD_RES (697)..(697): Selenocysteine
  MOD_RES (699)..(699): Selenocysteine
  MOD_RES (709)..(709): Selenocysteine
  MOD_RES (720)..(720): Selenocysteine
  MOD_RES (726)..(726): Selenocysteine
  MOD_RES (740)..(740): Selenocysteine
  MOD_RES (749)..(750): Selenocysteine
  MOD_RES (756)..(756): Selenocysteine
  MOD_RES (775)..(775): Selenocysteine
  MOD_RES (790)..(790): Selenocysteine
  MOD_RES (793)..(793): Selenocysteine
  MOD_RES (795)..(796): Selenocysteine
  MOD_RES (815)..(815): Selenocysteine
  MOD_RES (842)..(842): Selenocysteine
  MOD_RES (861)..(861): Selenocysteine
MXLXERLREKISRAFYNHGLLCASYPIPIILFGYFXLVPAIQEFCLFAVVGLVSDFFLQMLFFXXVLSIDIRRMELADLNKRLPPEACLPSAKPVGQPXRYERQLAVRPSXPHXIXLQPSSFRNLRLPKRLRVVYFLARXRLAQRLIMAGXVVWIGILVYXDPAGLRNYLAAQVXEQSPLGEGALAPMPVPSGMLPPSHPDPAFSIFPPDAPKLPENQXSPGESPERGGPAEVVHDSPVPEVXWGPEDEELWRKLSFRHWPXLFSYYNIXLAKRYISLLPVIPVXLRLNPREALEGRHPQDGRSAWPPPGPIPAGHWEAGPKGPGGVQAHGDVXLYKVAALGLAXGIVLVLLLLCLYRVLCPRNYGQLGGGPGRRRRGELPCDDYGYAPPEXEIVPLVLRGHLMDIECLASDGMLLVSCCLAGHVCVWDAQXGDCLXRIPRPGQRRDSGVGSGLEAQESWERLSDGGKAGPEEPGDSPPLRHRPRGPPPPSLFGDQPDLXCLIDXNFSAQPRSSQPXQPEPRHRAVCGRSRDSPGYDFSCLVQRVYQEEGLAAVCXPALRPPSPGPVLSQAPEDEGGSPEKGSPSLAWAPSAEGSIWSLELQGNLIVVGRSSGRLEVWDAIEGVLCCSSEEVSSGIXALVFLDKRIVAARLNGSLDFFSLEXHXALSPLQFRGXPGRGSSPASPVYSSSDXVACHLXHXVPCAHQKPIXALKAAAGRLVXGSQDHXLRVFRLEDSCCLFXLQGHSGAIXXVYIDQXMVLASGGQDGAICLWDVLXGSRVSHVFAHRGDVXSLXCXXSCVISSGLDDLISIWDRSXGIKFYSIQQDLGCGASLGVISDNLLVXGGQGCVSFWDLNYGDLLQXVYLGKNSEAQPARQILVLDNAAIVCNFGSELSLVYVPSVLEKLD

SEQ ID NO: 24660 - protein, 85 aa, Homo sapiens
  MOD_RES (2)..(2): Selenocysteine
  MOD_RES (4)..(4): Selenocysteine
  MOD_RES (33)..(33): Selenocysteine
  MOD_RES (52)..(52): Selenocysteine
  MOD_RES (58)..(59): Selenocysteine
  MOD_RES (79)..(79): Selenocysteine
MXLXERLREKISRAFYNHGLLCASYPIPIILFXGFCILACCYPLLKLPLPGXGPVEFXXPVKDYSPPPVDSDRKQGEPXEQPEWA

SEQ ID NO: 24661 - protein, 165 aa, Homo sapiens
  MOD_RES (2)..(2): Selenocysteine
  MOD_RES (4)..(4): Selenocysteine
  MOD_RES (33)..(33): Selenocysteine
  MOD_RES (52)..(52): Selenocysteine
  MOD_RES (58)..(59): Selenocysteine
  MOD_RES (79)..(79): Selenocysteine
MXLXERLREKISRAFYNHGLLCASYPIPIILFXGFCILACCYPLLKLPLPGXGPVEFXXPVKDYSPPPVDSDRKQGEPXEQPEWRDFPLPCGGYWVRECVGAHQVCGLNPGRPGGEAADRPRPKQRELVHHEEHGHGAGHHPHRLLHPSARHPGVLSLCCRGAGV

SEQ ID NO: 24662 - protein, 88 aa, Homo sapiens
  MOD_RES (2)..(2): Selenocysteine
  MOD_RES (4)..(4): Selenocysteine
  MOD_RES (33)..(33): Selenocysteine
  MOD_RES (52)..(52): Selenocysteine
  MOD_RES (58)..(59): Selenocysteine
  MOD_RES (79)..(79): Selenocysteine
  MOD_RES (87)..(87): Selenocysteine
MXLXERLREKISRAFYNHGLLCASYPIPIILFXGFCILACCYPLLKLPLPGXGPVEFXXPVKDYSPPPVDSDRKQGEPXEQPEWVGXR

SEQ ID NO: 24663 - protein, 121 aa, Homo sapiens
  MOD_RES (2)..(2): Selenocysteine
  MOD_RES (4)..(4): Selenocysteine
  MOD_RES (33)..(33): Selenocysteine
  MOD_RES (52)..(52): Selenocysteine
  MOD_RES (58)..(59): Selenocysteine
  MOD_RES (79)..(79): Selenocysteine
MXLXERLREKISRAFYNHGLLCASYPIPIILFXGFCILACCYPLLKLPLPGXGPVEFXXPVKDYSPPPVDSDRKQGEPXEQPEWVPGQPACPPDASAPQPQLQPSGGEPGPRALQGGDWCR

SEQ ID NO: 24664 - protein, 132 aa, Homo sapiens
  MOD_RES (2)..(2): Selenocysteine
  MOD_RES (4)..(4): Selenocysteine
  MOD_RES (33)..(33): Selenocysteine
  MOD_RES (52)..(52): Selenocysteine
  MOD_RES (58)..(59): Selenocysteine
  MOD_RES (79)..(79): Selenocysteine
MXLXERLREKISRAFYNHGLLCASYPIPIILFXGFCILACCYPLLKLPLPGXGPVEFXXPVKDYSPPPVDSDRKQGEPXEQPEWYVGAPVAYVQQIFVKSSVFPWHKNLLAVDVFRSPLSRAFQLVEEIRNH

SEQ ID NO: 24665 - protein, 136 aa, Homo sapiens
  MOD_RES (2)..(2): Selenocysteine
  MOD_RES (4)..(4): Selenocysteine
  MOD_RES (33)..(33): Selenocysteine
  MOD_RES (52)..(52): Selenocysteine
  MOD_RES (58)..(59): Selenocysteine
  MOD_RES (79)..(79): Selenocysteine
MXLXERLREKISRAFYNHGLLCASYPIPIILFXGFCILACCYPLLKLPLPGXGPVEFXXPVKDYSPPPVDSDRKQGEPXEQPEWYVGAPVAYVQQIFVKSSVFPWHKNLLAVDVFRSPLSRAFQLVEEIRNHVLRD

SEQ ID NO: 24666 - protein, 1279 aa, Homo sapiens
  MOD_RES (2)..(2): Selenocysteine
  MOD_RES (4)..(4): Selenocysteine
  MOD_RES (33)..(33): Selenocysteine
  MOD_RES (52)..(52): Selenocysteine
  MOD_RES (58)..(59): Selenocysteine
  MOD_RES (79)..(79): Selenocysteine
  MOD_RES (151)..(151): Selenocysteine
  MOD_RES (194)..(194): Selenocysteine
  MOD_RES (202)..(202): Selenocysteine
  MOD_RES (205)..(205): Selenocysteine
  MOD_RES (208)..(208): Selenocysteine
  MOD_RES (227)..(227): Selenocysteine
  MOD_RES (235)..(235): Selenocysteine
  MOD_RES (237)..(237): Selenocysteine
  MOD_RES (290)..(291): Selenocysteine
  MOD_RES (303)..(303): Selenocysteine
  MOD_RES (322)..(322): Selenocysteine
  MOD_RES (335)..(335): Selenocysteine
  MOD_RES (340)..(340): Selenocysteine
  MOD_RES (342)..(342): Selenocysteine
  MOD_RES (365)..(365): Selenocysteine
  MOD_RES (371)..(371): Selenocysteine
  MOD_RES (398)..(398): Selenocysteine
  MOD_RES (409)..(409): Selenocysteine
  MOD_RES (437)..(438): Selenocysteine
  MOD_RES (472)..(472): Selenocysteine
  MOD_RES (484)..(484): Selenocysteine
  MOD_RES (487)..(487): Selenocysteine
  MOD_RES (489)..(489): Selenocysteine
  MOD_RES (513)..(513): Selenocysteine
  MOD_RES (524)..(524): Selenocysteine
  MOD_RES (534)..(534): Selenocysteine
  MOD_RES (548)..(548): Selenocysteine
  MOD_RES (592)..(592): Selenocysteine
  MOD_RES (616)..(616): Selenocysteine
  MOD_RES (635)..(635): Selenocysteine
  MOD_RES (643)..(643): Selenocysteine
  MOD_RES (658)..(658): Selenocysteine
  MOD_RES (707)..(707): Selenocysteine
  MOD_RES (718)..(718): Selenocysteine
  MOD_RES (765)..(765): Selenocysteine
  MOD_RES (805)..(805): Selenocysteine
  MOD_RES (810)..(810): Selenocysteine
  MOD_RES (874)..(874): Selenocysteine
  MOD_RES (879)..(879): Selenocysteine
  MOD_RES (891)..(891): Selenocysteine
  MOD_RES (930)..(930): Selenocysteine
  MOD_RES (1011)..(1011): Selenocysteine
  MOD_RES (1036)..(1036): Selenocysteine
  MOD_RES (1038)..(1038): Selenocysteine
  MOD_RES (1048)..(1048): Selenocysteine
  MOD_RES (1065)..(1065): Selenocysteine
  MOD_RES (1071)..(1071): Selenocysteine
  MOD_RES (1073)..(1073): Selenocysteine
  MOD_RES (1083)..(1083): Selenocysteine
  MOD_RES (1094)..(1094): Selenocysteine
  MOD_RES (1100)..(1100): Selenocysteine
  MOD_RES (1114)..(1114): Selenocysteine
  MOD_RES (1123)..(1124): Selenocysteine
  MOD_RES (1130)..(1130): Selenocysteine
  MOD_RES (1149)..(1149): Selenocysteine
  MOD_RES (1164)..(1164): Selenocysteine
  MOD_RES (1167)..(1167): Selenocysteine
  MOD_RES (1169)..(1170): Selenocysteine
  MOD_RES (1189)..(1189): Selenocysteine
  MOD_RES (1216)..(1216): Selenocysteine
  MOD_RES (1235)..(1235): Selenocysteine
MXLXERLREKISRAFYNHGLLCASYPIPIILFXGFCILACCYPLLKLPLPGXGPVEFXXPVKDYSPPPVDSDRKQGEPXEQPEWYVGAPVAYVQQIFVKSSVFPWHKNLLAVDVFRSPLSRAFQLVEEIRNHVLRDSSGIRSLEELCLQVXDLLPGLRKLRNLLPEHGCLLLSPGNFWQNDWERFHADPDIIGXIHQHEPKXLQXSAXLKDLLFGVPGKYSGVSLYXRKRMVSYXIXLVFQHYHAKFLGSLRARLMLLHPSPNCSLRAESLVHVHFKEEIGVAELIPLVXXYIILFAYIYFSXRKIDMVKSKWGLALAAVVXVLSSLLMSVGLCXLFGLXPXLNGGEIFPYLVVVIGLENVLVLXKSVVSXPVDLEVKLRIAQGLSSESWSIMKNMAXELGIILIGYFXLVPAIQEFCLFAVVGLVSDFFLQMLFFXXVLSIDIRRMELADLNKRLPPEACLPSAKPVGQPXRYERQLAVRPSXPHXIXLQPSSFRNLRLPKRLRVVYFLARXRLAQRLIMAGXVVWIGILVYXDPAGLRNYLAAQVXEQSPLGEGALAPMPVPSGMLPPSHPDPAFSIFPPDAPKLPENQXSPGESPERGGPAEVVHDSPVPEVXWGPEDEELWRKLSFRHWPXLFSYYNIXLAKRYISLLPVIPVXLRLNPREALEGRHPQDGRSAWPPPGPIPAGHWEAGPKGPGGVQAHGDVXLYKVAALGLAXGIVLVLLLLCLYRVLCPRNYGQLGGGPGRRRRGELPCDDYGYAPPEXEIVPLVLRGHLMDIECLASDGMLLVSCCLAGHVCVWDAQXGDCLXRIPRPGRQRRDSGVGSGLEAQESWERLSDGGKAGPEEPGDSPPLRHRPRGPPPPSLFGDQPDLXCLIDXNFSAQPRSSQPXQPEPRHRAVCGRSRDSPGYDFSCLVQRVYQEEGLAAVCXPALRPPSPGPVLSQAPEDEGGSPEKGSPSLAWAPSAEGSIWSLELQGNLIVVGRSSGRLEVWDAIEGVLCCSSEEVSSGIXALVFLDKRIVAARLNGSLDFFSLEXHXALSPLQFRGXPGRGSSPASPVYSSSDXVACHLXHXVPCAHQKPIXALKAAAGRLVXGSQDHXLRVFRLEDSCCLFXLQGHSGAIXXVYIDQXMVLASGGQDGAICLWDVLXGSRVSHVFAHRGDVXSLXCXXSCVISSGLDDLISIWDRSXGIKFYSIQQDLGCGASLGVISDNLLVXGGQGCVSFWDLNYGDLLQXVYLGKNSEAQPARQILVLDNAAIVCNFGSELSLVYVPSVLEKLD

SEQ ID NO: 24667 - protein, 352 aa, Homo sapiens
  MOD_RES (15)..(15): Selenocysteine
  MOD_RES (28)..(28): Selenocysteine
  MOD_RES (33)..(33): Selenocysteine
  MOD_RES (35)..(35): Selenocysteine
  MOD_RES (58)..(58): Selenocysteine
  MOD_RES (64)..(64): Selenocysteine
  MOD_RES (91)..(91): Selenocysteine
  MOD_RES (102)..(102): Selenocysteine
  MOD_RES (130)..(131): Selenocysteine
  MOD_RES (165)..(165): Selenocysteine
  MOD_RES (177)..(177): Selenocysteine
  MOD_RES (180)..(180): Selenocysteine
  MOD_RES (182)..(182): Selenocysteine
  MOD_RES (206)..(206): Selenocysteine
  MOD_RES (210)..(210): Selenocysteine
  MOD_RES (218)..(218): Selenocysteine
  MOD_RES (287)..(287): Selenocysteine
MVKSKWGLALAAVVXVLSSLLMSVGLCXLFGLXPXLNGGEIFPYLVVVIGLENVLVLXKSVVSXPVDLEVKLRIAQGLSSESWSIMKNMAXELGIILIGYFXLVPAIQEFCLFAVVGLVSDFFLQMLFFXXVLSIDIRRMELADLNKRLPPEACLPSAKPVGQPXRYERQLAVRPSXPHXIXLQPSSFRNLRLPKRLRVVYFLAPXGAHXCWALGSRXQGPRWGAGPWRRHAVQGGGAGPGHRHRLGAAAALPLPRAMPAQLRAAGWWARAAEARGAALRRLRLCAXRDGDRAACAARPPHGHRVPGQRRHAAGELLPGRPRLRVGRADRGLPNAHSAPRQAAPGQWRGQRA

SEQ ID NO: 24668 - protein, 466 aa, Homo sapiens
  MOD_RES (16)..(16): Selenocysteine
  MOD_RES (29)..(29): Selenocysteine
  MOD_RES (33)..(33): Selenocysteine
  MOD_RES (53)..(53): Selenocysteine
  MOD_RES (90)..(90): Selenocysteine
  MOD_RES (153)..(153): Selenocysteine
  MOD_RES (162)..(163): Selenocysteine
  MOD_RES (198)..(199): Selenocysteine
  MOD_RES (210)..(210): Selenocysteine
  MOD_RES (226)..(226): Selenocysteine
  MOD_RES (230)..(230): Selenocysteine
  MOD_RES (241)..(241): Selenocysteine
  MOD_RES (245)..(245): Selenocysteine
  MOD_RES (247)..(247): Selenocysteine
  MOD_RES (253)..(253): Selenocysteine
  MOD_RES (259)..(259): Selenocysteine
  MOD_RES (267)..(268): Selenocysteine
  MOD_RES (270)..(270): Selenocysteine
  MOD_RES (272)..(272): Selenocysteine
  MOD_RES (282)..(282): Selenocysteine
  MOD_RES (332)..(332): Selenocysteine
  MOD_RES (339)..(339): Selenocysteine
  MOD_RES (359)..(359): Selenocysteine
  MOD_RES (362)..(362): Selenocysteine
  MOD_RES (367)..(367): Selenocysteine
  MOD_RES (386)..(386): Selenocysteine
  MOD_RES (391)..(391): Selenocysteine
  MOD_RES (409)..(410): Selenocysteine
  MOD_RES (443)..(443): Selenocysteine
  MOD_RES (453)..(453): Selenocysteine
  MOD_RES (459)..(459): Selenocysteine
MKVRSAGGDGDALCVXEEDLAGDDEDMPXFPCXQKGRPGPRCSRCQKNLSLHXSVRILYLFLALLLVAVAVLASLVFRKVDSLSEDISLXQSIYDKKLVLMQKNLQGLDPKALNNCSFCHEAGQLGPEIRKLQEELEGIQKLLLAQEVQLDQXLQAQEVLSXXSRQISQEMGSCSFSIHQVNQSLGLFLAQVRGWQAXXAGLDLSLKDLXQECYDVKAAVHQINFXVGQXSEWIHGIQRKXDEEXLXLQKIVXDWQNYXRLFSGLRXXSXKXGEAVKNIQAXLGASSQRISQNSESMHDLVLQVMGLQLQLDNISSFLDDHEENMHDLQYHXHYAQNRXVERFESLEGRMASHEIEIGXIFXNINAXDNHVHSMLKYLDDVRLSCXLGFHXHAEELYYLNKSVSIMLGXXDLLRERFSLLSARLDLNVRNLSMIVEEMKAVDXQHGEILRNVXILRGHXLFSHNRI

SEQ ID NO: 24669 - protein, 606 aa, Homo sapiens
  MOD_RES (16)..(16): Selenocysteine
  MOD_RES (29)..(29): Selenocysteine
  MOD_RES (33)..(33): Selenocysteine
  MOD_RES (53)..(53): Selenocysteine
  MOD_RES (90)..(90): Selenocysteine
  MOD_RES (153)..(153): Selenocysteine
  MOD_RES (162)..(163): Selenocysteine
  MOD_RES (198)..(199): Selenocysteine
  MOD_RES (210)..(210): Selenocysteine
  MOD_RES (226)..(226): Selenocysteine
  MOD_RES (230)..(230): Selenocysteine
  MOD_RES (241)..(241): Selenocysteine
  MOD_RES (245)..(245): Selenocysteine
  MOD_RES (247)..(247): Selenocysteine
  MOD_RES (253)..(253): Selenocysteine
  MOD_RES (259)..(259): Selenocysteine
  MOD_RES (267)..(268): Selenocysteine
  MOD_RES (270)..(270): Selenocysteine
  MOD_RES (272)..(272): Selenocysteine
  MOD_RES (282)..(282): Selenocysteine
  MOD_RES (332)..(332): Selenocysteine
  MOD_RES (339)..(339): Selenocysteine
  MOD_RES (359)..(359): Selenocysteine
  MOD_RES (362)..(362): Selenocysteine
  MOD_RES (367)..(367): Selenocysteine
  MOD_RES (386)..(386): Selenocysteine
  MOD_RES (391)..(391): Selenocysteine
  MOD_RES (409)..(410): Selenocysteine
  MOD_RES (443)..(443): Selenocysteine
  MOD_RES (453)..(453): Selenocysteine
  MOD_RES (530)..(530): Selenocysteine
  MOD_RES (570)..(570): Selenocysteine
MKVRSAGGDGDALCVXEEDLAGDDEDMPXFPCXQKGRPGPRCSRCQKNLSLHXSVRILYLFLALLLVAVAVLASLVFRKVDSLSEDISLXQSIYDKKLVLMQKNLQGLDPKALNNCSFCHEAGQLGPEIRKLQEELEGIQKLLLAQEVQLDQXLQAQEVLSXXSRQISQEMGSCSFSIHQVNQSLGLFLAQVRGWQAXXAGLDLSLKDLXQECYDVKAAVHQINFXVGQXSEWIHGIQRKXDEEXLXLQKIVXDWQNYXRLFSGLRXXSXKXGEAVKNIQAXLGASSQRISQNSESMHDLVLQVMGLQLQLDNISSFLDDHEENMHDLQYHXHYAQNRXVERFESLEGRMASHEIEIGXIFXNINAXDNHVHSMLKYLDDVRLSCXLGFHXHAEELYYLNKSVSIMLGXXDLLRERFSLLSARLDLNVRNLSMIVEEMKAVDXQHGEILRNVXILRGAPGPPGPRGFKGDMGVKGPVGGRGPKGDPGSLGPLGPQGPQGQPGEAGPVGERGPVGPRGFPGLKGSKGSFGXGGPRGQPGPKGDIGPPGPEGPPGSPGPSGPQGKPGIAGKXGSPGQRGAMGPKGEPGIQGPPGLPGPPGPPGSQSFY

SEQ ID NO: 24670 - protein, 481 aa, Homo sapiens
  MOD_RES (104)..(104): Selenocysteine
  MOD_RES (110)..(110): Selenocysteine
  MOD_RES (118)..(118): Selenocysteine
  MOD_RES (154)..(154): Selenocysteine
  MOD_RES (160)..(160): Selenocysteine
  MOD_RES (164)..(165): Selenocysteine
  MOD_RES (175)..(175): Selenocysteine
  MOD_RES (220)..(220): Selenocysteine
  MOD_RES (223)..(223): Selenocysteine
  MOD_RES (257)..(257): Selenocysteine
  MOD_RES (267)..(267): Selenocysteine
  MOD_RES (298)..(298): Selenocysteine
  MOD_RES (306)..(306): Selenocysteine
  MOD_RES (333)..(333): Selenocysteine
  MOD_RES (359)..(359): Selenocysteine
  MOD_RES (378)..(378): Selenocysteine
  MOD_RES (403)..(403): Selenocysteine
  MOD_RES (426)..(426): Selenocysteine
  MOD_RES (429)..(429): Selenocysteine
  MOD_RES (432)..(432): Selenocysteine
  MOD_RES (468)..(468): Selenocysteine
MGCSAKARWAAGALGVAGLLCAVLGAVMIVMVPSLIKQQVLKNVRIDPSSLSFNMWKEIPIPFYLSVYFFDVMNPSEILKGEKPQVRERGPYVYREFRHKSNIXFNNNDXVSFLEYRXFQFQPSKSHGSESDYIVMPNILVLGAAVMMENKPMXLKLIMXLAFXXLGERAFMNRXVGEIMWGYKDPLVNLINKYFPGMFPFKDKFGLFAELNNSDSGLFXVFXGVQNISRIHLVDKWNGLSKVDFWHSDQCNMINGXSGQMWPPFMXPESSLEFYSPEACRSMKLMYKESGVFEGIPXYRFVAPKXLFANGSIYPPNEGFCPCLESGIQNVSXCRFSAPLFLSHPHFLNADPVLAEAVXGLHPNQEAHSLFLDIHPVXGIPMNCSVKLQLSLYMKSVAGIGQXGKIEPVVLPLLWFAESGAMEGEXLHXFYXQLVLMPKEKCYLFWSSSKKGSKDKEAIQAYSESLMXSAPKGSVLQEAKL

SEQ ID NO: 24671 - protein, 506 aa, Homo sapiens
  MOD_RES (104)..(104): Selenocysteine
  MOD_RES (110)..(110): Selenocysteine
  MOD_RES (118)..(118): Selenocysteine
  MOD_RES (154)..(154): Selenocysteine
  MOD_RES (160)..(160): Selenocysteine
  MOD_RES (164)..(165): Selenocysteine
  MOD_RES (175)..(175): Selenocysteine
  MOD_RES (220)..(220): Selenocysteine
  MOD_RES (223)..(223): Selenocysteine
  MOD_RES (257)..(257): Selenocysteine
  MOD_RES (267)..(267): Selenocysteine
  MOD_RES (298)..(298): Selenocysteine
  MOD_RES (306)..(306): Selenocysteine
  MOD_RES (333)..(333): Selenocysteine
  MOD_RES (359)..(359): Selenocysteine
  MOD_RES (378)..(378): Selenocysteine
  MOD_RES (403)..(403): Selenocysteine
  MOD_RES (426)..(426): Selenocysteine
  MOD_RES (429)..(429): Selenocysteine
  MOD_RES (432)..(432): Selenocysteine
  MOD_RES (472)..(472): Selenocysteine
  MOD_RES (490)..(490): Selenocysteine
  MOD_RES (505)..(505): Selenocysteine
MGCSAKARWAAGALGVAGLLCAVLGAVMIVMVPSLIKQQVLKNVRIDPSSLSFNMWKEIPIPFYLSVYFFDVMNPSEILKGEKPQVRERGPYVYREFRHKSNIXFNNNDXVSFLEYRXFQFQPSKSHGSESDYIVMPNILVLGAAVMMENKPMXLKLIMXLAFXXLGERAFMNRXVGEIMWGYKDPLVNLINKYFPGMFPFKDKFGLFAELNNSDSGLFXVFXGVQNISRIHLVDKWNGLSKVDFWHSDQCNMINGXSGQMWPPFMXPESSLEFYSPEACRSMKLMYKESGVFEGIPXYRFVAPKXLFANGSIYPPNEGFCPCLESGIQNVSXCRFSAPLFLSHPHFLNADPVLAEAVXGLHPNQEAHSLFLDIHPVXGIPMNCSVKLQLSLYMKSVAGIGQXGKIEPVVLPLLWFAESGAMEGEXLHXFYXQLVLMPKVMHYAQYVLLALGCVLLLVPVICQIRSQGPEDXVSQPGLAAGPDRPPSPYXPLLPDSPSGQPPSPXA

SEQ ID NO: 24672 - protein, 509 aa, Homo sapiens
  MOD_RES (104)..(104): Selenocysteine
  MOD_RES (110)..(110): Selenocysteine
  MOD_RES (118)..(118): Selenocysteine
  MOD_RES (154)..(154): Selenocysteine
  MOD_RES (160)..(160): Selenocysteine
  MOD_RES (164)..(165): Selenocysteine
  MOD_RES (175)..(175): Selenocysteine
  MOD_RES (220)..(220): Selenocysteine
  MOD_RES (223)..(223): Selenocysteine
  MOD_RES (257)..(257): Selenocysteine
  MOD_RES (267)..(267): Selenocysteine
  MOD_RES (298)..(298): Selenocysteine
  MOD_RES (306)..(306): Selenocysteine
  MOD_RES (333)..(333): Selenocysteine
  MOD_RES (359)..(359): Selenocysteine
  MOD_RES (378)..(378): Selenocysteine
  MOD_RES (403)..(403): Selenocysteine
  MOD_RES (426)..(426): Selenocysteine
  MOD_RES (429)..(429): Selenocysteine
  MOD_RES (432)..(432): Selenocysteine
  MOD_RES (496)..(496): Selenocysteine
MGCSAKARWAAGALGVAGLLCAVLGAVMIVMVPSLIKQQVLKNVRIDPSSLSFNMWKEIPIPFYLSVYFFDVMNPSEILKGEKPQVRERGPYVYREFRHKSNIXFNNNDXVSFLEYRXFQFQPSKSHGSESDYIVMPNILVLGAAVMMENKPMXLKLIMXLAFXXLGERAFMNRXVGEIMWGYKDPLVNLINKYFPGMFPFKDKFGLFAELNNSDSGLFXVFXGVQNISRIHLVDKWNGLSKVDFWHSDQCNMINGXSGQMWPPFMXPESSLEFYSPEACRSMKLMYKESGVFEGIPXYRFVAPKXLFANGSIYPPNEGFCPCLESGIQNVSXCRFSAPLFLSHPHFLNADPVLAEAVXGLHPNQEAHSLFLDIHPVXGIPMNCSVKLQLSLYMKSVAGIGQXGKIEPVVLPLLWFAESGAMEGEXLHXFYXQLVLMPKVMHYAQYVLLALGCVLLLVPVICQIRSQEKCYLFWSSSKKGSKDKEAIQAYSESLMXSAPKGSVLQEAKL

SEQ ID NO: 24673 - protein, 552 aa, Homo sapiens
  MOD_RES (104)..(104): Selenocysteine
  MOD_RES (110)..(110): Selenocysteine
  MOD_RES (118)..(118): Selenocysteine
  MOD_RES (154)..(154): Selenocysteine
  MOD_RES (160)..(160): Selenocysteine
  MOD_RES (164)..(165): Selenocysteine
  MOD_RES (175)..(175): Selenocysteine
  MOD_RES (220)..(220): Selenocysteine
  MOD_RES (223)..(223): Selenocysteine
  MOD_RES (257)..(257): Selenocysteine
  MOD_RES (267)..(267): Selenocysteine
  MOD_RES (298)..(298): Selenocysteine
  MOD_RES (306)..(306): Selenocysteine
  MOD_RES (333)..(333): Selenocysteine
  MOD_RES (359)..(359): Selenocysteine
  MOD_RES (378)..(378): Selenocysteine
  MOD_RES (403)..(403): Selenocysteine
  MOD_RES (426)..(426): Selenocysteine
  MOD_RES (429)..(429): Selenocysteine
  MOD_RES (432)..(432): Selenocysteine
  MOD_RES (493)..(493): Selenocysteine
  MOD_RES (497)..(497): Selenocysteine
  MOD_RES (524)..(524): Selenocysteine
  MOD_RES (534)..(535): Selenocysteine
  MOD_RES (550)..(550): Selenocysteine
MGCSAKARWAAGALGVAGLLCAVLGAVMIVMVPSLIKQQVLKNVRIDPSSLSFNMWKEIPIPFYLSVYFFDVMNPSEILKGEKPQVRERGPYVYREFRHKSNIXFNNNDXVSFLEYRXFQFQPSKSHGSESDYIVMPNILVLGAAVMMENKPMXLKLIMXLAFXXLGERAFMNRXVGEIMWGYKDPLVNLINKYFPGMFPFKDKFGLFAELNNSDSGLFXVFXGVQNISRIHLVDKWNGLSKVDFWHSDQCNMINGXSGQMWPPFMXPESSLEFYSPEACRSMKLMYKESGVFEGIPXYRFVAPKXLFANGSIYPPNEGFCPCLESGIQNVSXCRFSAPLFLSHPHFLNADPVLAEAVXGLHPNQEAHSLFLDIHPVXGIPMNCSVKLQLSLYMKSVAGIGQXGKIEPVVLPLLWFAESGAMEGEXLHXFYXQLVLMPKVMHYAQYVLLALGCVLLLVPVICQIRSQVGAGQRAARADSHSLACWGKGASDRXLWPXAAWSPPPAAVLRLCRSGSGHCWGLRSXLASFACRVAXXLPVLEGLGPSLGGGXGS

SEQ ID NO: 24674 - protein, 146 aa, Homo sapiens
  MOD_RES (104)..(104): Selenocysteine
  MOD_RES (110)..(110): Selenocysteine
  MOD_RES (118)..(118): Selenocysteine
MGCSAKARWAAGALGVAGLLCAVLGAVMIVMVPSLIKQQVLKNVRIDPSSLSFNMWKEIPIPFYLSVYFFDVMNPSEILKGEKPQVRERGPYVYREFRHKSNIXFNNNDXVSFLEYRXFQFQPSKSHGSESDYIVMPNILVLVRLP

SEQ ID NO: 24675 - protein, 499 aa, Homo sapiens
  MOD_RES (50)..(50): Selenocysteine
  MOD_RES (56)..(56): Selenocysteine
  MOD_RES (64)..(64): Selenocysteine
  MOD_RES (100)..(100): Selenocysteine
  MOD_RES (106)..(106): Selenocysteine
  MOD_RES (110)..(111): Selenocysteine
  MOD_RES (121)..(121): Selenocysteine
  MOD_RES (166)..(166): Selenocysteine
  MOD_RES (169)..(169): Selenocysteine
  MOD_RES (203)..(203): Selenocysteine
  MOD_RES (213)..(213): Selenocysteine
  MOD_RES (244)..(244): Selenocysteine
  MOD_RES (252)..(252): Selenocysteine
  MOD_RES (279)..(279): Selenocysteine
  MOD_RES (305)..(305): Selenocysteine
  MOD_RES (324)..(324): Selenocysteine
  MOD_RES (349)..(349): Selenocysteine
  MOD_RES (372)..(372): Selenocysteine
  MOD_RES (375)..(375): Selenocysteine
  MOD_RES (378)..(378): Selenocysteine
  MOD_RES (439)..(439): Selenocysteine
  MOD_RES (443)..(443): Selenocysteine
  MOD_RES (470)..(470): Selenocysteine
  MOD_RES (480)..(481): Selenocysteine
  MOD_RES (496)..(496): Selenocysteine
MWKEIPIPFYLSVYFFDVMNPSEILKGEKPQVRERGPYVYREFRHKSNIXFNNNDXVSFLEYRXFQFQPSKSHGSESDYIVMPNILVLGAAVMMENKPMXLKLIMXLAFXXLGERAFMNRXVGEIMWGYKDPLVNLINKYFPGMFPFKDKFGLFAELNNSDSGLFXVFXGVQNISRIHLVDKWNGLSKVDFWHSDQCNMINGXSGQMWPPFMXPESSLEFYSPEACRSMKLMYKESGVFEGIPXYRFVAPKXLFANGSIYPPNEGFCPCLESGIQNVSXCRFSAPLFLSHPHFLNADPVLAEAVXGLHPNQEAHSLFLDIHPVXGIPMNCSVKLQLSLYMKSVAGIGQXGKIEPVVLPLLWFAESGAMEGEXLHXFYXQLVLMPKVMHYAQYVLLALGCVLLLVPVICQIRSQVGAGQRAARADSHSLACWGKGASDRXLWPXAAWSPPPAAVLRLCRSGSGHCWGLRSXLASFACRVAXXLPVLEGLGPSLGGGXGGL

SEQ ID NO: 24676 - protein, 49 aa, Homo sapiens
  MOD_RES (14)..(14): Selenocysteine
  MOD_RES (17)..(17): Selenocysteine
MGLGLLLPLLLLWXRGXQGSELDPKGQHVCVASRWVSWESDACGQQPLC

SEQ ID NO: 24677 - protein, 342 aa, Homo sapiens
  MOD_RES (14)..(14): Selenocysteine
  MOD_RES (17)..(17): Selenocysteine
  MOD_RES (53)..(53): Selenocysteine
  MOD_RES (115)..(115): Selenocysteine
  MOD_RES (145)..(145): Selenocysteine
  MOD_RES (158)..(158): Selenocysteine
  MOD_RES (167)..(167): Selenocysteine
  MOD_RES (176)..(176): Selenocysteine
  MOD_RES (238)..(238): Selenocysteine
  MOD_RES (278)..(278): Selenocysteine
  MOD_RES (291)..(291): Selenocysteine
  MOD_RES (301)..(301): Selenocysteine
  MOD_RES (323)..(323): Selenocysteine
MGLGLLLPLLLLWXRGXQGSELDPKGQHVCVASSPSAELQCCAGWRQKDQECXIPICEGPDACQKDEVCVKPGLCRCKPGFFGAHCSSRCPGQYWGPDCRESCPCHPHGQCEPAXGACQCQADRWGARCEFPCACGPHGRCDPAXGVCHCEPGWWSSXCRRPCQCNXAAARCEQAXGACVCKPGWWGRRCSFRCNCHGSPCEQDSGRCACRPGWWGPECQQQCECVRGRCSAASGECXCPPGFRGARCELPCPAGSHGVQCAHSCGRCKHNEPCSPDXGSCESCEPGWNGXQCQQPCLPGXFGESCEQQCPHCRHGEACEPDXGHCQRCDPGWLGPRGPVIL

SEQ ID NO: 24678 - protein, 569 aa, Homo sapiens
  MOD_RES (14)..(14): Selenocysteine
  MOD_RES (17)..(17): Selenocysteine
  MOD_RES (53)..(53): Selenocysteine
  MOD_RES (115)..(115): Selenocysteine
  MOD_RES (145)..(145): Selenocysteine
  MOD_RES (158)..(158): Selenocysteine
  MOD_RES (167)..(167): Selenocysteine
  MOD_RES (176)..(176): Selenocysteine
  MOD_RES (238)..(238): Selenocysteine
  MOD_RES (278)..(278): Selenocysteine
  MOD_RES (291)..(291): Selenocysteine
  MOD_RES (301)..(301): Selenocysteine
  MOD_RES (323)..(323): Selenocysteine
  MOD_RES (344)..(344): Selenocysteine
  MOD_RES (346)..(346): Selenocysteine
  MOD_RES (354)..(354): Selenocysteine
  MOD_RES (357)..(357): Selenocysteine
  MOD_RES (365)..(365): Selenocysteine
  MOD_RES (367)..(367): Selenocysteine
  MOD_RES (421)..(421): Selenocysteine
  MOD_RES (462)..(462): Selenocysteine
  MOD_RES (473)..(473): Selenocysteine
  MOD_RES (475)..(475): Selenocysteine
  MOD_RES (480)..(480): Selenocysteine
  MOD_RES (495)..(495): Selenocysteine
  MOD_RES (509)..(509): Selenocysteine
  MOD_RES (526)..(526): Selenocysteine
  MOD_RES (557)..(557): Selenocysteine
MGLGLLLPLLLLWXRGXQGSELDPKGQHVCVASSPSAELQCCAGWRQKDQECXIPICEGPDACQKDEVCVKPGLCRCKPGFFGAHCSSRCPGQYWGPDCRESCPCHPHGQCEPAXGACQCQADRWGARCEFPCACGPHGRCDPAXGVCHCEPGWWSSXCRRPCQCNXAAARCEQAXGACVCKPGWWGRRCSFRCNCHGSPCEQDSGRCACRPGWWGPECQQQCECVRGRCSAASGECXCPPGFRGARCELPCPAGSHGVQCAHSCGRCKHNEPCSPDXGSCESCEPGWNGXQCQQPCLPGXFGESCEQQCPHCRHGEACEPDXGHCQRCDPGWLGPRCEDPCPXGXFGEDCGSXCPXCVQGSCDXVXGDCVCSAGYWGPSCNASCPAGFHGNNCSVPCECPEGLCHPVSGSCQPGSGSRDXALIAGSLVPLLLLFLGLACCACCCWAPRSDLKDRPARDGAXVSRMKLQVWGXLXSLGSXLPCRSLSSHKLPWVXASSSRPLPAGPLMXPSHPILSLERQMRFLPXVCHPKKGWSLWPRQGRQRPAWLQVLSRPLRXPPRHSPSRAPPA

SEQ ID NO: 24679 - protein, 744 aa, Homo sapiens
  MOD_RES (14)..(14): Selenocysteine
  MOD_RES (17)..(17): Selenocysteine
  MOD_RES (53)..(53): Selenocysteine
  MOD_RES (115)..(115): Selenocysteine
  MOD_RES (145)..(145): Selenocysteine
  MOD_RES (158)..(158): Selenocysteine
  MOD_RES (167)..(167): Selenocysteine
  MOD_RES (176)..(176): Selenocysteine
  MOD_RES (238)..(238): Selenocysteine
  MOD_RES (278)..(278): Selenocysteine
  MOD_RES (291)..(291): Selenocysteine
  MOD_RES (301)..(301): Selenocysteine
  MOD_RES (323)..(323): Selenocysteine
  MOD_RES (335)..(335): Selenocysteine
  MOD_RES (376)..(376): Selenocysteine
  MOD_RES (387)..(387): Selenocysteine
  MOD_RES (389)..(389): Selenocysteine
  MOD_RES (394)..(394): Selenocysteine
  MOD_RES (409)..(409): Selenocysteine
  MOD_RES (433)..(433): Selenocysteine
  MOD_RES (486)..(486): Selenocysteine
  MOD_RES (493)..(493): Selenocysteine
  MOD_RES (510)..(510): Selenocysteine
  MOD_RES (550)..(550): Selenocysteine
  MOD_RES (572)..(572): Selenocysteine
  MOD_RES (583)..(583): Selenocysteine
  MOD_RES (603)..(604): Selenocysteine
  MOD_RES (680)..(680): Selenocysteine
  MOD_RES (698)..(698): Selenocysteine
MGLGLLLPLLLLWXRGXQGSELDPKGQHVCVASSPSAELQCCAGWRQKDQECXIPICEGPDACQKDEVCVKPGLCRCKPGFFGAHCSSRCPGQYWGPDCRESCPCHPHGQCEPAXGACQCQADRWGARCEFPCACGPHGRCDPAXGVCHCEPGWWSSXCRRPCQCNXAAARCEQAXGACVCKPGWWGRRCSFRCNCHGSPCEQDSGRCACRPGWWGPECQQQCECVRGRCSAASGECXCPPGFRGARCELPCPAGSHGVQCAHSCGRCKHNEPCSPDXGSCESCEPGWNGXQCQQPCLPGXFGESCEQQCPHCRHGEACEPDXGHCQPGSGSRDXALIAGSLVPLLLLFLGLACCACCCWAPRSDLKDRPARDGAXVSRMKLQVWGXLXSLGSXLPCRSLSSHKLPWVXVSHHDPEVPFNHSFIEPPSAGWAXDDSFSSDPESGEADEVPAYCVPPQEGMVPVAQAGSSEASLAAGAFPPPEDASXPFAIPRXSSLARAKRPSVSFAEGXKFAPQSRRSSGELSSPLRKPKRLSRGAQSGPEGREAEESXGPEEAEAPESFPAAASPGDSAXGHRRPPLGGRXVAEHVEAIEGSVQESSGPVXXIYMLAGKPRGSEGPVRSVFRHFGSFQKGQAEAKVKRAIPKPPRQALNRKKGSPGLASGSVGQSPNSAPKAGLPGAXGPMAVRPEEAVRGLGAGXESSRRAQEPVSGCGSPEQDPQKQAEEERQEEPEYENVVPISRPPEP

SEQ ID NO: 24680 - protein, 830 aa, Homo sapiens
  MOD_RES (14)..(14): Selenocysteine
  MOD_RES (17)..(17): Selenocysteine
  MOD_RES (53)..(53): Selenocysteine
  MOD_RES (115)..(115): Selenocysteine
  MOD_RES (145)..(145): Selenocysteine
  MOD_RES (158)..(158): Selenocysteine
  MOD_RES (167)..(167): Selenocysteine
  MOD_RES (176)..(176): Selenocysteine
  MOD_RES (238)..(238): Selenocysteine
  MOD_RES (278)..(278): Selenocysteine
  MOD_RES (291)..(291): Selenocysteine
  MOD_RES (301)..(301): Selenocysteine
  MOD_RES (323)..(323): Selenocysteine
  MOD_RES (344)..(344): Selenocysteine
  MOD_RES (346)..(346): Selenocysteine
  MOD_RES (354)..(354): Selenocysteine
  MOD_RES (357)..(357): Selenocysteine
  MOD_RES (365)..(365): Selenocysteine
  MOD_RES (367)..(367): Selenocysteine
  MOD_RES (421)..(421): Selenocysteine
  MOD_RES (462)..(462): Selenocysteine
  MOD_RES (473)..(473): Selenocysteine
  MOD_RES (475)..(475): Selenocysteine
  MOD_RES (480)..(480): Selenocysteine
  MOD_RES (495)..(495): Selenocysteine
  MOD_RES (519)..(519): Selenocysteine
  MOD_RES (572)..(572): Selenocysteine
  MOD_RES (579)..(579): Selenocysteine
  MOD_RES (596)..(596): Selenocysteine
  MOD_RES (636)..(636): Selenocysteine
  MOD_RES (658)..(658): Selenocysteine
  MOD_RES (669)..(669): Selenocysteine
  MOD_RES (689)..(690): Selenocysteine
  MOD_RES (766)..(766): Selenocysteine
  MOD_RES (784)..(784): Selenocysteine
MGLGLLLPLLLLWXRGXQGSELDPKGQHVCVASSPSAELQCCAGWRQKDQECXIPICEGPDACQKDEVCVKPGLCRCKPGFFGAHCSSRCPGQYWGPDCRESCPCHPHGQCEPAXGACQCQADRWGARCEFPCACGPHGRCDPAXGVCHCEPGWWSSXCRRPCQCNXAAARCEQAXGACVCKPGWWGRRCSFRCNCHGSPCEQDSGRCACRPGWWGPECQQQCECVRGRCSAASGECXCPPGFRGARCELPCPAGSHGVQCAHSCGRCKHNEPCSPDXGSCESCEPGWNGXQCQQPCLPGXFGESCEQQCPHCRHGEACEPDXGHCQRCDPGWLGPRCEDPCPXGXFGEDCGSXCPXCVQGSCDXVXGDCVCSAGYWGPSCNASCPAGFHGNNCSVPCECPEGLCHPVSGSCQPGSGSRDXALIAGSLVPLLLLFLGLACCACCCWAPRSDLKDRPARDGAXVSRMKLQVWGXLXSLGSXLPCRSLSSHKLPWVXVSHHDPEVPFNHSFIEPPSAGWAXDDSFSSDPESGEADEVPAYCVPPQEGMVPVAQAGSSEASLAAGAFPPPEDASXPFAIPRXSSLARAKRPSVSFAEGXKFAPQSRRSSGELSSPLRKPKRLSRGAQSGPEGREAEESXGPEEAEAPESFPAAASPGDSAXGHRRPPLGGRXVAEHVEAIEGSVQESSGPVXXIYMLAGKPRGSEGPVRSVFRHFGSFQKGQAEAKVKRAIPKPPRQALNRKKGSPGLASGSVGQSPNSAPKAGLPGAXGPMAVRPEEAVRGLGAGXESSRRAQEPVSGCGSPEQDPQKQAEEERQEEPEYENVVPISRPPEP

SEQ ID NO: 24681 - protein, 125 aa, Homo sapiens
  MOD_RES (6)..(6): Selenocysteine
MAEAKXHWLGAALSLIPLIFLISGAEAASFQRNQLLQKEPDLRLENVQKFPSPEMIRALEYIENLRQQAHKEESSPDYNPYQGVSVPLQQKENGDESHLPERDSLSEEDWMRIILEALRQAENEP

SEQ ID NO: 24682 - protein, 144 aa, Homo sapiens
  MOD_RES (6)..(6): Selenocysteine
MAEAKXHWLGAALSLIPLIFLISGAEAASFQRNQLLQKEPDLRLENVQKFPSPEMIRALEYIENLRQQAHKEESSPDYNPYQGVSVPLQQKENGDESHLPERDSLSEEDWMRIILEALRQAENEPQSAPKENKPYALNSEKNFP

SEQ ID NO: 24683 - protein, 617 aa, Homo sapiens
  MOD_RES (6)..(6): Selenocysteine
  MOD_RES (153)..(153): Selenocysteine
  MOD_RES (182)..(182): Selenocysteine
  MOD_RES (191)..(191): Selenocysteine
  MOD_RES (197)..(197): Selenocysteine
  MOD_RES (209)..(209): Selenocysteine
  MOD_RES (227)..(227): Selenocysteine
  MOD_RES (261)..(261): Selenocysteine
  MOD_RES (336)..(336): Selenocysteine
  MOD_RES (371)..(371): Selenocysteine
  MOD_RES (418)..(418): Selenocysteine
  MOD_RES (424)..(424): Selenocysteine
  MOD_RES (450)..(450): Selenocysteine
  MOD_RES (559)..(559): Selenocysteine
  MOD_RES (579)..(579): Selenocysteine
MAEAKXHWLGAALSLIPLIFLISGAEAASFQRNQLLQKEPDLRLENVQKFPSPEMIRALEYIENLRQQAHKEESSPDYNPYQGVSVPLQQKENGDESHLPERDSLSEEDWMRIILEALRQAENEPQSAPKENKPYALNSEKNFPMDMSDDYEXQQWPERKLKHMQFPPMYEENSRDNPFKRXNEIVEEQYXPQSLAXLESVFQELGKLXGPNNQKRERMDEEQKLYXDDEDDIYKANNIAYEDVVGGEDWNPVEEKIESQXQEEVRDSKENIEKNEQINDEMKRSGQLGIQEEDLRKESKDQLSDDVSKVIAYLKRLVNAAGSGRLQNGQNGERAXRLFEKPLDSQSIYQLIEISRNLQIPPEDLIEMLKXGEKPNGSVEPERELDLPVDLDDISEADLDHPDLFQNRMLSKSGYPKXPGRAGXEALPDGLSVEDILNLLGMESAANQKXSYFPNPYNQEKVLPRLPYGAGRSRSNQLPKAAWIPHVENRQMAYENLNDKDQELGEYLARMLVKYPEIINSNQVKRVPGQGSSEDDLQEEEQIEQAIKEHLNQGSSQEXDKLAPVSKRFPVGPPKNDDXPNRQYWDEDLLMKVLEYLNQEKAEKGREHIAKRAMENM

SEQ ID NO: 24684 - protein, 212 aa, Homo sapiens
  MOD_RES (8)..(8): Selenocysteine
  MOD_RES (22)..(22): Selenocysteine
  MOD_RES (31)..(31): Selenocysteine
  MOD_RES (99)..(99): Selenocysteine
  MOD_RES (125)..(125): Selenocysteine
  MOD_RES (134)..(134): Selenocysteine
  MOD_RES (137)..(137): Selenocysteine
MVSRMVSXMLSGLLFWLASGWXPAFAYSPRXPDRVSEADIQRLLHGVMEQLGIARPRVEYPAHQAMNLVGPQSIEGGAHEGLQHLGPFGNIPNIVAELXGDNIPKDFSEDQGYPDPPNPCPVGKXADDGCLENXPDXAEFSREFQLHQHLFDPEHDYPGLGKWNKKLLYEKMKGGERRKRRSVNPYLQGQRLDNVVAKKSVPHFSDEDKDPE

SEQ ID NO: 24685 - protein, 194 aa, Homo sapiens
  MOD_RES (8)..(8): Selenocysteine
  MOD_RES (22)..(22): Selenocysteine
  MOD_RES (31)..(31): Selenocysteine
  MOD_RES (99)..(99): Selenocysteine
  MOD_RES (125)..(125): Selenocysteine
  MOD_RES (134)..(134): Selenocysteine
  MOD_RES (137)..(137): Selenocysteine
MVSRMVSXMLSGLLFWLASGWXPAFAYSPRXPDRVSEADIQRLLHGVMEQLGIARPRVEYPAHQAMNLVGPQSIEGGAHEGLQHLGPFGNIPNIVAELXGDNIPKDFSEDQGYPDPPNPCPVGKXADDGCLENXPDXAEFSREFQLHQHLFDPEHDYPGLGKWSVNPYLQGQRLDNVVAKKSVPHFSDEDKDPE

SEQ ID NO: 24686 - protein, 211 aa, Homo sapiens
  MOD_RES (8)..(8): Selenocysteine
  MOD_RES (22)..(22): Selenocysteine
  MOD_RES (31)..(31): Selenocysteine
  MOD_RES (99)..(99): Selenocysteine
  MOD_RES (125)..(125): Selenocysteine
  MOD_RES (133)..(133): Selenocysteine
  MOD_RES (136)..(136): Selenocysteine
MVSRMVSXMLSGLLFWLASGWXPAFAYSPRXPDRVSEADIQRLLHGVMEQLGIARPRVEYPAHQAMNLVGPQSIEGGAHEGLQHLGPFGNIPNIVAELXGDNIPKDFSEDQGYPDPPNPCPVGKXDDGCLENXPDXAEFSREFQLHQHLFDPEHDYPGLGKWNKKLLYEKMKGGERRKRRSVNPYLQGQRLDNVVAKKSVPHFSDEDKDPE

SEQ ID NO: 24687 - protein, 193 aa, Homo sapiens
  MOD_RES (8)..(8): Selenocysteine
  MOD_RES (22)..(22): Selenocysteine
  MOD_RES (31)..(31): Selenocysteine
  MOD_RES (99)..(99): Selenocysteine
  MOD_RES (125)..(125): Selenocysteine
  MOD_RES (133)..(133): Selenocysteine
  MOD_RES (136)..(136): Selenocysteine
MVSRMVSXMLSGLLFWLASGWXPAFAYSPRXPDRVSEADIQRLLHGVMEQLGIARPRVEYPAHQAMNLVGPQSIEGGAHEGLQHLGPFGNIPNIVAELXGDNIPKDFSEDQGYPDPPNPCPVGKXDDGCLENXPDXAEFSREFQLHQHLFDPEHDYPGLGKWSVNPYLQGQRLDNVVAKKSVPHFSDEDKDPE

SEQ ID NO: 24688 - protein, 216 aa, Homo sapiens
  MOD_RES (12)..(12): Selenocysteine
  MOD_RES (21)..(21): Selenocysteine
  MOD_RES (89)..(89): Selenocysteine
  MOD_RES (115)..(115): Selenocysteine
  MOD_RES (124)..(124): Selenocysteine
  MOD_RES (127)..(127): Selenocysteine
  MOD_RES (173)..(173): Selenocysteine
SGLLFWLASGWXPAFAYSPRXPDRVSEADIQRLLHGVMEQLGIARPRVEYPAHQAMNLVGPQSIEGGAHEGLQHLGPFGNIPNIVAELXGDNIPKDFSEDQGYPDPPNPCPVGKXADDGCLENXPDXAEFSREFQLHQHLFDPEHDYPGLGKWNKKLLYEKMKGGERRKRRVXRAWLDCCGDAWSFLSGAVNRLKPSLVGKSQNPPLCSPEKHWSM

SEQ ID NO: 24689 - protein, 56 aa, Homo sapiens
  MOD_RES (3)..(3): Selenocysteine
  MOD_RES (33)..(33): Selenocysteine
MDXPSSYEAAMELFSPDQDMREAGAQLKKLVDXLPQKPRESIIKLMEKIAQSSLCN

SEQ ID NO: 24690 - protein, 91 aa, Homo sapiens
  MOD_RES (6)..(6): Selenocysteine
  MOD_RES (8)..(8): Selenocysteine
  MOD_RES (11)..(11): Selenocysteine
  MOD_RES (33)..(33): Selenocysteine
  MOD_RES (38)..(38): Selenocysteine
  MOD_RES (68)..(68): Selenocysteine
MKLAVXLXLVXLALCCSSASAEICPSFQRVIEXLLMDXPSSYEAAMELFSPDQDMREAGAQLKKLVDXLPQKPRESIIKLMEKIAQSSLCN

SEQ ID NO: 24691 - protein, 95 aa, Homo sapiens
  MOD_RES (32)..(32): Selenocysteine
  MOD_RES (73)..(73): Selenocysteine
  MOD_RES (83)..(83): Selenocysteine
MKLLMVLMLAALLLHCYADSGCKLLEDMVEKXINSDISIPEYKELLQEFIDSDAAAEAMGKFKQCFLNQSHRXLKNFGLMMHXVYDSIWCNMKSN

SEQ ID NO: 24692 - protein, 577 aa, Homo sapiens
  MOD_RES (11)..(12): Selenocysteine
  MOD_RES (14)..(14): Selenocysteine
  MOD_RES (18)..(18): Selenocysteine
  MOD_RES (23)..(23): Selenocysteine
  MOD_RES (82)..(82): Selenocysteine
  MOD_RES (127)..(127): Selenocysteine
  MOD_RES (139)..(139): Selenocysteine
  MOD_RES (167)..(167): Selenocysteine
  MOD_RES (176)..(176): Selenocysteine
  MOD_RES (192)..(192): Selenocysteine
  MOD_RES (201)..(201): Selenocysteine
  MOD_RES (203)..(203): Selenocysteine
  MOD_RES (223)..(223): Selenocysteine
  MOD_RES (226)..(226): Selenocysteine
  MOD_RES (238)..(238): Selenocysteine
  MOD_RES (260)..(260): Selenocysteine
  MOD_RES (270)..(271): Selenocysteine
  MOD_RES (273)..(273): Selenocysteine
  MOD_RES (278)..(278): Selenocysteine
  MOD_RES (280)..(280): Selenocysteine
  MOD_RES (287)..(287): Selenocysteine
  MOD_RES (297)..(297): Selenocysteine
  MOD_RES (308)..(308): Selenocysteine
  MOD_RES (349)..(349): Selenocysteine
  MOD_RES (373)..(373): Selenocysteine
  MOD_RES (383)..(383): Selenocysteine
  MOD_RES (408)..(408): Selenocysteine
  MOD_RES (410)..(410): Selenocysteine
  MOD_RES (415)..(415): Selenocysteine
  MOD_RES (431)..(431): Selenocysteine
  MOD_RES (456)..(456): Selenocysteine
  MOD_RES (461)..(461): Selenocysteine
  MOD_RES (478)..(478): Selenocysteine
  MOD_RES (511)..(511): Selenocysteine
MKLEAQDPRNXXSXCIAXVVGLXGARLRLRLDGSDNKNDFWRLVDSAEIQPIGNCEKNGGMLQPPLGFRLNASSWPMFLLKXLNGAEMAPIRIFHKEPPSPSHNFFKMGMKLEAVDRKNPHFICPAXIGEVRGSEVLVXFDGWRGAFDYWCRFDSRDIFPVGWCSLXGDNLQPPGXKVVIPKNPYPASDVNXEKPSIHSSXKXVLEHQPGQRGRKPGKKRGRXPKXLISHPISAPSKXAEPLKFPKKRGPKPGSKRKPRXLLNPPPASPXXSXPEPDXSXVPQDAAXIPSSAMQAPXVCIYLNKNGSXGPHLDKKKVQQLPDHFGPARASVVLQQAVQACIDCAYHQKXVFSFLKQGHGGEVISAVFDREQHXLNLPAVNSIXYVLRFLEKLCHNLRSDNLFGNQPFXQXHLSLXAIEYSHSHDRYLPGEXFVLGNSLARSLEPHSDSMDSASNPXNLVSXSQRHRPLLSSCGLPPSXASAVRRLCSRGSDRYLESRDASRLSGRDPSSWXVEDVMQFVREADPQLGPHADLFRKHEIDGKALLLLRSDMMMKYMGLKLGPALKLSYHIDRLKQGKF

SEQ ID NO: 24693 - protein, 599 aa, Homo sapiens
  MOD_RES (11)..(12): Selenocysteine
  MOD_RES (14)..(14): Selenocysteine
  MOD_RES (18)..(18): Selenocysteine
  MOD_RES (23)..(23): Selenocysteine
  MOD_RES (82)..(82): Selenocysteine
  MOD_RES (127)..(127): Selenocysteine
  MOD_RES (139)..(139): Selenocysteine
  MOD_RES (167)..(167): Selenocysteine
  MOD_RES (176)..(176): Selenocysteine
  MOD_RES (192)..(192): Selenocysteine
  MOD_RES (201)..(201): Selenocysteine
  MOD_RES (203)..(203): Selenocysteine
  MOD_RES (223)..(223): Selenocysteine
  MOD_RES (226)..(226): Selenocysteine
  MOD_RES (238)..(238): Selenocysteine
  MOD_RES (260)..(260): Selenocysteine
  MOD_RES (270)..(271): Selenocysteine
  MOD_RES (273)..(273): Selenocysteine
  MOD_RES (278)..(278): Selenocysteine
  MOD_RES (280)..(280): Selenocysteine
  MOD_RES (287)..(287): Selenocysteine
  MOD_RES (297)..(297): Selenocysteine
  MOD_RES (308)..(308): Selenocysteine
  MOD_RES (349)..(349): Selenocysteine
  MOD_RES (373)..(373): Selenocysteine
  MOD_RES (383)..(383): Selenocysteine
  MOD_RES (408)..(408): Selenocysteine
  MOD_RES (410)..(410): Selenocysteine
  MOD_RES (415)..(415): Selenocysteine
  MOD_RES (431)..(431): Selenocysteine
  MOD_RES (456)..(456): Selenocysteine
  MOD_RES (461)..(461): Selenocysteine
  MOD_RES (478)..(478): Selenocysteine
  MOD_RES (533)..(533): Selenocysteine
MKLEAQDPRNXXSXCIAXVVGLXGARLRLRLDGSDNKNDFWRLVDSAEIQPIGNCEKNGGMLQPPLGFRLNASSWPMFLLKXLNGAEMAPIRIFHKEPPSPSHNFFKMGMKLEAVDRKNPHFICPAXIGEVRGSEVLVXFDGWRGAFDYWCRFDSRDIFPVGWCSLXGDNLQPPGXKVVIPKNPYPASDVNXEKPSIHSSXKXVLEHQPGQRGRKPGKKRGRXPKXLISHPISAPSKXAEPLKFPKKRGPKPGSKRKPRXLLNPPPASPXXSXPEPDXSXVPQDAAXIPSSAMQAPXVCIYLNKNGSXGPHLDKKKVQQLPDHFGPARASVVLQQAVQACIDCAYHQKXVFSFLKQGHGGEVISAVFDREQHXLNLPAVNSIXYVLRFLEKLCHNLRSDNLFGNQPFXQXHLSLXAIEYSHSHDRYLPGEXFVLGNSLARSLEPHSDSMDSASNPXNLVSXSQRHRPLLSSCGLPPSXASAVRRLCSRGVLKGSNERRDMESFWKLNRSPGSDRYLESRDASRLSGRDPSSWXVEDVMQFVREADPQLGPHADLFRKHEIDGKALLLLRSDMMMKYMGLKLGPALKLSYHIDRLKQGKF

SEQ ID NO: 24694 - protein, 660 aa, Homo sapiens
  MOD_RES (29)..(29): Selenocysteine
  MOD_RES (37)..(37): Selenocysteine
  MOD_RES (52)..(52): Selenocysteine
  MOD_RES (72)..(73): Selenocysteine
  MOD_RES (75)..(75): Selenocysteine
  MOD_RES (79)..(79): Selenocysteine
  MOD_RES (84)..(84): Selenocysteine
  MOD_RES (143)..(143): Selenocysteine
  MOD_RES (188)..(188): Selenocysteine
  MOD_RES (200)..(200): Selenocysteine
  MOD_RES (228)..(228): Selenocysteine
  MOD_RES (237)..(237): Selenocysteine
  MOD_RES (253)..(253): Selenocysteine
  MOD_RES (262)..(262): Selenocysteine
  MOD_RES (264)..(264): Selenocysteine
  MOD_RES (284)..(284): Selenocysteine
  MOD_RES (287)..(287): Selenocysteine
  MOD_RES (299)..(299): Selenocysteine
  MOD_RES (321)..(321): Selenocysteine
  MOD_RES (331)..(332): Selenocysteine
  MOD_RES (334)..(334): Selenocysteine
  MOD_RES (339)..(339): Selenocysteine
  MOD_RES (341)..(341): Selenocysteine
  MOD_RES (348)..(348): Selenocysteine
  MOD_RES (358)..(358): Selenocysteine
  MOD_RES (369)..(369): Selenocysteine
  MOD_RES (410)..(410): Selenocysteine
  MOD_RES (434)..(434): Selenocysteine
  MOD_RES (444)..(444): Selenocysteine
  MOD_RES (469)..(469): Selenocysteine
  MOD_RES (471)..(471): Selenocysteine
  MOD_RES (476)..(476): Selenocysteine
  MOD_RES (492)..(492): Selenocysteine
  MOD_RES (517)..(517): Selenocysteine
  MOD_RES (522)..(522): Selenocysteine
  MOD_RES (539)..(539): Selenocysteine
  MOD_RES (594)..(594): Selenocysteine
MLVCYSVLACEILWDLPCSIMGSPLGHFXWDKYLKEXCSVPAPVHCFKQSYXPPSNEFKISMKLEAQDPRNXXSXCIAXVVGLXGARLRLRLDGSDNKNDFWRLVDSAEIQPIGNCEKNGGMLQPPLGFRLNASSWPMFLLKXLNGAEMAPIRIFHKEPPSPSHNFFKMGMKLEAVDRKNPHFICPAXIGEVRGSEVLVXFDGWRGAFDYWCRFDSRDIFPVGWCSLXGDNLQPPGXKVVIPKNPYPASDVNXEKPSIHSSXKXVLEHQPGQRGRKPGKKRGRXPKXLISHPISAPSKXAEPLKFPKKRGPKPGSKRKPRXLLNPPPASPXXSXPEPDXSXVPQDAAXIPSSAMQAPXVCIYLNKNGSXGPHLDKKKVQQLPDHFGPARASVVLQQAVQACIDCAYHQKXVFSFLKQGHGGEVISAVFDREQHXLNLPAVNSIXYVLRFLEKLCHNLRSDNLFGNQPFXQXHLSLXAIEYSHSHDRYLPGEXFVLGNSLARSLEPHSDSMDSASNPXNLVSXSQRHRPLLSSCGLPPSXASAVRRLCSRGVLKGSNERRDMESFWKLNRSPGSDRYLESRDASRLSGRDPSSWXVEDVMQFVREADPQLGPHADLFRKHEIDGKALLLLRSDMMMKYMGLKLGPALKLSYHIDRLKQGKF

SEQ ID NO: 24695 - protein, 648 aa, Homo sapiens
  MOD_RES (39)..(39): Selenocysteine
  MOD_RES (47)..(47): Selenocysteine
  MOD_RES (62)..(62): Selenocysteine
  MOD_RES (82)..(83): Selenocysteine
  MOD_RES (85)..(85): Selenocysteine
  MOD_RES (89)..(89): Selenocysteine
  MOD_RES (94)..(94): Selenocysteine
  MOD_RES (153)..(153): Selenocysteine
  MOD_RES (198)..(198): Selenocysteine
  MOD_RES (210)..(210): Selenocysteine
  MOD_RES (238)..(238): Selenocysteine
  MOD_RES (247)..(247): Selenocysteine
  MOD_RES (263)..(263): Selenocysteine
  MOD_RES (272)..(272): Selenocysteine
  MOD_RES (274)..(274): Selenocysteine
  MOD_RES (294)..(294): Selenocysteine
  MOD_RES (297)..(297): Selenocysteine
  MOD_RES (309)..(309): Selenocysteine
  MOD_RES (331)..(331): Selenocysteine
  MOD_RES (341)..(342): Selenocysteine
  MOD_RES (344)..(344): Selenocysteine
  MOD_RES (349)..(349): Selenocysteine
  MOD_RES (351)..(351): Selenocysteine
  MOD_RES (358)..(358): Selenocysteine
  MOD_RES (368)..(368): Selenocysteine
  MOD_RES (379)..(379): Selenocysteine
  MOD_RES (420)..(420): Selenocysteine
  MOD_RES (444)..(444): Selenocysteine
  MOD_RES (454)..(454): Selenocysteine
  MOD_RES (479)..(479): Selenocysteine
  MOD_RES (481)..(481): Selenocysteine
  MOD_RES (486)..(486): Selenocysteine
  MOD_RES (502)..(502): Selenocysteine
  MOD_RES (527)..(527): Selenocysteine
  MOD_RES (532)..(532): Selenocysteine
  MOD_RES (549)..(549): Selenocysteine
  MOD_RES (582)..(582): Selenocysteine
MQPNVIDWSDVRKHKYGHLSESASQYQEAADILDLGHFXWDKYLKEXCSVPAPVHCFKQSYXPPSNEFKISMKLEAQDPRNXXSXCIAXVVGLXGARLRLRLDGSDNKNDFWRLVDSAEIQPIGNCEKNGGMLQPPLGFRLNASSWPMFLLKXLNGAEMAPIRIFHKEPPSPSHNFFKMGMKLEAVDRKNPHFICPAXIGEVRGSEVLVXFDGWRGAFDYWCRFDSRDIFPVGWCSLXGDNLQPPGXKVVIPKNPYPASDVNXEKPSIHSSXKXVLEHQPGQRGRKPGKKRGRXPKXLISHPISAPSKXAEPLKFPKKRGPKPGSKRKPRXLLNPPPASPXXSXPEPDXSXVPQDAAXIPSSAMQAPXVCIYLNKNGSXGPHLDKKKVQQLPDHFGPARASVVLQQAVQACIDCAYHQKXVFSFLKQGHGGEVISAVFDREQHXLNLPAVNSIXYVLRFLEKLCHNLRSDNLFGNQPFXQXHLSLXAIEYSHSHDRYLPGEXFVLGNSLARSLEPHSDSMDSASNPXNLVSXSQRHRPLLSSCGLPPSXASAVRRLCSRGSDRYLESRDASRLSGRDPSSWXVEDVMQFVREADPQLGPHADLFRKHEIDGKALLLLRSDMMMKYMGLKLGPALKLSYHIDRLKQGKF

SEQ ID NO: 24696 - protein, 591 aa, Homo sapiens
  MOD_RES (5)..(5): Selenocysteine
  MOD_RES (25)..(26): Selenocysteine
  MOD_RES (28)..(28): Selenocysteine
  MOD_RES (32)..(32): Selenocysteine
  MOD_RES (37)..(37): Selenocysteine
  MOD_RES (96)..(96): Selenocysteine
  MOD_RES (141)..(141): Selenocysteine
  MOD_RES (153)..(153): Selenocysteine
  MOD_RES (181)..(181): Selenocysteine
  MOD_RES (190)..(190): Selenocysteine
  MOD_RES (206)..(206): Selenocysteine
  MOD_RES (215)..(215): Selenocysteine
  MOD_RES (217)..(217): Selenocysteine
  MOD_RES (237)..(237): Selenocysteine
  MOD_RES (240)..(240): Selenocysteine
  MOD_RES (252)..(252): Selenocysteine
  MOD_RES (274)..(274): Selenocysteine
  MOD_RES (284)..(285): Selenocysteine
  MOD_RES (287)..(287): Selenocysteine
  MOD_RES (292)..(292): Selenocysteine
  MOD_RES (294)..(294): Selenocysteine
  MOD_RES (301)..(301): Selenocysteine
  MOD_RES (311)..(311): Selenocysteine
  MOD_RES (322)..(322): Selenocysteine
  MOD_RES (363)..(363): Selenocysteine
  MOD_RES (387)..(387): Selenocysteine
  MOD_RES (397)..(397): Selenocysteine
  MOD_RES (422)..(422): Selenocysteine
  MOD_RES (424)..(424): Selenocysteine
  MOD_RES (429)..(429): Selenocysteine
  MOD_RES (445)..(445): Selenocysteine
  MOD_RES (470)..(470): Selenocysteine
  MOD_RES (475)..(475): Selenocysteine
  MOD_RES (492)..(492): Selenocysteine
  MOD_RES (525)..(525): Selenocysteine
MQSYXPPSNEFKISMKLEAQDPRNXXSXCIAXVVGLXGARLRLRLDGSDNKNDFWRLVDSAEIQPIGNCEKNGGMLQPPLGFRLNASSWPMFLLKXLNGAEMAPIRIFHKEPPSPSHNFFKMGMKLEAVDRKNPHFICPAXIGEVRGSEVLVXFDGWRGAFDYWCRFDSRDIFPVGWCSLXGDNLQPPGXKVVIPKNPYPASDVNXEKPSIHSSXKXVLEHQPGQRGRKPGKKRGRXPKXLISHPISAPSKXAEPLKFPKKRGPKPGSKRKPRXLLNPPPASPXXSXPEPDXSXVPQDAAXIPSSAMQAPXVCIYLNKNGSXGPHLDKKKVQQLPDHFGPARASVVLQQAVQACIDCAYHQKXVFSFLKQGHGGEVISAVFDREQHXLNLPAVNSIXYVLRFLEKLCHNLRSDNLFGNQPFXQXHLSLXAIEYSHSHDRYLPGEXFVLGNSLARSLEPHSDSMDSASNPXNLVSXSQRHRPLLSSCGLPPSXASAVRRLCSRGSDRYLESRDASRLSGRDPSSWXVEDVMQFVREADPQLGPHADLFRKHEIDGKALLLLRSDMMMKYMGLKLGPALKLSYHIDRLKQGKF

SEQ ID NO: 24697 - protein, 480 aa, Homo sapiens
  MOD_RES (5)..(5): Selenocysteine
  MOD_RES (25)..(26): Selenocysteine
  MOD_RES (28)..(28): Selenocysteine
  MOD_RES (32)..(32): Selenocysteine
  MOD_RES (37)..(37): Selenocysteine
  MOD_RES (95)..(95): Selenocysteine
  MOD_RES (104)..(104): Selenocysteine
  MOD_RES (106)..(106): Selenocysteine
  MOD_RES (126)..(126): Selenocysteine
  MOD_RES (129)..(129): Selenocysteine
  MOD_RES (141)..(141): Selenocysteine
  MOD_RES (163)..(163): Selenocysteine
  MOD_RES (173)..(174): Selenocysteine
  MOD_RES (176)..(176): Selenocysteine
  MOD_RES (181)..(181): Selenocysteine
  MOD_RES (183)..(183): Selenocysteine
  MOD_RES (190)..(190): Selenocysteine
  MOD_RES (200)..(200): Selenocysteine
  MOD_RES (211)..(211): Selenocysteine
  MOD_RES (252)..(252): Selenocysteine
  MOD_RES (276)..(276): Selenocysteine
  MOD_RES (286)..(286): Selenocysteine
  MOD_RES (311)..(311): Selenocysteine
  MOD_RES (313)..(313): Selenocysteine
  MOD_RES (318)..(318): Selenocysteine
  MOD_RES (334)..(334): Selenocysteine
  MOD_RES (359)..(359): Selenocysteine
  MOD_RES (364)..(364): Selenocysteine
  MOD_RES (381)..(381): Selenocysteine
  MOD_RES (414)..(414): Selenocysteine
MQSYXPPSNEFKISMKLEAQDPRNXXSXCIAXVVGLXGARLRLRLDGSDNKNDFWRLVDSAEIQPIGNCEKNGGMLQPPLVVIPKNPYPASDVNXEKPSIHSSXKXVLEHQPGQRGRKPGKKRGRXPKXLISHPISAPSKXAEPLKFPKKRGPKPGSKRKPRXLLNPPPASPXXSXPEPDXSXVPQDAAXIPSSAMQAPXVCIYLNKNGSXGPHLDKKKVQQLPDHFGPARASVVLQQAVQACIDCAYHQKXVFSFLKQGHGGEVISAVFDREQHXLNLPAVNSIXYVLRFLEKLCHNLRSDNLFGNQPFXQXHLSLXAIEYSHSHDRYLPGEXFVLGNSLARSLEPHSDSMDSASNPXNLVSXSQRHRPLLSSCGLPPSXASAVRRLCSRGSDRYLESRDASRLSGRDPSSWXVEDVMQFVREADPQLGPHADLFRKHEIDGKALLLLRSDMMMKYMGLKLGPALKLSYHIDRLKQGKF

SEQ ID NO: 24698 - protein, 141 aa, Homo sapiens
  MOD_RES (3)..(3): Selenocysteine
  MOD_RES (20)..(20): Selenocysteine
  MOD_RES (75)..(75): Selenocysteine
VSXSQRHRPLLSSCGLPPSXASAVRRLCSRGVLKGSNERRDMESFWKLNRSPGSDRYLESRDASRLSGRDPSSWXVEDVMQFVREADPQLGPHADLFRKHEIDGKALLLLRSDMMMKYMGLKLGPALKLSYHIDRLKQGKF

SEQ ID NO: 24699 - protein, 208 aa, Homo sapiens
  MOD_RES (9)..(9): Selenocysteine
  MOD_RES (19)..(19): Selenocysteine
  MOD_RES (57)..(57): Selenocysteine
  MOD_RES (81)..(81): Selenocysteine
  MOD_RES (101)..(101): Selenocysteine
  MOD_RES (104)..(104): Selenocysteine
  MOD_RES (115)..(115): Selenocysteine
  MOD_RES (131)..(131): Selenocysteine
  MOD_RES (136)..(136): Selenocysteine
  MOD_RES (149)..(149): Selenocysteine
  MOD_RES (175)..(175): Selenocysteine
  MOD_RES (189)..(189): Selenocysteine
MKKNEVYEXFSYPESYSPXLPVSRRENNSPSNLPRPSFCMEEYQRAELEEDPILSRXPSPVHPSDFSEHNCQPYYASDGAXYGSSSGLCLGNPRADSIHNXYSXDHASAAPPSVXRSPVENDGYIEEGSIXKHPSXWSVEAVVLFLKQXDPLALCPLVDLFRSHEIDGKALLLLXSDVLLKHLGVKLGXAVKLCYYIDRLKQGKCFEN

SEQ ID NO: 24700 - protein, 329 aa, Homo sapiens
  MOD_RES (14)..(14): Selenocysteine
  MOD_RES (18)..(18): Selenocysteine
  MOD_RES (25)..(25): Selenocysteine
  MOD_RES (32)..(32): Selenocysteine
  MOD_RES (51)..(51): Selenocysteine
  MOD_RES (57)..(57): Selenocysteine
  MOD_RES (99)..(99): Selenocysteine
  MOD_RES (130)..(130): Selenocysteine
  MOD_RES (140)..(140): Selenocysteine
  MOD_RES (178)..(178): Selenocysteine
  MOD_RES (202)..(202): Selenocysteine
  MOD_RES (222)..(222): Selenocysteine
  MOD_RES (225)..(225): Selenocysteine
  MOD_RES (236)..(236): Selenocysteine
  MOD_RES (252)..(252): Selenocysteine
  MOD_RES (257)..(257): Selenocysteine
  MOD_RES (270)..(270): Selenocysteine
  MOD_RES (296)..(296): Selenocysteine
  MOD_RES (310)..(310): Selenocysteine
MMSNSSSEIDVIKXRIPXYDEDDNXILYAYEXKPEFVNKEPNIVSDASCNXEEQLKXVDDVLIHCQVIYDALQNLDKKIDVIRRKVSKIQRFHARSLWXNHKRYGYKKHSYRLVKKLKLQKMKKNEVYEXFSYPESYSPXLPVSRRENNSPSNLPRPSFCMEEYQRAELEEDPILSRXPSPVHPSDFSEHNCQPYYASDGAXYGSSSGLCLGNPRADSIHNXYSXDHASAAPPSVXRSPVENDGYIEEGSIXKHPSXWSVEAVVLFLKQXDPLALCPLVDLFRSHEIDGKALLLLXSDVLLKHLGVKLGXAVKLCYYIDRLKQGKCFEN

SEQ ID NO: 24701 - protein, 148 aa, Homo sapiens
  MOD_RES (24)..(24): Selenocysteine
  MOD_RES (30)..(30): Selenocysteine
  MOD_RES (72)..(72): Selenocysteine
  MOD_RES (103)..(103): Selenocysteine
  MOD_RES (113)..(113): Selenocysteine
MMSNSSSEIDVQEPNIVSDASCNXEEQLKXVDDVLIHCQVIYDALQNLDKKIDVIRRKVSKIQRFHARSLWXNHKRYGYKKHSYRLVKKLKLQKMKKNEVYEXFSYPESYSPXLPVSRRENNSPSNLPRPSFCMEEYQRAELEEDPIL

SEQ ID NO: 24702 - protein, 302 aa, Homo sapiens
  MOD_RES (24)..(24): Selenocysteine
  MOD_RES (30)..(30): Selenocysteine
  MOD_RES (72)..(72): Selenocysteine
  MOD_RES (103)..(103): Selenocysteine
  MOD_RES (113)..(113): Selenocysteine
  MOD_RES (151)..(151): Selenocysteine
  MOD_RES (175)..(175): Selenocysteine
  MOD_RES (195)..(195): Selenocysteine
  MOD_RES (198)..(198): Selenocysteine
  MOD_RES (209)..(209): Selenocysteine
  MOD_RES (225)..(225): Selenocysteine
  MOD_RES (230)..(230): Selenocysteine
  MOD_RES (243)..(243): Selenocysteine
  MOD_RES (269)..(269): Selenocysteine
  MOD_RES (283)..(283): Selenocysteine
MMSNSSSEIDVQEPNIVSDASCNXEEQLKXVDDVLIHCQVIYDALQNLDKKIDVIRRKVSKIQRFHARSLWXNHKRYGYKKHSYRLVKKLKLQKMKKNEVYEXFSYPESYSPXLPVSRRENNSPSNLPRPSFCMEEYQRAELEEDPILSRXPSPVHPSDFSEHNCQPYYASDGAXYGSSSGLCLGNPRADSIHNXYSXDHASAAPPSVXRSPVENDGYIEEGSIXKHPSXWSVEAVVLFLKQXDPLALCPLVDLFRSHEIDGKALLLLXSDVLLKHLGVKLGXAVKLCYYIDRLKQGKCFEN

SEQ ID NO: 24703 - protein, 700 aa, Homo sapiens
  MOD_RES (4)..(4): Selenocysteine
  MOD_RES (20)..(20): Selenocysteine
  MOD_RES (25)..(25): Selenocysteine
  MOD_RES (42)..(42): Selenocysteine
  MOD_RES (78)..(78): Selenocysteine
  MOD_RES (84)..(84): Selenocysteine
  MOD_RES (89)..(89): Selenocysteine
  MOD_RES (120)..(120): Selenocysteine
  MOD_RES (138)..(138): Selenocysteine
  MOD_RES (148)..(148): Selenocysteine
  MOD_RES (158)..(158): Selenocysteine
  MOD_RES (193)..(193): Selenocysteine
  MOD_RES (205)..(205): Selenocysteine
  MOD_RES (233)..(233): Selenocysteine
  MOD_RES (242)..(242): Selenocysteine
  MOD_RES (253)..(253): Selenocysteine
  MOD_RES (271)..(272): Selenocysteine
  MOD_RES (277)..(277): Selenocysteine
  MOD_RES (292)..(292): Selenocysteine
  MOD_RES (305)..(305): Selenocysteine
  MOD_RES (326)..(326): Selenocysteine
  MOD_RES (335)..(335): Selenocysteine
  MOD_RES (356)..(356): Selenocysteine
  MOD_RES (406)..(406): Selenocysteine
  MOD_RES (408)..(408): Selenocysteine
  MOD_RES (424)..(424): Selenocysteine
  MOD_RES (431)..(431): Selenocysteine
  MOD_RES (474)..(474): Selenocysteine
  MOD_RES (491)..(491): Selenocysteine
  MOD_RES (496)..(496): Selenocysteine
  MOD_RES (503)..(503): Selenocysteine
  MOD_RES (517)..(517): Selenocysteine
  MOD_RES (567)..(567): Selenocysteine
  MOD_RES (580)..(581): Selenocysteine
  MOD_RES (630)..(630): Selenocysteine
  MOD_RES (643)..(643): Selenocysteine
MGQXVNEDSMDVKKENQEKXPQSSXSSVQRDDFHWEEYLKEXGSISAPSECFRQSQIPPVNDFKVGMKLEARDPRNAXSVCIAXVIGIXGARLRLRLDGSDNRNDFWRLVDSPDIQPVGXCEKEGDLLQPPLGYQMNXSSWPMFLLKXLNGSEMASAXLFKKEPPKPPLNNFKVGMKLEAIDKKNPYLICPAXIGDVKGDEVHIXFDGWSGAFDYWCKYDSRDIFPAGWCRLXGDVLQPPGXSVPIVKNIAKXESSPSEASQHSMQSPQKXXLILPXQQVRRSSRIKPPGPXAVPKRSSSVKNIXPRKKGPNSGKKEKPLPVICSXSAASLKSLXRDRGMLYKDVASGPCKIVMSXVCVYVNKHGNFGPHLDPKRIQQLPDHFGPGPVNVVLRRIVQACVDCALEXKXVFGYLKPDNRGGEVIXASFDGEXHSIQLPPVNSASFALRFLENFCHSLQCDNLLSSQPFSSSRGHXHSSAEHDKNQSAKEDVXERQSXKRSPQQXVPYVVPLSPKLPKXKEYASEGEPLFAGGSAIPKEENLSEDSKSSSLNSGNYLNPACRNPMYIHXSVSQDFSRSVPGXXSSPLVGDISPKSSPHEVKFQMQRKSEAPSYIAVPDPSVLKQGFSKDPSXWSVDEVIQFMKHXDPQISGPLADLFRQHEIDGKALFLLKSDVMMKYMGLKLGPALKLCYYIEKLKEGKYS

SEQ ID NO: 24704 - protein, 138 aa, Homo sapiens
  MOD_RES (5)..(5): Selenocysteine
  MOD_RES (18)..(19): Selenocysteine
  MOD_RES (68)..(68): Selenocysteine
  MOD_RES (81)..(81): Selenocysteine
MYIHXSVSQDFSRSVPGXXSSPLVGDISPKSSPHEVKFQMQRKSEAPSYIAVPDPSVLKQGFSKDPSXWSVDEVIQFMKHXDPQISGPLADLFRQHEIDGKALFLLKSDVMMKYMGLKLGPALKLCYYIEKLKEGKYS

SEQ ID NO: 24705 - protein, 125 aa, Homo sapiens
  MOD_RES (1)..(1): Any amino acid
  MOD_RES (7)..(7): Selenocysteine
  MOD_RES (12)..(12): Selenocysteine
  MOD_RES (19)..(19): Selenocysteine
  MOD_RES (33)..(33): Selenocysteine
  MOD_RES (83)..(83): Selenocysteine
  MOD_RES (96)..(97): Selenocysteine
XAKEDVXERQSXKRSPQQXVPYVVPLSPKLPKXKEYASEGEPLFAGGSAIPKEENLSEDSKSSSLNSGNYLNPACRNPMYIHXSVSQDFSRSVPGXXSSPLVGDISPKSSPHEVKFQMQRKSEGN

SEQ ID NO: 24706 - protein, 348 aa, Homo sapiens
  MOD_RES (89)..(89): Selenocysteine
  MOD_RES (96)..(96): Selenocysteine
  MOD_RES (120)..(120): Selenocysteine
  MOD_RES (139)..(139): Selenocysteine
  MOD_RES (170)..(170): Selenocysteine
  MOD_RES (176)..(176): Selenocysteine
  MOD_RES (199)..(199): Selenocysteine
  MOD_RES (202)..(202): Selenocysteine
  MOD_RES (212)..(212): Selenocysteine
  MOD_RES (226)..(226): Selenocysteine
  MOD_RES (243)..(243): Selenocysteine
  MOD_RES (271)..(271): Selenocysteine
  MOD_RES (297)..(297): Selenocysteine
MPRSFLVKKVKLDAFSSADLESAYGRARSDLGAPLHDKGYLSDYVGPSSVYDGDAEAALLKGPSPEPMYAAAVRGELGPAAAGSAPPPXPRPELAXAAGGYINGDAAVSEGYAADAFFIXDGRSRRKASNAGAAAAPSXASAAAPDGDAGGGGGAGGRSLGSGPGGRGGXRAGAGXEARAGPGAAGAGGRHACGECGKXYAXSSNLSRHKQXHRSLDSQLARRCPXCGKVYVSMPAMAMHLLXHDLRHKCGVCGKAFSRPWLLQGHMRSHXGEKPFGCAHCGKAFADRSNLRAHMQXHSAFKHFQCKRCKKSFALKSYLNKHYESACFKGGAGGPAAPAPPQLSPVQA

SEQ ID NO: 24707 - protein, 307 aa, Homo sapiens
  MOD_RES (24)..(24): Selenocysteine
  MOD_RES (30)..(30): Selenocysteine
  MOD_RES (103)..(103): Selenocysteine
  MOD_RES (163)..(163): Selenocysteine
  MOD_RES (166)..(166): Selenocysteine
  MOD_RES (176)..(176): Selenocysteine
  MOD_RES (190)..(190): Selenocysteine
  MOD_RES (207)..(207): Selenocysteine
  MOD_RES (235)..(235): Selenocysteine
  MOD_RES (261)..(261): Selenocysteine
  MOD_RES (301)..(301): Selenocysteine
MPRSFLVKKIKGDGFQCSGVPAPXYHPLEXAYVLPGARGPPGDNGYAPHRLPPSSYDADQKPGLELAPAEPAYPPAAPEEYSDPESPQSSLSARYFRGEAAVXDSYSMDAFFISDGRSRRRRGGGGGDAGGSGDAGGAGGRAGRAGAQAGGGHRHACAECGKXYAXSSNLSRHKQXHRSLDSQLARKCPXCGKAYVSMPALAMHLLXHNLRHKCGVCGKAFSRPWLLQGHMRSHXGEKPFGCAHCGKAFADRSNLRAHMQXHSAFKHYRCRQCDKSFALKSYLHKHCEAACAKAAEPPPPXPAGPAS

SEQ ID NO: 24708 - protein, 243 aa, Homo sapiens
  MOD_RES (27)..(27): Selenocysteine
  MOD_RES (42)..(42): Selenocysteine
  MOD_RES (50)..(50): Selenocysteine
  MOD_RES (79)..(79): Selenocysteine
  MOD_RES (84)..(84): Selenocysteine
  MOD_RES (122)..(122): Selenocysteine
  MOD_RES (133)..(133): Selenocysteine
  MOD_RES (140)..(140): Selenocysteine
  MOD_RES (172)..(172): Selenocysteine
  MOD_RES (198)..(198): Selenocysteine
  MOD_RES (231)..(231): Selenocysteine
MPVIPALWEAEVRGSLEPKSSRPAWAXWVFSPCSIMLEFPEXMGFSKNQXGALPRLCDVLQVLWEEQDQCLQELSREQXGDLGXEQPVPGCEGMWDNISCWPSSVPGRMVEVECPRFLRMLXSRNGSLFRNCXQDGWSEXFPRPNLACGVNVNDSSNEKRHSYLLKLKVMYXVGYSSSLVMLLVALGILCAFRRLHCXRNYIHMHLFVSFILRALSNFIKDAVLFSSDDVXYCDAHRAGCKLV

SEQ ID NO: 24709 - protein, 440 aa, Homo sapiens
  MOD_RES (25)..(25): Selenocysteine
  MOD_RES (54)..(54): Selenocysteine
  MOD_RES (59)..(59): Selenocysteine
  MOD_RES (97)..(97): Selenocysteine
  MOD_RES (108)..(108): Selenocysteine
  MOD_RES (115)..(115): Selenocysteine
  MOD_RES (147)..(147): Selenocysteine
  MOD_RES (173)..(173): Selenocysteine
  MOD_RES (206)..(206): Selenocysteine
  MOD_RES (242)..(242): Selenocysteine
  MOD_RES (326)..(326): Selenocysteine
  MOD_RES (329)..(329): Selenocysteine
  MOD_RES (344)..(344): Selenocysteine
  MOD_RES (423)..(423): Selenocysteine
  MOD_RES (434)..(434): Selenocysteine
  MOD_RES (437)..(437): Selenocysteine
MRPHLSPPLQQLLLPVLLACAAHSXGALPRLCDVLQVLWEEQDQCLQELSREQXGDLGXEQPVPGCEGMWDNISCWPSSVPGRMVEVECPRFLRMLXSRNGSLFRNCXQDGWSEXFPRPNLACGVNVNDSSNEKRHSYLLKLKVMYXVGYSSSLVMLLVALGILCAFRRLHCXRNYIHMHLFVSFILRALSNFIKDAVLFSSDDVXYCDAHRAGCKLVMVLFQYCIMANYSWLLVEGLYLHXLLAISFFSERKYLQGFVAFGWGSPAIFVALWAIARHFLEDVGCWDINANASIWWIIRGPVILSILINFILFINILRILMRKLRXQEXRGNEVSHYKRLARSXLLLIPLFGIHYIVFAFSPEDAMEIQLFFELALGSFQGLVVAVLYCFLNGEVQLEVQKKWQQWHLREFPLHPVASFSNSXKASHLEQSQGXCRXSII

SEQ ID NO: 24710 - protein, 150 aa, Homo sapiens
  MOD_RES (29)..(29): Selenocysteine
  MOD_RES (40)..(40): Selenocysteine
  MOD_RES (47)..(47): Selenocysteine
  MOD_RES (79)..(79): Selenocysteine
  MOD_RES (105)..(105): Selenocysteine
  MOD_RES (138)..(138): Selenocysteine
MWDNISCWPSSVPGRMVEVECPRFLRMLXSRNGSLFRNCXQDGWSEXFPRPNLACGVNVNDSSNEKRHSYLLKLKVMYXVGYSSSLVMLLVALGILCAFRRLHCXRNYIHMHLFVSFILRALSNFIKDAVLFSSDDVXYCDAHRAGCKLV

SEQ ID NO: 24711 - protein, 347 aa, Homo sapiens
  MOD_RES (18)..(18): Selenocysteine
  MOD_RES (41)..(41): Selenocysteine
  MOD_RES (53)..(53): Selenocysteine
  MOD_RES (101)..(101): Selenocysteine
  MOD_RES (155)..(155): Selenocysteine
  MOD_RES (180)..(180): Selenocysteine
  MOD_RES (203)..(203): Selenocysteine
  MOD_RES (205)..(205): Selenocysteine
  MOD_RES (220)..(220): Selenocysteine
  MOD_RES (222)..(222): Selenocysteine
  MOD_RES (225)..(225): Selenocysteine
  MOD_RES (240)..(240): Selenocysteine
  MOD_RES (257)..(257): Selenocysteine
  MOD_RES (274)..(274): Selenocysteine
  MOD_RES (285)..(285): Selenocysteine
  MOD_RES (289)..(289): Selenocysteine
  MOD_RES (291)..(291): Selenocysteine
  MOD_RES (302)..(302): Selenocysteine
  MOD_RES (309)..(309): Selenocysteine
MGAAAVRWHLCVLLALGXRGRLAGGSGLPGSVDVDECSEGXDDCHIDAICQNXPKSYKCLCKPGYKGEGKQCEDIDECENDYYNGGCVHECINIPGNYRCXCFDGFMLAHDGHNCLDVDECQDNNGGCQQICVNAMGSYECQCHSGFFLSDNQHXCIHRSNEGMNCMNKDHGCAHICREXPKGGVACDCRPGFDLAQNQKDCXLXCNYGNGGCQHSCEDXDXGPXCGCHQKYALHSDGRXCIEKDEAAIERSQFNAXSVADVDKRVKRRLLMEXCAVNNGGCDRXCKDXAXGVRCSCPVGFXLQPDGKXCKGQHVELCGCPCLYWPGQEPPCACIAGPRAGLNGGHV

SEQ ID NO: 24712 - protein, 363 aa, Homo sapiens
  MOD_RES (18)..(18): Selenocysteine
  MOD_RES (41)..(41): Selenocysteine
  MOD_RES (53)..(53): Selenocysteine
  MOD_RES (101)..(101): Selenocysteine
  MOD_RES (155)..(155): Selenocysteine
  MOD_RES (180)..(180): Selenocysteine
  MOD_RES (203)..(203): Selenocysteine
  MOD_RES (205)..(205): Selenocysteine
  MOD_RES (220)..(220): Selenocysteine
  MOD_RES (222)..(222): Selenocysteine
  MOD_RES (225)..(225): Selenocysteine
  MOD_RES (240)..(240): Selenocysteine
  MOD_RES (244)..(244): Selenocysteine
  MOD_RES (255)..(255): Selenocysteine
  MOD_RES (259)..(259): Selenocysteine
  MOD_RES (261)..(261): Selenocysteine
  MOD_RES (272)..(272): Selenocysteine
  MOD_RES (279)..(279): Selenocysteine
  MOD_RES (300)..(300): Selenocysteine
  MOD_RES (316)..(316): Selenocysteine
  MOD_RES (320)..(320): Selenocysteine
  MOD_RES (332)..(332): Selenocysteine
MGAAAVRWHLCVLLALGXRGRLAGGSGLPGSVDVDECSEGXDDCHIDAICQNXPKSYKCLCKPGYKGEGKQCEDIDECENDYYNGGCVHECINIPGNYRCXCFDGFMLAHDGHNCLDVDECQDNNGGCQQICVNAMGSYECQCHSGFFLSDNQHXCIHRSNEGMNCMNKDHGCAHICREXPKGGVACDCRPGFDLAQNQKDCXLXCNYGNGGCQHSCEDXDXGPXCGCHQKYALHSDGRXCIEXCAVNNGGCDRXCKDXAXGVRCSCPVGFXLQPDGKXCKDINECLVNNGGCDHFCRNXVGSFECGCRKGYKLLXDERXCQDIDECSFERXCDHICINSPGSFQCLIKLLRSKVSRFLRPYK

SEQ ID NO: 24713 - protein, 988 aa, Homo sapiens
  MOD_RES (18)..(18): Selenocysteine
  MOD_RES (41)..(41): Selenocysteine
  MOD_RES (53)..(53): Selenocysteine
  MOD_RES (101)..(101): Selenocysteine
  MOD_RES (155)..(155): Selenocysteine
  MOD_RES (180)..(180): Selenocysteine
  MOD_RES (203)..(203): Selenocysteine
  MOD_RES (205)..(205): Selenocysteine
  MOD_RES (220)..(220): Selenocysteine
  MOD_RES (222)..(222): Selenocysteine
  MOD_RES (225)..(225): Selenocysteine
  MOD_RES (240)..(240): Selenocysteine
  MOD_RES (244)..(244): Selenocysteine
  MOD_RES (255)..(255): Selenocysteine
  MOD_RES (259)..(259): Selenocysteine
  MOD_RES (261)..(261): Selenocysteine
  MOD_RES (272)..(272): Selenocysteine
  MOD_RES (279)..(279): Selenocysteine
  MOD_RES (300)..(300): Selenocysteine
  MOD_RES (316)..(316): Selenocysteine
  MOD_RES (320)..(320): Selenocysteine
  MOD_RES (332)..(332): Selenocysteine
  MOD_RES (357)..(358): Selenocysteine
  MOD_RES (380)..(380): Selenocysteine
  MOD_RES (404)..(404): Selenocysteine
  MOD_RES (413)..(413): Selenocysteine
  MOD_RES (438)..(438): Selenocysteine
  MOD_RES (468)..(468): Selenocysteine
  MOD_RES (481)..(482): Selenocysteine
  MOD_RES (510)..(510): Selenocysteine
  MOD_RES (522)..(522): Selenocysteine
  MOD_RES (525)..(525): Selenocysteine
  MOD_RES (549)..(549): Selenocysteine
  MOD_RES (556)..(556): Selenocysteine
  MOD_RES (564)..(564): Selenocysteine
  MOD_RES (584)..(584): Selenocysteine
  MOD_RES (601)..(601): Selenocysteine
  MOD_RES (637)..(637): Selenocysteine
  MOD_RES (653)..(653): Selenocysteine
  MOD_RES (664)..(664): Selenocysteine
  MOD_RES (707)..(707): Selenocysteine
  MOD_RES (715)..(715): Selenocysteine
  MOD_RES (726)..(726): Selenocysteine
  MOD_RES (731)..(732): Selenocysteine
  MOD_RES (751)..(753): Selenocysteine
  MOD_RES (763)..(763): Selenocysteine
  MOD_RES (775)..(775): Selenocysteine
  MOD_RES (780)..(780): Selenocysteine
  MOD_RES (782)..(782): Selenocysteine
  MOD_RES (788)..(788): Selenocysteine
  MOD_RES (791)..(791): Selenocysteine
  MOD_RES (806)..(806): Selenocysteine
  MOD_RES (864)..(864): Selenocysteine
  MOD_RES (867)..(868): Selenocysteine
  MOD_RES (871)..(871): Selenocysteine
  MOD_RES (874)..(874): Selenocysteine
  MOD_RES (882)..(882): Selenocysteine
  MOD_RES (909)..(909): Selenocysteine
  MOD_RES (960)..(960): Selenocysteine
MGAAAVRWHLCVLLALGXRGRLAGGSGLPGSVDVDECSEGXDDCHIDAICQNXPKSYKCLCKPGYKGEGKQCEDIDECENDYYNGGCVHECINIPGNYRCXCFDGFMLAHDGHNCLDVDECQDNNGGCQQICVNAMGSYECQCHSGFFLSDNQHXCIHRSNEGMNCMNKDHGCAHICREXPKGGVACDCRPGFDLAQNQKDCXLXCNYGNGGCQHSCEDXDXGPXCGCHQKYALHSDGRXCIEXCAVNNGGCDRXCKDXAXGVRCSCPVGFXLQPDGKXCKDINECLVNNGGCDHFCRNXVGSFECGCRKGYKLLXDERXCQDIDECSFERXCDHICINSPGSFQCLCHRGYILYGXXHCGDVDECSMSNGSCDQGCVNXKGSYECVCPPGRRLHWNGKDCVEXGKCLSRAKXSPRAQLSCSKAGGVESCFLSCPAHXLFVPDSENSYVLSCGVPGPQGKALQKRNGXSSGLGPSCSDAPXXPIKQKARFKIRDAKCHLRPHSQARAKEXARQPLLDHCHVXFVXLKCDSSKKRRRGRKSPSKEVSHIXAEFEIEXKMEEASDXCEADCLRKRAEQSLQAAIKXLRKSIGRQQFYVQVSGXEYEVAQRPAKALEGQGACGAGQVLQDSKCVACGPGXHFGGELGQCVSCMPGXYQDMEGQLSCXPCPSSDGLGLPGARNVSECGGQCSPGFFSADGFKPCQACPVGXYQPEPGRXGCFPCGGGLLXKHEGXXSFQDCEAKVHCSPGHHYNXXXHRCIRCPVGXYQPEFGQNHCIXCPGNXSXDFDGSXNVXHCKNQHCGGELGDYXGYIESPNYPGDYPANAECVWHIAPPPKRRILIVVPEIFLPIEDECGDVLVMRKSASPXSIXXYEXCQXYERPIAFXSRSRKLWIQFKSNEGNSGKGFQVPYVXYDEDYQQLIEDIVRDGRLYASENHQEILKDKKLIKALFDVLAHPQNYFKYXAQESKEMFPRSFIKLLRSKVSRFLRPYK

SEQ ID NO: 24714 - protein, 175 aa, Homo sapiens
  MOD_RES (1)..(1): Any amino acid
  MOD_RES (4)..(4): Selenocysteine
  MOD_RES (27)..(27): Selenocysteine
  MOD_RES (29)..(29): Selenocysteine
  MOD_RES (44)..(44): Selenocysteine
  MOD_RES (46)..(46): Selenocysteine
  MOD_RES (49)..(49): Selenocysteine
  MOD_RES (64)..(64): Selenocysteine
  MOD_RES (81)..(81): Selenocysteine
  MOD_RES (98)..(98): Selenocysteine
  MOD_RES (109)..(109): Selenocysteine
  MOD_RES (113)..(113): Selenocysteine
  MOD_RES (115)..(115): Selenocysteine
  MOD_RES (126)..(126): Selenocysteine
  MOD_RES (133)..(133): Selenocysteine
  MOD_RES (154)..(154): Selenocysteine
  MOD_RES (170)..(170): Selenocysteine
  MOD_RES (174)..(174): Selenocysteine
XREXPKGGVACDCRPGFDLAQNQKDCXLXCNYGNGGCQHSCEDXDXGPXCGCHQKYALHSDGRXCIEKDEAAIERSQFNAXSVADVDKRVKRRLLMEXCAVNNGGCDRXCKDXAXGVRCSCPVGFXLQPDGKXCKDINECLVNNGGCDHFCRNXVGSFECGCRKGYKLLXDERXC

SEQ ID NO: 24715 - protein, 807 aa, Homo sapiens
  MOD_RES (65)..(65): Selenocysteine
  MOD_RES (67)..(67): Selenocysteine
  MOD_RES (112)..(112): Selenocysteine
  MOD_RES (142)..(142): Selenocysteine
  MOD_RES (166)..(166): Selenocysteine
  MOD_RES (216)..(216): Selenocysteine
  MOD_RES (231)..(231): Selenocysteine
  MOD_RES (247)..(247): Selenocysteine
  MOD_RES (258)..(258): Selenocysteine
  MOD_RES (263)..(263): Selenocysteine
  MOD_RES (267)..(268): Selenocysteine
  MOD_RES (285)..(285): Selenocysteine
  MOD_RES (296)..(296): Selenocysteine
  MOD_RES (300)..(300): Selenocysteine
  MOD_RES (302)..(302): Selenocysteine
  MOD_RES (313)..(313): Selenocysteine
  MOD_RES (320)..(320): Selenocysteine
  MOD_RES (329)..(329): Selenocysteine
  MOD_RES (357)..(357): Selenocysteine
  MOD_RES (373)..(373): Selenocysteine
  MOD_RES (384)..(384): Selenocysteine
  MOD_RES (394)..(394): Selenocysteine
  MOD_RES (399)..(399): Selenocysteine
  MOD_RES (404)..(404): Selenocysteine
  MOD_RES (421)..(421): Selenocysteine
  MOD_RES (455)..(455): Selenocysteine
  MOD_RES (465)..(465): Selenocysteine
  MOD_RES (493)..(493): Selenocysteine
  MOD_RES (519)..(519): Selenocysteine
  MOD_RES (535)..(535): Selenocysteine
  MOD_RES (544)..(544): Selenocysteine
  MOD_RES (559)..(559): Selenocysteine
  MOD_RES (592)..(592): Selenocysteine
  MOD_RES (600)..(600): Selenocysteine
  MOD_RES (611)..(611): Selenocysteine
  MOD_RES (617)..(617): Selenocysteine
  MOD_RES (624)..(624): Selenocysteine
  MOD_RES (636)..(638): Selenocysteine
  MOD_RES (648)..(648): Selenocysteine
  MOD_RES (665)..(667): Selenocysteine
  MOD_RES (673)..(673): Selenocysteine
  MOD_RES (676)..(676): Selenocysteine
  MOD_RES (680)..(680): Selenocysteine
  MOD_RES (686)..(687): Selenocysteine
  MOD_RES (690)..(690): Selenocysteine
  MOD_RES (693)..(693): Selenocysteine
  MOD_RES (701)..(701): Selenocysteine
  MOD_RES (728)..(728): Selenocysteine
  MOD_RES (779)..(779): Selenocysteine
MGVAGRNRPGAAWAVLLLLLLLPPLLLLAGAVPPGRGRAAGPQEDVDECAQGLDDCHADALCQNXPXSYKCSCKPGYQGEGRQCEDIDECGNELNGGCVHDCLNIPGNYRCXCFDGFMLAHDGHNCLDVDECLENNGGCQHXCVNVMGSYECCCKEGFFLSDNQHXCIHRSEEGLSCMNKDHGCSHICKEAPRGSVACECRPGFELAKNQRDCILXCNHGNGGCQHSCDDXADGPECSCHPQYKMHXDGRSCLEREDXVLEVXESNXXSVVDGDKRVKRRLLMEXCAVNNGGCDRXCKDXSXGVHCSCPVGFXLQLDGKXCKDIDECQXRNGGCDHFCKNIVGSFDCGCKKGFKLLXDEKSCQDVDECSLDRXCDHSCINHPGXFACACNRGYXLYGFXHCGDXNECSINNGGCQQVCVNXVGSYECQCHPGYKLHWNKKDCVASCDLSCIVKRXEKRLRKAIRXLRKAVHREQFHLQLSGMNLDVAKKPPRXSERQAESCGVGQGHAENQCVSCRAGXYYDGARERCILCPNGXFQNEEGQMXCEPCPRPGNSGALKXPEAWNMSECGGLCQPGEYSADGFAPCQLCALGXFQPEAGRXSCFPCGGGLAXKHQGAXSFQDCEXRVQCSPGHFYNXXXHRCIRCPVGXYQPEFGKNNCVSCPGNXXXDFDGSXNIXQCKXSSNSVXXYEXCQXYERPIAFXSRSKKLWIQFKSNEGNSARGFQVPYVXYDEDYQELIEDIVRDGRLYASENHQEILKDKKLIKALFDVLAHPQNYFKYXAQESREMFPRSFIRLLRSKVSRFLRPYK

SEQ ID NO: 24716 - protein, 971 aa, Homo sapiens
  MOD_RES (65)..(65): Selenocysteine
  MOD_RES (67)..(67): Selenocysteine
  MOD_RES (112)..(112): Selenocysteine
  MOD_RES (142)..(142): Selenocysteine
  MOD_RES (166)..(166): Selenocysteine
  MOD_RES (216)..(216): Selenocysteine
  MOD_RES (231)..(231): Selenocysteine
  MOD_RES (247)..(247): Selenocysteine
  MOD_RES (258)..(258): Selenocysteine
  MOD_RES (263)..(263): Selenocysteine
  MOD_RES (267)..(268): Selenocysteine
  MOD_RES (285)..(285): Selenocysteine
  MOD_RES (296)..(296): Selenocysteine
  MOD_RES (300)..(300): Selenocysteine
  MOD_RES (302)..(302): Selenocysteine
  MOD_RES (313)..(313): Selenocysteine
  MOD_RES (320)..(320): Selenocysteine
  MOD_RES (329)..(329): Selenocysteine
  MOD_RES (357)..(357): Selenocysteine
  MOD_RES (373)..(373): Selenocysteine
  MOD_RES (384)..(384): Selenocysteine
  MOD_RES (394)..(394): Selenocysteine
  MOD_RES (399)..(399): Selenocysteine
  MOD_RES (404)..(404): Selenocysteine
  MOD_RES (421)..(421): Selenocysteine
  MOD_RES (451)..(451): Selenocysteine
  MOD_RES (491)..(491): Selenocysteine
  MOD_RES (514)..(515): Selenocysteine
  MOD_RES (518)..(518): Selenocysteine
  MOD_RES (521)..(521): Selenocysteine
  MOD_RES (562)..(562): Selenocysteine
  MOD_RES (578)..(578): Selenocysteine
  MOD_RES (585)..(585): Selenocysteine
  MOD_RES (592)..(592): Selenocysteine
  MOD_RES (598)..(598): Selenocysteine
  MOD_RES (610)..(610): Selenocysteine
  MOD_RES (620)..(620): Selenocysteine
  MOD_RES (648)..(648): Selenocysteine
  MOD_RES (690)..(690): Selenocysteine
  MOD_RES (698)..(698): Selenocysteine
  MOD_RES (709)..(709): Selenocysteine
  MOD_RES (715)..(715): Selenocysteine
  MOD_RES (722)..(722): Selenocysteine
  MOD_RES (734)..(736): Selenocysteine
  MOD_RES (746)..(746): Selenocysteine
  MOD_RES (763)..(765): Selenocysteine
  MOD_RES (771)..(771): Selenocysteine
  MOD_RES (774)..(774): Selenocysteine
  MOD_RES (789)..(789): Selenocysteine
  MOD_RES (805)..(805): Selenocysteine
  MOD_RES (808)..(808): Selenocysteine
  MOD_RES (810)..(810): Selenocysteine
  MOD_RES (843)..(843): Selenocysteine
  MOD_RES (850)..(851): Selenocysteine
  MOD_RES (854)..(854): Selenocysteine
  MOD_RES (857)..(857): Selenocysteine
  MOD_RES (865)..(865): Selenocysteine
  MOD_RES (892)..(892): Selenocysteine
  MOD_RES (943)..(943): Selenocysteine
MGVAGRNRPGAAWAVLLLLLLLPPLLLLAGAVPPGRGRAAGPQEDVDECAQGLDDCHADALCQNXPXSYKCSCKPGYQGEGRQCEDIDECGNELNGGCVHDCLNIPGNYRCXCFDGFMLAHDGHNCLDVDECLENNGGCQHXCVNVMGSYECCCKEGFFLSDNQHXCIHRSEEGLSCMNKDHGCSHICKEAPRGSVACECRPGFELAKNQRDCILXCNHGNGGCQHSCDDXADGPECSCHPQYKMHXDGRSCLEREDXVLEVXESNXXSVVDGDKRVKRRLLMEXCAVNNGGCDRXCKDXSXGVHCSCPVGFXLQLDGKXCKDIDECQXRNGGCDHFCKNIVGSFDCGCKKGFKLLXDEKSCQDVDECSLDRXCDHSCINHPGXFACACNRGYXLYGFXHCGDXNECSINNGGCQQVCVNXVGSYECQCHPGYKLHWNKKDCVEVKGLLPXSVSPRVSLHCGKSGGGDGCFLRCHSGIHLSSGLQGAYSVXCGSSSPLRNKQQKSNDSAFGDVXXIRXSVXFKLNEGKCSLKNAELFPEGLRPALPEKHSSVKESFRYVNLXCSSGKQVPGAPGRPSXPKEMFIXVEFELEXNQKEVXASCDLSCIVKRXEKRLRKAIRXLRKAVHREQFHLQLSGMNLDVAKKPPRXSERQAESCGVGQGHAENQCGLCQPGEYSADGFAPCQLCALGXFQPEAGRXSCFPCGGGLAXKHQGAXSFQDCEXRVQCSPGHFYNXXXHRCIRCPVGXYQPEFGKNNCVSCPGNXXXDFDGSXNIXQCKNRRCGGELGDFXGYIESPNYPGNYPANXECXWXINPPPKRRILIVVPEIFLPIEDDCGDYLVMRKXSSSNSVXXYEXCQXYERPIAFXSRSKKLWIQFKSNEGNSARGFQVPYVXYDEDYQELIEDIVRDGRLYASENHQEILKDKKLIKALFDVLAHPQNYFKYXAQESREMFPRSFIRLLRSKVSRFLRPYK

SEQ ID NO: 24717 - protein, 999 aa, Homo sapiens
  MOD_RES (65)..(65): Selenocysteine
  MOD_RES (67)..(67): Selenocysteine
  MOD_RES (112)..(112): Selenocysteine
  MOD_RES (142)..(142): Selenocysteine
  MOD_RES (166)..(166): Selenocysteine
  MOD_RES (216)..(216): Selenocysteine
  MOD_RES (231)..(231): Selenocysteine
  MOD_RES (247)..(247): Selenocysteine
  MOD_RES (258)..(258): Selenocysteine
  MOD_RES (263)..(263): Selenocysteine
  MOD_RES (267)..(268): Selenocysteine
  MOD_RES (285)..(285): Selenocysteine
  MOD_RES (296)..(296): Selenocysteine
  MOD_RES (300)..(300): Selenocysteine
  MOD_RES (302)..(302): Selenocysteine
  MOD_RES (313)..(313): Selenocysteine
  MOD_RES (320)..(320): Selenocysteine
  MOD_RES (329)..(329): Selenocysteine
  MOD_RES (357)..(357): Selenocysteine
  MOD_RES (373)..(373): Selenocysteine
  MOD_RES (384)..(384): Selenocysteine
  MOD_RES (394)..(394): Selenocysteine
  MOD_RES (399)..(399): Selenocysteine
  MOD_RES (404)..(404): Selenocysteine
  MOD_RES (421)..(421): Selenocysteine
  MOD_RES (451)..(451): Selenocysteine
  MOD_RES (485)..(486): Selenocysteine
  MOD_RES (489)..(489): Selenocysteine
  MOD_RES (492)..(492): Selenocysteine
  MOD_RES (533)..(533): Selenocysteine
  MOD_RES (549)..(549): Selenocysteine
  MOD_RES (556)..(556): Selenocysteine
  MOD_RES (563)..(563): Selenocysteine
  MOD_RES (569)..(569): Selenocysteine
  MOD_RES (581)..(581): Selenocysteine
  MOD_RES (591)..(591): Selenocysteine
  MOD_RES (619)..(619): Selenocysteine
  MOD_RES (645)..(645): Selenocysteine
  MOD_RES (661)..(661): Selenocysteine
  MOD_RES (670)..(670): Selenocysteine
  MOD_RES (685)..(685): Selenocysteine
  MOD_RES (718)..(718): Selenocysteine
  MOD_RES (726)..(726): Selenocysteine
  MOD_RES (737)..(737): Selenocysteine
  MOD_RES (743)..(743): Selenocysteine
  MOD_RES (750)..(750): Selenocysteine
  MOD_RES (762)..(764): Selenocysteine
  MOD_RES (774)..(774): Selenocysteine
  MOD_RES (791)..(793): Selenocysteine
  MOD_RES (799)..(799): Selenocysteine
  MOD_RES (802)..(802): Selenocysteine
  MOD_RES (817)..(817): Selenocysteine
  MOD_RES (833)..(833): Selenocysteine
  MOD_RES (836)..(836): Selenocysteine
  MOD_RES (838)..(838): Selenocysteine
  MOD_RES (871)..(871): Selenocysteine
  MOD_RES (878)..(879): Selenocysteine
  MOD_RES (882)..(882): Selenocysteine
  MOD_RES (885)..(885): Selenocysteine
  MOD_RES (893)..(893): Selenocysteine
  MOD_RES (920)..(920): Selenocysteine
  MOD_RES (971)..(971): Selenocysteine
MGVAGRNRPGAAWAVLLLLLLLPPLLLLAGAVPPGRGRAAGPQEDVDECAQGLDDCHADALCQNXPXSYKCSCKPGYQGEGRQCEDIDECGNELNGGCVHDCLNIPGNYRCXCFDGFMLAHDGHNCLDVDECLENNGGCQHXCVNVMGSYECCCKEGFFLSDNQHXCIHRSEEGLSCMNKDHGCSHICKEAPRGSVACECRPGFELAKNQRDCILXCNHGNGGCQHSCDDXADGPECSCHPQYKMHXDGRSCLEREDXVLEVXESNXXSVVDGDKRVKRRLLMEXCAVNNGGCDRXCKDXSXGVHCSCPVGFXLQLDGKXCKDIDECQXRNGGCDHFCKNIVGSFDCGCKKGFKLLXDEKSCQDVDECSLDRXCDHSCINHPGXFACACNRGYXLYGFXHCGDXNECSINNGGCQQVCVNXVGSYECQCHPGYKLHWNKKDCVEVKGLLPXSVSPRVSLHCGKSGGGDGCFLRCHSGIHLSSDVXXIRXSVXFKLNEGKCSLKNAELFPEGLRPALPEKHSSVKESFRYVNLXCSSGKQVPGAPGRPSXPKEMFIXVEFELEXNQKEVXASCDLSCIVKRXEKRLRKAIRXLRKAVHREQFHLQLSGMNLDVAKKPPRXSERQAESCGVGQGHAENQCVSCRAGXYYDGARERCILCPNGXFQNEEGQMXCEPCPRPGNSGALKXPEAWNMSECGGLCQPGEYSADGFAPCQLCALGXFQPEAGRXSCFPCGGGLAXKHQGAXSFQDCEXRVQCSPGHFYNXXXHRCIRCPVGXYQPEFGKNNCVSCPGNXXXDFDGSXNIXQCKNRRCGGELGDFXGYIESPNYPGNYPANXECXWXINPPPKRRILIVVPEIFLPIEDDCGDYLVMRKXSSSNSVXXYEXCQXYERPIAFXSRSKKLWIQFKSNEGNSARGFQVPYVXYDEDYQELIEDIVRDGRLYASENHQEILKDKKLIKALFDVLAHPQNYFKYXAQESREMFPRSFIRLLRSKVSRFLRPYK

SEQ ID NO: 24718 - protein, 172 aa, Homo sapiens
  MOD_RES (1)..(1): Any amino acid
  MOD_RES (12)..(12): Selenocysteine
  MOD_RES (23)..(23): Selenocysteine
  MOD_RES (28)..(28): Selenocysteine
  MOD_RES (32)..(33): Selenocysteine
  MOD_RES (50)..(50): Selenocysteine
  MOD_RES (61)..(61): Selenocysteine
  MOD_RES (65)..(65): Selenocysteine
  MOD_RES (67)..(67): Selenocysteine
  MOD_RES (78)..(78): Selenocysteine
  MOD_RES (85)..(85): Selenocysteine
  MOD_RES (94)..(94): Selenocysteine
  MOD_RES (122)..(122): Selenocysteine
  MOD_RES (138)..(138): Selenocysteine
  MOD_RES (149)..(149): Selenocysteine
  MOD_RES (159)..(159): Selenocysteine
  MOD_RES (164)..(164): Selenocysteine
XCSCHPQYKMHXDGRSCLEREDXVLEVXESNXXSVVDGDKRVKRRLLMEXCAVNNGGCDRXCKDXSXGVHCSCPVGFXLQLDGKXCKDIDECQXRNGGCDHFCKNIVGSFDCGCKKGFKLLXDEKSCQDVDECSLDRXCDHSCINHPGXFACACNRGYXLYGFXHCGEVKGL

SEQ ID NO: 24719 - protein, 112 aa, Homo sapiens
  MOD_RES (1)..(1): Any amino acid
  MOD_RES (5)..(5): Selenocysteine
  MOD_RES (21)..(21): Selenocysteine
  MOD_RES (24)..(24): Selenocysteine
  MOD_RES (26)..(26): Selenocysteine
  MOD_RES (59)..(59): Selenocysteine
  MOD_RES (66)..(67): Selenocysteine
  MOD_RES (70)..(70): Selenocysteine
  MOD_RES (73)..(73): Selenocysteine
  MOD_RES (81)..(81): Selenocysteine
  MOD_RES (108)..(108): Selenocysteine
XGDFXGYIESPNYPGNYPANXECXWXINPPPKRRILIVVPEIFLPIEDDCGDYLVMRKXSSSNSVXXYEXCQXYERPIAFXSRSKKLWIQFKSNEGNSARGFQVPYVXYDDA

SEQ ID NO: 24720 - protein, 192 aa, Homo sapiens
  MOD_RES (1)..(1): Any amino acid
  MOD_RES (9)..(9): Selenocysteine
  MOD_RES (20)..(20): Selenocysteine
  MOD_RES (24)..(24): Selenocysteine
  MOD_RES (26)..(26): Selenocysteine
  MOD_RES (37)..(37): Selenocysteine
  MOD_RES (44)..(44): Selenocysteine
  MOD_RES (53)..(53): Selenocysteine
  MOD_RES (81)..(81): Selenocysteine
  MOD_RES (97)..(97): Selenocysteine
  MOD_RES (108)..(108): Selenocysteine
  MOD_RES (118)..(118): Selenocysteine
  MOD_RES (123)..(123): Selenocysteine
  MOD_RES (128)..(128): Selenocysteine
  MOD_RES (145)..(145): Selenocysteine
  MOD_RES (174)..(174): Selenocysteine
XKRRLLMEXCAVNNGGCDRXCKDXSXGVHCSCPVGFXLQLDGKXCKDIDECQXRNGGCDHFCKNIVGSFDCGCKKGFKLLXDEKSCQDVDECSLDRXCDHSCINHPGXFACACNRGYXLYGFXHCGDXNECSINNGGCQQVCVNXVGSYECQCHPGYKLHWNKKDCVVKGLLPXSVSPRVSLHCGKSGGGDG

SEQ ID NO: 24721 - protein, 119 aa, Homo sapiens
  MOD_RES (1)..(1): Any amino acid
  MOD_RES (16)..(16): Selenocysteine
  MOD_RES (19)..(19): Selenocysteine
  MOD_RES (21)..(21): Selenocysteine
  MOD_RES (54)..(54): Selenocysteine
  MOD_RES (61)..(62): Selenocysteine
  MOD_RES (65)..(65): Selenocysteine
  MOD_RES (68)..(68): Selenocysteine
  MOD_RES (76)..(76): Selenocysteine
  MOD_RES (103)..(103): Selenocysteine
XYIESPNYPGNYPANXECXWXINPPPKRRILIVVPEIFLPIEDDCGDYLVMRKXSSSNSVXXYEXCQXYERPIAFXSRSKKLWIQFKSNEGNSARGFQVPYVXYDGKHSLQHMERASLL

SEQ ID NO: 24722 - protein, 993 aa, Homo sapiens
  MOD_RES (37)..(37): Selenocysteine
  MOD_RES (49)..(49): Selenocysteine
  MOD_RES (62)..(62): Selenocysteine
  MOD_RES (96)..(96): Selenocysteine
  MOD_RES (150)..(150): Selenocysteine
  MOD_RES (175)..(175): Selenocysteine
  MOD_RES (191)..(191): Selenocysteine
  MOD_RES (200)..(200): Selenocysteine
  MOD_RES (211)..(211): Selenocysteine
  MOD_RES (215)..(215): Selenocysteine
  MOD_RES (231)..(231): Selenocysteine
  MOD_RES (235)..(235): Selenocysteine
  MOD_RES (239)..(239): Selenocysteine
  MOD_RES (256)..(256): Selenocysteine
  MOD_RES (261)..(261): Selenocysteine
  MOD_RES (274)..(274): Selenocysteine
  MOD_RES (295)..(295): Selenocysteine
  MOD_RES (327)..(327): Selenocysteine
  MOD_RES (335)..(335): Selenocysteine
  MOD_RES (353)..(353): Selenocysteine
  MOD_RES (375)..(375): Selenocysteine
  MOD_RES (382)..(382): Selenocysteine
  MOD_RES (398)..(398): Selenocysteine
  MOD_RES (424)..(424): Selenocysteine
  MOD_RES (428)..(428): Selenocysteine
  MOD_RES (444)..(444): Selenocysteine
  MOD_RES (449)..(449): Selenocysteine
  MOD_RES (466)..(466): Selenocysteine
  MOD_RES (502)..(502): Selenocysteine
  MOD_RES (509)..(509): Selenocysteine
  MOD_RES (522)..(522): Selenocysteine
  MOD_RES (541)..(541): Selenocysteine
  MOD_RES (548)..(548): Selenocysteine
  MOD_RES (551)..(551): Selenocysteine
  MOD_RES (563)..(564): Selenocysteine
  MOD_RES (634)..(634): Selenocysteine
  MOD_RES (643)..(643): Selenocysteine
  MOD_RES (649)..(649): Selenocysteine
  MOD_RES (659)..(659): Selenocysteine
  MOD_RES (684)..(684): Selenocysteine
  MOD_RES (687)..(688): Selenocysteine
  MOD_RES (713)..(713): Selenocysteine
  MOD_RES (721)..(721): Selenocysteine
  MOD_RES (731)..(732): Selenocysteine
  MOD_RES (745)..(745): Selenocysteine
  MOD_RES (757)..(757): Selenocysteine
  MOD_RES (786)..(786): Selenocysteine
  MOD_RES (788)..(788): Selenocysteine
  MOD_RES (794)..(794): Selenocysteine
  MOD_RES (812)..(812): Selenocysteine
  MOD_RES (873)..(874): Selenocysteine
  MOD_RES (877)..(877): Selenocysteine
  MOD_RES (880)..(880): Selenocysteine
  MOD_RES (888)..(888): Selenocysteine
  MOD_RES (900)..(900): Selenocysteine
  MOD_RES (915)..(915): Selenocysteine
  MOD_RES (966)..(966): Selenocysteine
MGSGRVPGLCLLVLLVHARAAQYSKAAQDVDECVEGXDNCHIDAICQNXPRSYKCICKSGYXGDGKHCKDVDECEREDNAGCVHDCVNIPGNYRCXCYDGFHLAHDGHNCLDVDECAEGNGGCQQSCVNMMGSYECHCREGFFLSDNQHXCIQRPEEGMNCMNKNHGCAHICREXPKGGIACECRPGFELXKNQRDCKLXCNYGNGGCQHXCDDXEQGPRCGCHIKFVLHXDGKXCIEXCAVNNGGCDSKCHDAAXGVHCXCPVGFMLQPDRKXCKDIDECRLNNGGCDHICRNXVGSFECSCKKGYKLLINERNCQDIDECSFDRXCDHICVNXPGSFQCLCHRGYLLYGIXHCGDVDECSINRGGCRFGCINXPGSYQCXCPAGQGRLHWNGKDCXEPLKCQGSPGASKAMLSCNRSGKKDXCALXCPSRARFLPESENGFXVSCGXPSPRAAPARAGHNGNSXNSNHCHEAAVLSIKQRASFKIKDAKCRLHLRNKGKXEEAGRIXGPGGAPCSECQVXFIHLKCDSSRKGKGRRARXPPGKEVXRLXLELEAEVRAEEXXASCGLPCLRQRMERRLKGSLKMLRKSINQDRFLLRLAGLDYELAHKPGLVAGERAEPMESCRPGQHRAGXKCVSCPQGXYYHGQXEQCVPCPAGXFQEREGQLSCDLCPGSDAHGPLGAXNVXXCAGQCPPGQHSVDGFKPCQPCPRGXYQPEAGRXLCFPCGGGLXXKHEGAISFQDCDXKVQCSPGHYYNXSIHRCIRCAMGSYQPDFRQNFCSRCPGNXSXDFDGSXSVAQCKNRQCGGELGEFXGYIESPNYPGNYPAGVECIWNINPPPKRKILIVVPEIFLPSEDECGDVLVMRKNSSPSSIXXYEXCQXYERPIAFXARSRKLWINFKXSEANSARGFQIPYVXYDEDYEQLVEDIVRDGRLYASENHQEILKDKKLIKAFFEVLAHPQNYFKYXEKHKEMLPKSFIKLLRSKVSSFLRPYK

SEQ ID NO: 24723 - protein, 201 aa, Homo sapiens
  MOD_RES (5)..(5): Selenocysteine
  MOD_RES (79)..(79): Selenocysteine
  MOD_RES (88)..(88): Selenocysteine
  MOD_RES (93)..(93): Selenocysteine
  MOD_RES (96)..(96): Selenocysteine
  MOD_RES (100)..(100): Selenocysteine
  MOD_RES (104)..(104): Selenocysteine
  MOD_RES (116)..(116): Selenocysteine
  MOD_RES (173)..(173): Selenocysteine
  MOD_RES (180)..(180): Selenocysteine
  MOD_RES (197)..(197): Selenocysteine
MSFAXLRPAPPGRYLYPEVSPLSEDEDRGSDSSGSDEKPCRVHAARCGLQGARRRAGGRRAGGGGPGGRPGREPRQRHXANARERDRXNSVNXAFXALRXLIPXEPADRKLSKIEXLRLASSYISHLGNVLLAGEACGDGQPCHSGPAFFHAARAGSPPPPPPPPPARDGENXQPKQICXFCLSNQRKLSKDRDRKXAIRS

SEQ ID NO: 24724 - protein, 681 aa, Homo sapiens
  MOD_RES (11)..(11): Selenocysteine
  MOD_RES (13)..(13): Selenocysteine
  MOD_RES (16)..(16): Selenocysteine
  MOD_RES (20)..(20): Selenocysteine
  MOD_RES (29)..(29): Selenocysteine
  MOD_RES (53)..(53): Selenocysteine
  MOD_RES (57)..(57): Selenocysteine
  MOD_RES (94)..(94): Selenocysteine
  MOD_RES (103)..(103): Selenocysteine
  MOD_RES (119)..(119): Selenocysteine
  MOD_RES (154)..(154): Selenocysteine
  MOD_RES (180)..(180): Selenocysteine
  MOD_RES (204)..(204): Selenocysteine
  MOD_RES (245)..(245): Selenocysteine
  MOD_RES (254)..(254): Selenocysteine
  MOD_RES (294)..(294): Selenocysteine
  MOD_RES (311)..(311): Selenocysteine
  MOD_RES (313)..(313): Selenocysteine
  MOD_RES (322)..(322): Selenocysteine
  MOD_RES (334)..(334): Selenocysteine
  MOD_RES (340)..(340): Selenocysteine
  MOD_RES (377)..(377): Selenocysteine
  MOD_RES (401)..(401): Selenocysteine
  MOD_RES (438)..(438): Selenocysteine
  MOD_RES (440)..(440): Selenocysteine
  MOD_RES (474)..(474): Selenocysteine
  MOD_RES (499)..(499): Selenocysteine
  MOD_RES (553)..(553): Selenocysteine
  MOD_RES (555)..(555): Selenocysteine
  MOD_RES (562)..(562): Selenocysteine
  MOD_RES (608)..(608): Selenocysteine
  MOD_RES (638)..(638): Selenocysteine
  MOD_RES (658)..(658): Selenocysteine
  MOD_RES (679)..(679): Selenocysteine
MESMLNKLKSXVXKVXADVXSAVMGNPVXREFDVGRHIASGGNGLAWKIFNGXKKSXKQEVAVFVFDKKLIDKYQKFEKDQIIDSLKRGVQQLXRLRHPRLLXVQHPLEESRDCLAFCXEPVFASLANVLGNWENLPSPISPDIKDYKLYDVEXKYGLLQVSEGLSFLHSSVKMVHGNIXPENIILNKSGAWKIMGFDFCVSSXNPSEQEPKFPCKEWDPNLPSLCLPNPEYLAPEYILSVSCEXASDMYSLGXVMYAVFNKGKPIFEVNKQDIYKSFSRQLDQLSRLGSSSLXNIPEEVREHVKLLLNVXPXVRPDADQMXKIPFFDDVGAVXLQYFDXLFQRDNLQKSQFFKGLPKVLPKLPKRVIVQRILPCLXSEFVNPDMVPFVLPNVLLIAEECXKEEYVKLILPELGPVFKQQEPIQILLIFLQKMDLLLXKXPPDEIKNSVLPMVYRALEAPSIQIQELCLNIIPXFANLIDYPSMKNALIPRIKNACLQXSSLAVRVNSLVCLGKILEYLDKWFVLDDILPFLQQIPSKEPAVLMGILGIYKCXFXHKKLGIXKEQLAGKVLPHLIPLSIENNLNLNQFNSFISVIKEMLNRLESEHKXKLEQLHIMQEQQKSLDIGNQMNVSEEMKVXNIGNQQIDKVFNNIGADLLXGSESENKEDGLQNKHKRASLXLE

SEQ ID NO: 24725 - protein, 929 aa, Homo sapiens
  MOD_RES (11)..(11): Selenocysteine
  MOD_RES (13)..(13): Selenocysteine
  MOD_RES (16)..(16): Selenocysteine
  MOD_RES (20)..(20): Selenocysteine
  MOD_RES (29)..(29): Selenocysteine
  MOD_RES (53)..(53): Selenocysteine
  MOD_RES (57)..(57): Selenocysteine
  MOD_RES (94)..(94): Selenocysteine
  MOD_RES (103)..(103): Selenocysteine
  MOD_RES (119)..(119): Selenocysteine
  MOD_RES (154)..(154): Selenocysteine
  MOD_RES (180)..(180): Selenocysteine
  MOD_RES (204)..(204): Selenocysteine
  MOD_RES (245)..(245): Selenocysteine
  MOD_RES (254)..(254): Selenocysteine
  MOD_RES (294)..(294): Selenocysteine
  MOD_RES (311)..(311): Selenocysteine
  MOD_RES (313)..(313): Selenocysteine
  MOD_RES (322)..(322): Selenocysteine
  MOD_RES (334)..(334): Selenocysteine
  MOD_RES (340)..(340): Selenocysteine
  MOD_RES (377)..(377): Selenocysteine
  MOD_RES (401)..(401): Selenocysteine
  MOD_RES (438)..(438): Selenocysteine
  MOD_RES (440)..(440): Selenocysteine
  MOD_RES (474)..(474): Selenocysteine
  MOD_RES (499)..(499): Selenocysteine
  MOD_RES (553)..(553): Selenocysteine
  MOD_RES (555)..(555): Selenocysteine
  MOD_RES (562)..(562): Selenocysteine
  MOD_RES (608)..(608): Selenocysteine
  MOD_RES (638)..(638): Selenocysteine
  MOD_RES (658)..(658): Selenocysteine
  MOD_RES (679)..(679): Selenocysteine
  MOD_RES (708)..(708): Selenocysteine
  MOD_RES (712)..(712): Selenocysteine
  MOD_RES (716)..(716): Selenocysteine
  MOD_RES (720)..(720): Selenocysteine
  MOD_RES (722)..(722): Selenocysteine
  MOD_RES (731)..(731): Selenocysteine
  MOD_RES (737)..(737): Selenocysteine
  MOD_RES (745)..(745): Selenocysteine
  MOD_RES (747)..(747): Selenocysteine
  MOD_RES (760)..(760): Selenocysteine
  MOD_RES (762)..(762): Selenocysteine
  MOD_RES (765)..(765): Selenocysteine
  MOD_RES (770)..(770): Selenocysteine
  MOD_RES (781)..(781): Selenocysteine
  MOD_RES (790)..(790): Selenocysteine
  MOD_RES (800)..(800): Selenocysteine
  MOD_RES (804)..(804): Selenocysteine
  MOD_RES (807)..(807): Selenocysteine
  MOD_RES (810)..(810): Selenocysteine
  MOD_RES (813)..(813): Selenocysteine
  MOD_RES (830)..(830): Selenocysteine
  MOD_RES (835)..(835): Selenocysteine
  MOD_RES (876)..(876): Selenocysteine
  MOD_RES (884)..(884): Selenocysteine
  MOD_RES (912)..(913): Selenocysteine
  MOD_RES (915)..(915): Selenocysteine
MESMLNKLKSXVXKVXADVXSAVMGNPVXREFDVGRHIASGGNGLAWKIFNGXKKSXKQEVAVFVFDKKLIDKYQKFEKDQIIDSLKRGVQQLXRLRHPRLLXVQHPLEESRDCLAFCXEPVFASLANVLGNWENLPSPISPDIKDYKLYDVEXKYGLLQVSEGLSFLHSSVKMVHGNIXPENIILNKSGAWKIMGFDFCVSSXNPSEQEPKFPCKEWDPNLPSLCLPNPEYLAPEYILSVSCEXASDMYSLGXVMYAVFNKGKPIFEVNKQDIYKSFSRQLDQLSRLGSSSLXNIPEEVREHVKLLLNVXPXVRPDADQMXKIPFFDDVGAVXLQYFDXLFQRDNLQKSQFFKGLPKVLPKLPKRVIVQRILPCLXSEFVNPDMVPFVLPNVLLIAEECXKEEYVKLILPELGPVFKQQEPIQILLIFLQKMDLLLXKXPPDEIKNSVLPMVYRALEAPSIQIQELCLNIIPXFANLIDYPSMKNALIPRIKNACLQXSSLAVRVNSLVCLGKILEYLDKWFVLDDILPFLQQIPSKEPAVLMGILGIYKCXFXHKKLGIXKEQLAGKVLPHLIPLSIENNLNLNQFNSFISVIKEMLNRLESEHKXKLEQLHIMQEQQKSLDIGNQMNVSEEMKVXNIGNQQIDKVFNNIGADLLXGSESENKEDGLQNKHKRASLXLEEKQKLAKEQEQAQKLKSQQPLKPQVHXPVAXVKQXKDLXDXLMDNMSSLXSLSVSXPKSSASSXFXSVPSMGIGMMFSXPXDNXKRNLXNGLNANMGFQXSGFNMPVNXNQNFYSSPSXVGVXKMXLGXPPXLPNFNALSVPPAGAKQXQQRPXDMSALNNLFGPQKPKVSMNQLSQQKPNQWLNQFVPPQGSPXMGSSVMGXQMNVIGQSAFGMQGNPFFNPQNFAQPPXXMXNSSSASNDLKDLFG

SEQ ID NO: 24726 - protein, 933 aa, Homo sapiens
  MOD_RES (11)..(11): Selenocysteine
  MOD_RES (13)..(13): Selenocysteine
  MOD_RES (16)..(16): Selenocysteine
  MOD_RES (20)..(20): Selenocysteine
  MOD_RES (29)..(29): Selenocysteine
  MOD_RES (53)..(53): Selenocysteine
  MOD_RES (57)..(57): Selenocysteine
  MOD_RES (94)..(94): Selenocysteine
  MOD_RES (103)..(103): Selenocysteine
  MOD_RES (119)..(119): Selenocysteine
  MOD_RES (154)..(154): Selenocysteine
  MOD_RES (180)..(180): Selenocysteine
  MOD_RES (204)..(204): Selenocysteine
  MOD_RES (245)..(245): Selenocysteine
  MOD_RES (254)..(254): Selenocysteine
  MOD_RES (294)..(294): Selenocysteine
  MOD_RES (311)..(311): Selenocysteine
  MOD_RES (313)..(313): Selenocysteine
  MOD_RES (322)..(322): Selenocysteine
  MOD_RES (334)..(334): Selenocysteine
  MOD_RES (340)..(340): Selenocysteine
  MOD_RES (377)..(377): Selenocysteine
  MOD_RES (401)..(401): Selenocysteine
  MOD_RES (442)..(442): Selenocysteine
  MOD_RES (444)..(444): Selenocysteine
  MOD_RES (478)..(478): Selenocysteine
  MOD_RES (503)..(503): Selenocysteine
  MOD_RES (557)..(557): Selenocysteine
  MOD_RES (559)..(559): Selenocysteine
  MOD_RES (566)..(566): Selenocysteine
  MOD_RES (612)..(612): Selenocysteine
  MOD_RES (642)..(642): Selenocysteine
  MOD_RES (662)..(662): Selenocysteine
  MOD_RES (683)..(683): Selenocysteine
  MOD_RES (712)..(712): Selenocysteine
  MOD_RES (716)..(716): Selenocysteine
  MOD_RES (720)..(720): Selenocysteine
  MOD_RES (724)..(724): Selenocysteine
  MOD_RES (726)..(726): Selenocysteine
  MOD_RES (735)..(735): Selenocysteine
  MOD_RES (741)..(741): Selenocysteine
  MOD_RES (749)..(749): Selenocysteine
  MOD_RES (751)..(751): Selenocysteine
  MOD_RES (764)..(764): Selenocysteine
  MOD_RES (766)..(766): Selenocysteine
  MOD_RES (769)..(769): Selenocysteine
  MOD_RES (774)..(774): Selenocysteine
  MOD_RES (785)..(785): Selenocysteine
  MOD_RES (794)..(794): Selenocysteine
  MOD_RES (804)..(804): Selenocysteine
  MOD_RES (808)..(808): Selenocysteine
  MOD_RES (811)..(811): Selenocysteine
  MOD_RES (814)..(814): Selenocysteine
  MOD_RES (817)..(817): Selenocysteine
  MOD_RES (834)..(834): Selenocysteine
  MOD_RES (839)..(839): Selenocysteine
  MOD_RES (880)..(880): Selenocysteine
  MOD_RES (888)..(888): Selenocysteine
  MOD_RES (916)..(917): Selenocysteine
  MOD_RES (919)..(919): Selenocysteine
MESMLNKLKSXVXKVXADVXSAVMGNPVXREFDVGRHIASGGNGLAWKIFNGXKKSXKQEVAVFVFDKKLIDKYQKFEKDQIIDSLKRGVQQLXRLRHPRLLXVQHPLEESRDCLAFCXEPVFASLANVLGNWENLPSPISPDIKDYKLYDVEXKYGLLQVSEGLSFLHSSVKMVHGNIXPENIILNKSGAWKIMGFDFCVSSXNPSEQEPKFPCKEWDPNLPSLCLPNPEYLAPEYILSVSCEXASDMYSLGXVMYAVFNKGKPIFEVNKQDIYKSFSRQLDQLSRLGSSSLXNIPEEVREHVKLLLNVXPXVRPDADQMXKIPFFDDVGAVXLQYFDXLFQRDNLQKSQFFKGLPKVLPKLPKRVIVQRILPCLXSEFVNPDMVPFVLPNVLLIAEECXKEEYVKLILPELGPVFKQQEPIQASNMILLIFLQKMDLLLXKXPPDEIKNSVLPMVYRALEAPSIQIQELCLNIIPXFANLIDYPSMKNALIPRIKNACLQXSSLAVRVNSLVCLGKILEYLDKWFVLDDILPFLQQIPSKEPAVLMGILGIYKCXFXHKKLGIXKEQLAGKVLPHLIPLSIENNLNLNQFNSFISVIKEMLNRLESEHKXKLEQLHIMQEQQKSLDIGNQMNVSEEMKVXNIGNQQIDKVFNNIGADLLXGSESENKEDGLQNKHKRASLXLEEKQKLAKEQEQAQKLKSQQPLKPQVHXPVAXVKQXKDLXDXLMDNMSSLXSLSVSXPKSSASSXFXSVPSMGIGMMFSXPXDNXKRNLXNGLNANMGFQXSGFNMPVNXNQNFYSSPSXVGVXKMXLGXPPXLPNFNALSVPPAGAKQXQQRPXDMSALNNLFGPQKPKVSMNQLSQQKPNQWLNQFVPPQGSPXMGSSVMGXQMNVIGQSAFGMQGNPFFNPQNFAQPPXXMXNSSSASNDLKDLFG

SEQ ID NO: 24727 - protein, 76 aa, Homo sapiens
  MOD_RES (7)..(7): Selenocysteine
  MOD_RES (31)..(31): Selenocysteine
  MOD_RES (72)..(72): Selenocysteine
MVHGNIXPENIILNKSGAWKIMGFDFCVSSXNPSEQEPKFPCKEWDPNLPSLCLPNPEYLAPEYILSVSCEXASDM

SEQ ID NO: 24728 - protein, 114 aa, Homo sapiens
  MOD_RES (12)..(12): Selenocysteine
  MOD_RES (36)..(36): Selenocysteine
  MOD_RES (73)..(73): Selenocysteine
  MOD_RES (75)..(75): Selenocysteine
RVIVQRILPCLXSEFVNPDMVPFVLPNVLLIAEECXKEEYVKLILPELGPVFKQQEPIQILLIFLQKMDLLLXKXPPDEIKNSVLPMVYRALEAPSIQIQICLLKGEGMLPLSK

SEQ ID NO: 24729 - protein, 60 aa, Homo sapiens
  MOD_RES (1)..(1): Any amino acid
  MOD_RES (10)..(10): Selenocysteine
XRIKNACLQXSSLAVRVNSLVCLGKILEYLDKWFVLDDILPFLQQIPSKEPAVLMGILGN

SEQ ID NO: 24730 - protein, 310 aa, Homo sapiens
  MOD_RES (27)..(27): Selenocysteine
  MOD_RES (56)..(56): Selenocysteine
  MOD_RES (61)..(61): Selenocysteine
  MOD_RES (64)..(64): Selenocysteine
  MOD_RES (68)..(68): Selenocysteine
  MOD_RES (72)..(72): Selenocysteine
  MOD_RES (76)..(76): Selenocysteine
  MOD_RES (81)..(81): Selenocysteine
  MOD_RES (86)..(86): Selenocysteine
  MOD_RES (90)..(90): Selenocysteine
  MOD_RES (92)..(92): Selenocysteine
  MOD_RES (115)..(115): Selenocysteine
  MOD_RES (122)..(122): Selenocysteine
  MOD_RES (128)..(129): Selenocysteine
  MOD_RES (133)..(134): Selenocysteine
  MOD_RES (139)..(141): Selenocysteine
  MOD_RES (143)..(144): Selenocysteine
  MOD_RES (150)..(150): Selenocysteine
  MOD_RES (164)..(164): Selenocysteine
  MOD_RES (166)..(166): Selenocysteine
  MOD_RES (177)..(177): Selenocysteine
  MOD_RES (180)..(180): Selenocysteine
  MOD_RES (188)..(188): Selenocysteine
  MOD_RES (212)..(212): Selenocysteine
  MOD_RES (215)..(215): Selenocysteine
  MOD_RES (220)..(220): Selenocysteine
  MOD_RES (240)..(240): Selenocysteine
  MOD_RES (303)..(303): Selenocysteine
MRRAALWLWLCALALSLQPALPQIVAXNLPPEDQDGSGDDSDNFSGSGAGALQDIXLSQQXPSXWKDXQLLXAIPXSPEPXGLEAXAASXSXLPAGEGPKEGEAVVLPEVEPGLXAREQEAXPRPREXXQLPXXHLASXXXAXXAQEPAXSHPHRDMQPGHHEXSXPAGPSQADLHXPHXEDGGPSAXERAAEDGASSQLPAAEGSGEQDFXFEXSGENXAVVAVEPDRRNQSPVDQGAXGASQGLLDRKEVLGGVIAGGLVGLIFAVCLVGFMLYRMKKKDEGSYSLEEPKQANGGAYQKPXKQEEFYA

SEQ ID NO: 24731 - protein, 169 aa, Homo sapiens
  MOD_RES (27)..(27): Selenocysteine
  MOD_RES (56)..(56): Selenocysteine
  MOD_RES (61)..(61): Selenocysteine
  MOD_RES (64)..(64): Selenocysteine
  MOD_RES (68)..(68): Selenocysteine
  MOD_RES (72)..(72): Selenocysteine
  MOD_RES (76)..(76): Selenocysteine
  MOD_RES (81)..(81): Selenocysteine
  MOD_RES (86)..(86): Selenocysteine
  MOD_RES (90)..(90): Selenocysteine
  MOD_RES (92)..(92): Selenocysteine
  MOD_RES (115)..(115): Selenocysteine
  MOD_RES (122)..(122): Selenocysteine
  MOD_RES (128)..(129): Selenocysteine
  MOD_RES (133)..(134): Selenocysteine
  MOD_RES (139)..(141): Selenocysteine
  MOD_RES (143)..(144): Selenocysteine
  MOD_RES (150)..(150): Selenocysteine
MRRAALWLWLCALALSLQPALPQIVAXNLPPEDQDGSGDDSDNFSGSGAGALQDIXLSQQXPSXWKDXQLLXAIPXSPEPXGLEAXAASXSXLPAGEGPKEGEAVVLPEVEPGLXAREQEAXPRPREXXQLPXXHLASXXXAXXAQEPAXSHPHRDMQPVHFVSWGGLI

SEQ ID NO: 24732 - protein, 28 aa, Homo sapiens
MRRAALWLWLCALALSLQPALPSLSHGR

SEQ ID NO: 24733 - protein, 215 aa, Homo sapiens
  MOD_RES (35)..(35): Selenocysteine
  MOD_RES (64)..(64): Selenocysteine
  MOD_RES (69)..(69): Selenocysteine
  MOD_RES (72)..(72): Selenocysteine
  MOD_RES (76)..(76): Selenocysteine
  MOD_RES (80)..(80): Selenocysteine
  MOD_RES (84)..(84): Selenocysteine
  MOD_RES (89)..(89): Selenocysteine
  MOD_RES (94)..(94): Selenocysteine
  MOD_RES (98)..(98): Selenocysteine
  MOD_RES (100)..(100): Selenocysteine
  MOD_RES (123)..(123): Selenocysteine
  MOD_RES (130)..(130): Selenocysteine
  MOD_RES (136)..(137): Selenocysteine
  MOD_RES (141)..(142): Selenocysteine
  MOD_RES (147)..(149): Selenocysteine
  MOD_RES (151)..(152): Selenocysteine
  MOD_RES (158)..(158): Selenocysteine
  MOD_RES (172)..(172): Selenocysteine
  MOD_RES (174)..(174): Selenocysteine
  MOD_RES (185)..(185): Selenocysteine
  MOD_RES (188)..(188): Selenocysteine
  MOD_RES (196)..(196): Selenocysteine
PRWPGEPGQGCVGGAGERLQGPRACRGRLEQIVAXNLPPEDQDGSGDDSDNFSGSGAGALQDIXLSQQXPSXWKDXQLLXAIPXSPEPXGLEAXAASXSXLPAGEGPKEGEAVVLPEVEPGLXAREQEAXPRPREXXQLPXXHLASXXXAXXAQEPAXSHPHRDMQPGHHEXSXPAGPSQADLHXPHXEDGGPSAXERAAEDGASSQLPAAEGSG

SEQ ID NO: 24734 - protein, 201 aa, Homo sapiens
  MOD_RES (9)..(9): Selenocysteine
  MOD_RES (25)..(25): Selenocysteine
  MOD_RES (69)..(70): Selenocysteine
  MOD_RES (80)..(80): Selenocysteine
  MOD_RES (88)..(90): Selenocysteine
  MOD_RES (101)..(101): Selenocysteine
  MOD_RES (107)..(107): Selenocysteine
  MOD_RES (128)..(128): Selenocysteine
  MOD_RES (132)..(132): Selenocysteine
  MOD_RES (143)..(143): Selenocysteine
  MOD_RES (196)..(196): Selenocysteine
MRRAWILLXLGLVACVSAESRAELXSDKDMYLDNSSIEEASGVYPIDDDDYASASGSGADEDVESPELXXSRPLPKILLXSAAPKVEXXXLNIQNKIPAQXKSPEEXDKEKVHLSDSERKMDPAEEDXNVYXEKHSDSLFKRXEVLAAVIAGGVIGFLFAIFLILLLVYRMRKKDEGSYDLGERKPSSAAYQKAPXKEFYA

SEQ ID NO: 24735 - protein, 165 aa, Homo sapiens
  MOD_RES (9)..(9): Selenocysteine
  MOD_RES (33)..(34): Selenocysteine
  MOD_RES (44)..(44): Selenocysteine
  MOD_RES (52)..(54): Selenocysteine
  MOD_RES (65)..(65): Selenocysteine
  MOD_RES (71)..(71): Selenocysteine
  MOD_RES (92)..(92): Selenocysteine
  MOD_RES (96)..(96): Selenocysteine
  MOD_RES (107)..(107): Selenocysteine
  MOD_RES (160)..(160): Selenocysteine
MRRAWILLXLGLVACVSAESVRADEDVESPELXXSRPLPKILLXSAAPKVEXXXLNIQNKIPAQXKSPEEXDKEKVHLSDSERKMDPAEEDXNVYXEKHSDSLFKRXEVLAAVIAGGVIGFLFAIFLILLLVYRMRKKDEGSYDLGERKPSSAAYQKAPXKEFYA

SEQ ID NO: 24736 - protein, 137 aa, Homo sapiens
  MOD_RES (40)..(41): Selenocysteine
  MOD_RES (51)..(51): Selenocysteine
  MOD_RES (59)..(61): Selenocysteine
  MOD_RES (72)..(72): Selenocysteine
  MOD_RES (78)..(78): Selenocysteine
  MOD_RES (99)..(99): Selenocysteine
  MOD_RES (103)..(103): Selenocysteine
  MOD_RES (114)..(114): Selenocysteine
MYLDNSSIEEASGVYPIDDDDYASASGSGADEDVESPELXXSRPLPKILLXSAAPKVEXXXLNIQNKIPAQXKSPEEXDKEKVHLSDSERKMDPAEEDXNVYXEKHSDSLFKRXEVLAAVIAGGVIGFLFAIFLILL

SEQ ID NO: 24737 - protein, 145 aa, Homo sapiens
  MOD_RES (40)..(41): Selenocysteine
  MOD_RES (51)..(51): Selenocysteine
  MOD_RES (59)..(61): Selenocysteine
  MOD_RES (72)..(72): Selenocysteine
  MOD_RES (78)..(78): Selenocysteine
  MOD_RES (99)..(99): Selenocysteine
  MOD_RES (103)..(103): Selenocysteine
  MOD_RES (114)..(114): Selenocysteine
MYLDNSSIEEASGVYPIDDDDYASASGSGADEDVESPELXXSRPLPKILLXSAAPKVEXXXLNIQNKIPAQXKSPEEXDKEKVHLSDSERKMDPAEEDXNVYXEKHSDSLFKRXEVLAAVIAGGVIGFLFAIFLILLLVYRMRKK

SEQ ID NO: 24738 - protein, 172 aa, Homo sapiens
  MOD_RES (40)..(41): Selenocysteine
  MOD_RES (51)..(51): Selenocysteine
  MOD_RES (59)..(61): Selenocysteine
  MOD_RES (72)..(72): Selenocysteine
  MOD_RES (78)..(78): Selenocysteine
  MOD_RES (99)..(99): Selenocysteine
  MOD_RES (103)..(103): Selenocysteine
  MOD_RES (114)..(114): Selenocysteine
  MOD_RES (167)..(167): Selenocysteine
MYLDNSSIEEASGVYPIDDDDYASASGSGADEDVESPELXXSRPLPKILLXSAAPKVEXXXLNIQNKIPAQXKSPEEXDKEKVHLSDSERKMDPAEEDXNVYXEKHSDSLFKRXEVLAAVIAGGVIGFLFAIFLILLLVYRMRKKDEGSYDLGERKPSSAAYQKAPXKEFYA

SEQ ID NO: 24739 - protein, 198 aa, Homo sapiens
  MOD_RES (24)..(24): Selenocysteine
  MOD_RES (101)..(101): Selenocysteine
  MOD_RES (134)..(134): Selenocysteine
  MOD_RES (144)..(144): Selenocysteine
  MOD_RES (193)..(193): Selenocysteine
MAPARLFALLLFFVGGVAESIREXEVIDPQDLLEGRYFSGALPDDEDVVGPGQESDDFELSGSGDLDDLEDSMIGPEVVHPLVPLDNHIPERAGSGSQVPXEPKKLEENEVIPKRISPVEESEDVSNKVSMSSXVQGSNIFERXEVLAALIVGGIVGILFAVFLILLLMYRMKKKDEGSYDLGKKPIYKKAPXNEFYA

SEQ ID NO: 24740 - protein, 318 aa, Homo sapiens
  MOD_RES (6)..(6): Selenocysteine
  MOD_RES (41)..(41): Selenocysteine
  MOD_RES (117)..(117): Selenocysteine
  MOD_RES (207)..(207): Selenocysteine
  MOD_RES (209)..(209): Selenocysteine
  MOD_RES (218)..(218): Selenocysteine
  MOD_RES (220)..(220): Selenocysteine
  MOD_RES (226)..(226): Selenocysteine
  MOD_RES (239)..(239): Selenocysteine
  MOD_RES (254)..(254): Selenocysteine
  MOD_RES (280)..(280): Selenocysteine
  MOD_RES (283)..(283): Selenocysteine
  MOD_RES (286)..(286): Selenocysteine
  MOD_RES (288)..(288): Selenocysteine
  MOD_RES (314)..(314): Selenocysteine
MIKLWXNRDLHIIVMVKNPAKMSLYPSLEDLKVDKVIQAQXAFSANPANPAILSEASAPIPHDGNLYPRLYPELSQYMGLSLNEEEIRANVAVVSGAPLQGLVARPSSINYMVAPVXGNDVGIRRAEIKQGIREVILCKDQDGKIGLRLKSIDNGIFVQLVQANSPASLVGLRFGDQVLQINGENCAGWSSDKAHKVLKQAFGEKIXMXIRDRPFERXIXMHKDSXGHVGFIFKNGKIXSIVKDSSAARNGLLXEHNICEINGQNVIGLKDSQIADILSXSGXVVXIXIMPAFIFEHIIKRMAPSIMKSLMDHXIPEV

SEQ ID NO: 24741 - protein, 292 aa, Homo sapiens
  MOD_RES (14)..(14): Selenocysteine
  MOD_RES (91)..(91): Selenocysteine
  MOD_RES (181)..(181): Selenocysteine
  MOD_RES (183)..(183): Selenocysteine
  MOD_RES (192)..(192): Selenocysteine
  MOD_RES (194)..(194): Selenocysteine
  MOD_RES (200)..(200): Selenocysteine
  MOD_RES (213)..(213): Selenocysteine
  MOD_RES (228)..(228): Selenocysteine
  MOD_RES (254)..(254): Selenocysteine
  MOD_RES (257)..(257): Selenocysteine
  MOD_RES (260)..(260): Selenocysteine
  MOD_RES (262)..(262): Selenocysteine
  MOD_RES (288)..(288): Selenocysteine
MSLYPSLEDLKAQXAFSANPANPAILSEASAPIPHDGNLYPRLYPELSQYMGLSLNEEEIRANVAVVSGAPLQGQLVARPSSINYMVAPVXGNDVGIRRAEIKQGIREVILCKDQDGKIGLRLKSIDNGIFVQLVQANSPASLVGLRFGDQVLQINGENCAGWSSDKAHKVLKQAFGEKIXMXIRDRPFERXIXMHKDSXGHVGFIFKNGKIXSIVKDSSAARNGLLXEHNICEINGQNVIGLKDSQIADILSXSGXVVXIXIMPAFIFEHIIKRMAPSIMKSLMDHXIPEV

SEQ ID NO: 24742 - protein, 244 aa, Homo sapiens
  MOD_RES (20)..(20): Selenocysteine
  MOD_RES (133)..(133): Selenocysteine
  MOD_RES (135)..(135): Selenocysteine
  MOD_RES (144)..(144): Selenocysteine
  MOD_RES (146)..(146): Selenocysteine
  MOD_RES (152)..(152): Selenocysteine
  MOD_RES (165)..(165): Selenocysteine
  MOD_RES (180)..(180): Selenocysteine
  MOD_RES (206)..(206): Selenocysteine
  MOD_RES (209)..(209): Selenocysteine
  MOD_RES (212)..(212): Selenocysteine
  MOD_RES (214)..(214): Selenocysteine
  MOD_RES (240)..(240): Selenocysteine
MSLYPSLEDLKVDKVIQAQXAFSANPANPAILSEASAPIPHDGNLYPRLYPELSQYMGLSLNEEEIRANVAVVSGAPLQGGIFVQLVQANSPASLVGLRFGDQVLQINGENCAGWSSDKAHKVLKQAFGEKIXMXIRDRPFERXIXMHKDSXGHVGFIFKNGKIXSIVKDSSAARNGLLXEHNICEINGQNVIGLKDSQIADILSXSGXVVXIXIMPAFIFEHIIKRMAPSIMKSLMDHXIPEV

SEQ ID NO: 24743 - protein, 297 aa, Homo sapiens
  MOD_RES (20)..(20): Selenocysteine
  MOD_RES (96)..(96): Selenocysteine
  MOD_RES (186)..(186): Selenocysteine
  MOD_RES (188)..(188): Selenocysteine
  MOD_RES (197)..(197): Selenocysteine
  MOD_RES (199)..(199): Selenocysteine
  MOD_RES (205)..(205): Selenocysteine
  MOD_RES (218)..(218): Selenocysteine
  MOD_RES (233)..(233): Selenocysteine
  MOD_RES (259)..(259): Selenocysteine
  MOD_RES (262)..(262): Selenocysteine
  MOD_RES (265)..(265): Selenocysteine
  MOD_RES (267)..(267): Selenocysteine
  MOD_RES (293)..(293): Selenocysteine
MSLYPSLEDLKVDKVIQAQXAFSANPANPAILSEASAPIPHDGNLYPRLYPELSQYMGLSLNEEEIRANVAVVSGAPLQGLVARPSSINYMVAPVXGNDVGIRRAEIKQGIREVILCKDQDGKIGLRLKSIDNGIFVQLVQANSPASLVGLRFGDQVLQINGENCAGWSSDKAHKVLKQAFGEKIXMXIRDRPFERXIXMHKDSXGHVGFIFKNGKIXSIVKDSSAARNGLLXEHNICEINGQNVIGLKDSQIADILSXSGXVVXIXIMPAFIFEHIIKRMAPSIMKSLMDHXIPEV

SEQ ID NO: 24744 - protein, 239 aa, Homo sapiens
  MOD_RES (20)..(20): Selenocysteine
  MOD_RES (128)..(128): Selenocysteine
  MOD_RES (130)..(130): Selenocysteine
  MOD_RES (139)..(139): Selenocysteine
  MOD_RES (141)..(141): Selenocysteine
  MOD_RES (147)..(147): Selenocysteine
  MOD_RES (160)..(160): Selenocysteine
  MOD_RES (175)..(175): Selenocysteine
  MOD_RES (201)..(201): Selenocysteine
  MOD_RES (204)..(204): Selenocysteine
  MOD_RES (207)..(207): Selenocysteine
  MOD_RES (209)..(209): Selenocysteine
  MOD_RES (235)..(235): Selenocysteine
MSLYPSLEDLKVDKVIQAQXAFSANPANPAILSEASAPIPHDGNLYPRLYPELSQYMGLSLNEEEIRANVAVVSGAPLQGLVQANSPASLVGLRFGDQVLQINGENCAGWSSDKAHKVLKQAFGEKIXMXIRDRPFERXIXMHKDSXGHVGFIFKNGKIXSIVKDSSAARNGLLXEHNICEINGQNVIGLKDSQIADILSXSGXVVXIXIMPAFIFEHIIKRMAPSIMKSLMDHXIPEV

SEQ ID NO: 24745 - protein, 298 aa, Homo sapiens
  MOD_RES (20)..(20): Selenocysteine
  MOD_RES (97)..(97): Selenocysteine
  MOD_RES (187)..(187): Selenocysteine
  MOD_RES (189)..(189): Selenocysteine
  MOD_RES (198)..(198): Selenocysteine
  MOD_RES (200)..(200): Selenocysteine
  MOD_RES (206)..(206): Selenocysteine
  MOD_RES (219)..(219): Selenocysteine
  MOD_RES (234)..(234): Selenocysteine
  MOD_RES (260)..(260): Selenocysteine
  MOD_RES (263)..(263): Selenocysteine
  MOD_RES (266)..(266): Selenocysteine
  MOD_RES (268)..(268): Selenocysteine
  MOD_RES (294)..(294): Selenocysteine
MSLYPSLEDLKVDKVIQAQXAFSANPANPAILSEASAPIPHDGNLYPRLYPELSQYMGLSLNEEEIRANVAVVSGAPLQGQLVARPSSINYMVAPVXGNDVGIRRAEIKQGIREVILCKDQDGKIGLRLKSIDNGIFVQLVQANSPASLVGLRFGDQVLQINGENCAGWSSDKAHKVLKQAFGEKIXMXIRDRPFERXIXMHKDSXGHVGFIFKNGKIXSIVKDSSAARNGLLXEHNICEINGQNVIGLKDSQIADILSXSGXVVXIXIMPAFIFEHIIKRMAPSIMKSLMDHXIPEV

SEQ ID NO: 24746 - protein, 292 aa, Homo sapiens
  MOD_RES (35)..(35): Selenocysteine
  MOD_RES (76)..(76): Selenocysteine
  MOD_RES (91)..(91): Selenocysteine
  MOD_RES (119)..(119): Selenocysteine
  MOD_RES (139)..(139): Selenocysteine
  MOD_RES (192)..(192): Selenocysteine
  MOD_RES (194)..(194): Selenocysteine
  MOD_RES (228)..(228): Selenocysteine
  MOD_RES (254)..(254): Selenocysteine
  MOD_RES (260)..(260): Selenocysteine
  MOD_RES (262)..(262): Selenocysteine
  MOD_RES (284)..(284): Selenocysteine
MSSLYPSLEDLKVDQAIQAQVRASPKMPALPVQAXAISPPPVLYPNLAELENYMGLSLSSQEVQESLLQIPEGDSXAVSGPGPGQMVAPVXGYSLGVRRAEIKPGVREIHLCKDERGKXGLRLRKVDQGLFVQLVQANXPASLVGLRFGDQLLQIDGRDCAGWSSHKAHQVVKKASGDKIVVVVRDRPFQRXVXMHKDSMGHVGFVIKKGKIVSLVKGSSAARNGLLXNHYVCEVDGQNVIGLKDKKIMEILAXAGNVVXLXIIPSVIYEHMVKKLPPVLLHHXMDHSIPDA

SEQ ID NO: 24747 - protein, 207 aa, Homo sapiens
  MOD_RES (6)..(6): Selenocysteine
  MOD_RES (34)..(34): Selenocysteine
  MOD_RES (54)..(54): Selenocysteine
  MOD_RES (107)..(107): Selenocysteine
  MOD_RES (109)..(109): Selenocysteine
  MOD_RES (143)..(143): Selenocysteine
  MOD_RES (169)..(169): Selenocysteine
  MOD_RES (175)..(175): Selenocysteine
  MOD_RES (177)..(177): Selenocysteine
  MOD_RES (199)..(199): Selenocysteine
MVAPVXGYSLGVRRAEIKPGVREIHLCKDERGKXGLRLRKVDQGLFVQLVQANXPASLVGLRFGDQLLQIDGRDCAGWSSHKAHQVVKKASGDKIVVVVRDRPFQRXVXMHKDSMGHVGFVIKKGKIVSLVKGSSAARNGLLXNHYVCEVDGQNVIGLKDKKIMEILAXAGNVVXLXIIPSVIYEHMVKKLPPVLLHHXMDHSIPDA

SEQ ID NO: 24748 - protein, 65 aa, Homo sapiens
  MOD_RES (5)..(5): Selenocysteine
  MOD_RES (9)..(9): Selenocysteine
  MOD_RES (35)..(35): Selenocysteine
  MOD_RES (45)..(46): Selenocysteine
  MOD_RES (48)..(48): Selenocysteine
  MOD_RES (56)..(56): Selenocysteine
MAVSXVFSXSSLGIGLFVAVGSVSPSGKEDLGFPXPPSSPLAEVXXLXSYLDKLSXSLDWEPLGD

SEQ ID NO: 24749 - protein, 28 aa, Homo sapiens
  MOD_RES (5)..(5): Selenocysteine
  MOD_RES (9)..(9): Selenocysteine
MAVSXVFSXSSLKLNQPQKYLKMKSWPC

SEQ ID NO: 24750 - protein, 88 aa, Homo sapiens
  MOD_RES (5)..(5): Selenocysteine
  MOD_RES (9)..(9): Selenocysteine
  MOD_RES (29)..(29): Selenocysteine
  MOD_RES (41)..(41): Selenocysteine
  MOD_RES (59)..(59): Selenocysteine
  MOD_RES (65)..(65): Selenocysteine
MAVSXVFSXSSLMLALSRHSLLSPLLSVXSFRRFYRGDSPXDSQKDMIEIPLPPWQERXDESIEXKRARLLYESRKRGMLENCILLRS

SEQ ID NO: 24751 - protein, 166 aa, Homo sapiens
  MOD_RES (5)..(5): Selenocysteine
  MOD_RES (9)..(9): Selenocysteine
  MOD_RES (29)..(29): Selenocysteine
  MOD_RES (41)..(41): Selenocysteine
  MOD_RES (59)..(59): Selenocysteine
  MOD_RES (65)..(65): Selenocysteine
  MOD_RES (98)..(98): Selenocysteine
  MOD_RES (123)..(123): Selenocysteine
MAVSXVFSXSSLMLALSRHSLLSPLLSVXSFRRFYRGDSPXDSQKDMIEIPLPPWQERXDESIEXKRARLLYESRKRGMLENCILLSLFAKEHLQHMXEKQLNLYDRLINEPSNDWDIYYWAXEAKPAPEIFENEVMALLRDFAKNKNKEQRLRAPDLEYLFEKPR

SEQ ID NO: 24752 - protein, 133 aa, Homo sapiens
  MOD_RES (5)..(5): Selenocysteine
  MOD_RES (9)..(9): Selenocysteine
  MOD_RES (29)..(29): Selenocysteine
  MOD_RES (41)..(41): Selenocysteine
  MOD_RES (59)..(59): Selenocysteine
  MOD_RES (65)..(65): Selenocysteine
  MOD_RES (98)..(98): Selenocysteine
  MOD_RES (123)..(123): Selenocysteine
MAVSXVFSXSSLMLALSRHSLLSPLLSVXSFRRFYRGDSPXDSQKDMIEIPLPPWQERXDESIEXKRARLLYESRKRGMLENCILLSLFAKEHLQHMXEKQLNLYDRLINEPSNDWDIYYWAXGSSDSPASAS

SEQ ID NO: 24753 - protein, 141 aa, Homo sapiens
  MOD_RES (5)..(5): Selenocysteine
  MOD_RES (9)..(9): Selenocysteine
  MOD_RES (29)..(29): Selenocysteine
  MOD_RES (41)..(41): Selenocysteine
  MOD_RES (59)..(59): Selenocysteine
  MOD_RES (65)..(65): Selenocysteine
  MOD_RES (98)..(98): Selenocysteine
  MOD_RES (123)..(123): Selenocysteine
  MOD_RES (125)..(125): Selenocysteine
MAVSXVFSXSSLMLALSRHSLLSPLLSVXSFRRFYRGDSPXDSQKDMIEIPLPPWQERXDESIEXKRARLLYESRKRGMLENCILLSLFAKEHLQHMXEKQLNLYDRLINEPSNDWDIYYWAXGXGYDKQHNVKIGQFRLI

SEQ ID NO: 24754 - protein, 129 aa, Homo sapiens
  MOD_RES (5)..(5): Selenocysteine
  MOD_RES (9)..(9): Selenocysteine
  MOD_RES (29)..(29): Selenocysteine
  MOD_RES (41)..(41): Selenocysteine
  MOD_RES (59)..(59): Selenocysteine
  MOD_RES (65)..(65): Selenocysteine
  MOD_RES (98)..(98): Selenocysteine
  MOD_RES (123)..(123): Selenocysteine
MAVSXVFSXSSLMLALSRHSLLSPLLSVXSFRRFYRGDSPXDSQKDMIEIPLPPWQERXDESIEXKRARLLYESRKRGMLENCILLSLFAKEHLQHMXEKQLNLYDRLINEPSNDWDIYYWAXGWSAMA

SEQ ID NO: 24755 - protein, 135 aa, Homo sapiens
  MOD_RES (39)..(39): Selenocysteine
  MOD_RES (66)..(66): Selenocysteine
  MOD_RES (109)..(109): Selenocysteine
DFLDDVRRMNKRQLYYQVLNFGMIVSSALMIWKGLMVIXGSESPIVVVLSGSMEPAFHRGDLLFLXNRVEDPIRVGEIVVFRIEGREIPIVHRVLKIHEKFVPYIGIVXILMNDYPKFKYAVLFLLGLFVLVHRE

SEQ ID NO: 24756 - protein, 106 aa, Homo sapiens
  MOD_RES (17)..(17): Selenocysteine
  MOD_RES (44)..(44): Selenocysteine
  MOD_RES (87)..(87): Selenocysteine
MIVSSALMIWKGLMVIXGSESPIVVVLSGSMEPAFHRGDLLFLXNRVEDPIRVGEIVVFRIEGREIPIVHRVLKIHEKQNGHIKFLXKGDNNAVDDRGLYKQGQHW

SEQ ID NO: 24757 - protein, 153 aa, Homo sapiens
  MOD_RES (17)..(17): Selenocysteine
  MOD_RES (44)..(44): Selenocysteine
  MOD_RES (87)..(87): Selenocysteine
  MOD_RES (127)..(127): Selenocysteine
MIVSSALMIWKGLMVIXGSESPIVVVLSGSMEPAFHRGDLLFLXNRVEDPIRVGEIVVFRIEGREIPIVHRVLKIHEKQNGHIKFLXKGDNNAVDDRGLYKQGQHWLEKKDVVGRARGFVPYIGIVXILMNDYPKFKYAVLFLLGLFVLVHRE

SEQ ID NO: 24758 - protein, 129 aa, Homo sapiens
  MOD_RES (43)..(43): Selenocysteine
  MOD_RES (63)..(63): Selenocysteine
  MOD_RES (103)..(103): Selenocysteine
MLSLDFLDDVRRMNKRQLYYQVLNFGMIVSSALMIWKGLMVIXGSESPIVVVLRQNGHIKFLXKGDNNAVDDRGLYKQGQHWLEKKDVVGRARGFVPYIGIVXILMNDYPKFKYAVLFLLGLFVLVHRE

SEQ ID NO: 24759 - protein, 179 aa, Homo sapiens
  MOD_RES (43)..(43): Selenocysteine
  MOD_RES (70)..(70): Selenocysteine
  MOD_RES (113)..(113): Selenocysteine
  MOD_RES (153)..(153): Selenocysteine
MLSLDFLDDVRRMNKRQLYYQVLNFGMIVSSALMIWKGLMVIXGSESPIVVVLSGSMEPAFHRGDLLFLXNRVEDPIRVGEIVVFRIEGREIPIVHRVLKIHEKQNGHIKFLXKGDNNAVDDRGLYKQGQHWLEKKDVVGRARGFVPYIGIVXILMNDYPKFKYAVLFLLGLFVLVHRE

SEQ ID NO: 24760 - protein, 164 aa, Homo sapiens
  MOD_RES (43)..(43): Selenocysteine
  MOD_RES (70)..(70): Selenocysteine
  MOD_RES (113)..(113): Selenocysteine
MLSLDFLDDVRRMNKRQLYYQVLNFGMIVSSALMIWKGLMVIXGSESPIVVVLSGSMEPAFHRGDLLFLXNRVEDPIRVGEIVVFRIEGREIPIVHRVLKIHEKQNGHIKFLXKGDNNAVDDRGLYKQGQHWLEKKDVVGRARGFYQENSSVEDRNYLFLILEL

SEQ ID NO: 24761 - protein, 185 aa, Homo sapiens
  MOD_RES (43)..(43): Selenocysteine
  MOD_RES (70)..(70): Selenocysteine
  MOD_RES (113)..(113): Selenocysteine
  MOD_RES (183)..(183): Selenocysteine
MLSLDFLDDVRRMNKRQLYYQVLNFGMIVSSALMIWKGLMVIXGSESPIVVVLSGSMEPAFHRGDLLFLXNRVEDPIRVGEIVVFRIEGREIPIVHRVLKIHEKQNGHIKFLXKGDNNAVDDRGLYKQGQHWLEKKDVVGRARGMQFSFCWVYSCWFIVSKKPALLFLGRCHSFRYWMFGVDXGL

SEQ ID NO: 24762 - protein, 163 aa, Homo sapiens
  MOD_RES (43)..(43): Selenocysteine
  MOD_RES (70)..(70): Selenocysteine
  MOD_RES (113)..(113): Selenocysteine
  MOD_RES (152)..(152): Selenocysteine
MLSLDFLDDVRRMNKRQLYYQVLNFGMIVSSALMIWKGLMVIXGSESPIVVVLSGSMEPAFHRGDLLFLXNRVEDPIRVGEIVVFRIEGREIPIVHRVLKIHEKQNGHIKFLXKGDNNAVDDRGLYKQGQHWLEKKDVVGRARGSSVLLRNXSPHLPQFPRCC

SEQ ID NO: 24763 - protein, 99 aa, Homo sapiens
  MOD_RES (55)..(55): Selenocysteine
  MOD_RES (82)..(82): Selenocysteine
  MOD_RES (96)..(96): Selenocysteine
MVRAGAVGAHLPASGLDIFGDLKKMNKRQLYYQVLNFAMIVSSALMIWKGLIVLXGSESPIVVVLSGSMEPAFHRGDLLFLXNFREDPIRAEIMEXSNF

SEQ ID NO: 24764 - protein, 156 aa, Homo sapiens
  MOD_RES (55)..(55): Selenocysteine
  MOD_RES (82)..(82): Selenocysteine
  MOD_RES (125)..(125): Selenocysteine
MVRAGAVGAHLPASGLDIFGDLKKMNKRQLYYQVLNFAMIVSSALMIWKGLIVLXGSESPIVVVLSGSMEPAFHRGDLLFLXNFREDPIRAGEIVVFKVEGRDIPIVHRVIKVHEKDNGDIKFLXKGDNNEVDDRGLYKEGQNWLEKKDVVGRARG

SEQ ID NO: 24765 - protein, 192 aa, Homo sapiens
  MOD_RES (55)..(55): Selenocysteine
  MOD_RES (82)..(82): Selenocysteine
  MOD_RES (125)..(125): Selenocysteine
  MOD_RES (165)..(165): Selenocysteine
MVRAGAVGAHLPASGLDIFGDLKKMNKRQLYYQVLNFAMIVSSALMIWKGLIVLXGSESPIVVVLSGSMEPAFHRGDLLFLXNFREDPIRAGEIVVFKVEGRDIPIVHRVIKVHEKDNGDIKFLXKGDNNEVDDRGLYKEGQNWLEKKDVVGRARGFLPYVGMVXIIMNDYPKFKYALLAVMGAYVLLKRES

SEQ ID NO: 24766 - protein, 161 aa, Homo sapiens
  MOD_RES (55)..(55): Selenocysteine
  MOD_RES (82)..(82): Selenocysteine
  MOD_RES (125)..(125): Selenocysteine
MVRAGAVGAHLPASGLDIFGDLKKMNKRQLYYQVLNFAMIVSSALMIWKGLIVLXGSESPIVVVLSGSMEPAFHRGDLLFLXNFREDPIRAGEIVVFKVEGRDIPIVHRVIKVHEKDNGDIKFLXKGDNNEVDDRGLYKEGQNWLEKKDVVGRARGMLFWL

SEQ ID NO: 24767 - protein, 86 aa, Homo sapiens
  MOD_RES (10)..(10): Selenocysteine
  MOD_RES (13)..(13): Selenocysteine
  MOD_RES (29)..(29): Selenocysteine
  MOD_RES (33)..(33): Selenocysteine
MGKMVSVINXVDXSHEDMIHDAQMDYYGXRLAXCSSDRSVKIFDVRNGGQILIADLRGHEGPVWQVAWAHPMYGNILASCSYDRKV

SEQ ID NO: 24768 - protein, 325 aa, Homo sapiens
  MOD_RES (10)..(10): Selenocysteine
  MOD_RES (13)..(13): Selenocysteine
  MOD_RES (29)..(29): Selenocysteine
  MOD_RES (33)..(33): Selenocysteine
  MOD_RES (95)..(95): Selenocysteine
  MOD_RES (136)..(136): Selenocysteine
  MOD_RES (138)..(138): Selenocysteine
  MOD_RES (153)..(153): Selenocysteine
  MOD_RES (231)..(231): Selenocysteine
  MOD_RES (233)..(233): Selenocysteine
  MOD_RES (247)..(247): Selenocysteine
  MOD_RES (255)..(255): Selenocysteine
  MOD_RES (276)..(276): Selenocysteine
  MOD_RES (290)..(290): Selenocysteine
  MOD_RES (318)..(318): Selenocysteine
MGKMVSVINXVDXSHEDMIHDAQMDYYGXRLAXCSSDRSVKIFDVRNGGQILIADLRGHEGPVWQVAWAHPMYGNILASCSYDRKVIIWREENGXWEKSHEHAGHDSSVNSVCWAPHDYGLILACGSSDGAISLLXYXGEGQWEVKKINNAHXIGCNAVSWAPAVVPGSLIDHPSGQKPNYIKRFASGGCDNLIKLWKEEEDGQWKEEQKLEAHSDWVRDVAWAPSIGLPXSXIASCSQDGRVFIWXCDDASSNXWSPKLLHKFNDVVWHVSWSIXANILAVSGGDNKVXLWKESVDGQWVCISDVNKGQGSVSASVXEGQQNEQ

SEQ ID NO: 24769 - protein, 284 aa, Homo sapiens
  MOD_RES (12)..(12): Selenocysteine
  MOD_RES (16)..(16): Selenocysteine
  MOD_RES (78)..(78): Selenocysteine
  MOD_RES (119)..(119): Selenocysteine
  MOD_RES (121)..(121): Selenocysteine
  MOD_RES (136)..(136): Selenocysteine
  MOD_RES (214)..(214): Selenocysteine
  MOD_RES (216)..(216): Selenocysteine
  MOD_RES (230)..(230): Selenocysteine
  MOD_RES (238)..(238): Selenocysteine
  MOD_RES (259)..(259): Selenocysteine
MIHDAQMDYYGXRLAXCSSDRSVKIFDVRNGGQILIADLRGHEGPVWQVAWAHPMYGNILASCSYDRKVIIWREENGXWEKSHEHAGHDSSVNSVCWAPHDYGLILACGSSDGAISLLXYXGEGQWEVKKINNAHXIGCNAVSWAPAVVPGSLIDHPSGQKPNYIKRFASGGCDNLIKLWKEEEDGQWKEEQKLEAHSDWVRDVAWAPSIGLPXSXIASCSQDGRVFIWXCDDASSNXWSPKLLHKFNDVVWHVSWSIXANILAVSGGDNKEELQMQPQIDHLP

SEQ ID NO: 24770 - protein, 308 aa, Homo sapiens
  MOD_RES (12)..(12): Selenocysteine
  MOD_RES (16)..(16): Selenocysteine
  MOD_RES (78)..(78): Selenocysteine
  MOD_RES (119)..(119): Selenocysteine
  MOD_RES (121)..(121): Selenocysteine
  MOD_RES (136)..(136): Selenocysteine
  MOD_RES (214)..(214): Selenocysteine
  MOD_RES (216)..(216): Selenocysteine
  MOD_RES (230)..(230): Selenocysteine
  MOD_RES (238)..(238): Selenocysteine
  MOD_RES (259)..(259): Selenocysteine
  MOD_RES (273)..(273): Selenocysteine
  MOD_RES (301)..(301): Selenocysteine
MIHDAQMDYYGXRLAXCSSDRSVKIFDVRNGGQILIADLRGHEGPVWQVAWAHPMYGNILASCSYDRKVIIWREENGXWEKSHEHAGHDSSVNSVCWAPHDYGLILACGSSDGAISLLXYXGEGQWEVKKINNAHXIGCNAVSWAPAVVPGSLIDHPSGQKPNYIKRFASGGCDNLIKLWKEEEDGQWKEEQKLEAHSDWVRDVAWAPSIGLPXSXIASCSQDGRVFIWXCDDASSNXWSPKLLHKFNDVVWHVSWSIXANILAVSGGDNKVXLWKESVDGQWVCISDVNKGQGSVSASVXEGQQNEQ

SEQ ID NO: 24771 - protein, 27 aa, Homo sapiens
  MOD_RES (7)..(7): Selenocysteine
  MOD_RES (25)..(25): Selenocysteine
MREPVLXWACAGKDEMGKMVSVINXVD

SEQ ID NO: 24772 - protein, 28 aa, Homo sapiens
  MOD_RES (7)..(7): Selenocysteine
  MOD_RES (25)..(25): Selenocysteine
  MOD_RES (28)..(28): Selenocysteine
MREPVLXWACAGKDEMGKMVSVINXVDX

SEQ ID NO: 24773 - protein, 24 aa, Homo sapiens
  MOD_RES (7)..(7): Selenocysteine
MREPVLXWCVPLELLCSHPLPLSA

SEQ ID NO: 24774 - protein, 368 aa, Homo sapiens
  MOD_RES (7)..(7): Selenocysteine
  MOD_RES (34)..(34): Selenocysteine
  MOD_RES (53)..(53): Selenocysteine
  MOD_RES (56)..(56): Selenocysteine
  MOD_RES (72)..(72): Selenocysteine
  MOD_RES (76)..(76): Selenocysteine
  MOD_RES (138)..(138): Selenocysteine
  MOD_RES (179)..(179): Selenocysteine
  MOD_RES (181)..(181): Selenocysteine
  MOD_RES (196)..(196): Selenocysteine
  MOD_RES (274)..(274): Selenocysteine
  MOD_RES (276)..(276): Selenocysteine
  MOD_RES (290)..(290): Selenocysteine
  MOD_RES (298)..(298): Selenocysteine
  MOD_RES (319)..(319): Selenocysteine
  MOD_RES (333)..(333): Selenocysteine
  MOD_RES (361)..(361): Selenocysteine
MREPVLXWCVPLELLCSHPLPLSAFLKSQVKLYXYRACAGKDEMGKMVSVINXVDXSHEDMIHDAQMDYYGXRLAXCSSDRSVKIFDVRNGGQILIADLRGHEGPVWQVAWAHPMYGNILASCSYDRKVIIWREENGXWEKSHEHAGHDSSVNSVCWAPHDYGLILACGSSDGAISLLXYXGEGQWEVKKINNAHXIGCNAVSWAPAVVPGSLIDHPSGQKPNYIKRFASGGCDNLIKLWKEEEDGQWKEEQKLEAHSDWVRDVAWAPSIGLPXSXIASCSQDGRVFIWXCDDASSNXWSPKLLHKFNDVVWHVSWSIXANILAVSGGDNKVXLWKESVDGQWVCISDVNKGQGSVSASVXEGQQNEQ

SEQ ID NO: 24775 - protein, 322 aa, Homo sapiens
  MOD_RES (7)..(7): Selenocysteine
  MOD_RES (10)..(10): Selenocysteine
  MOD_RES (26)..(26): Selenocysteine
  MOD_RES (30)..(30): Selenocysteine
  MOD_RES (92)..(92): Selenocysteine
  MOD_RES (133)..(133): Selenocysteine
  MOD_RES (135)..(135): Selenocysteine
  MOD_RES (150)..(150): Selenocysteine
  MOD_RES (228)..(228): Selenocysteine
  MOD_RES (230)..(230): Selenocysteine
  MOD_RES (244)..(244): Selenocysteine
  MOD_RES (252)..(252): Selenocysteine
  MOD_RES (273)..(273): Selenocysteine
  MOD_RES (287)..(287): Selenocysteine
  MOD_RES (315)..(315): Selenocysteine
MVSVINXVDXSHEDMIHDAQMDYYGXRLAXCSSDRSVKIFDVRNGGQILIADLRGHEGPVWQVAWAHPMYGNILASCSYDRKVIIWREENGXWEKSHEHAGHDSSVNSVCWAPHDYGLILACGSSDGAISLLXYXGEGQWEVKKINNAHXIGCNAVSWAPAVVPGSLIDHPSGQKPNYIKRFASGGCDNLIKLWKEEEDGQWKEEQKLEAHSDWVRDVAWAPSIGLPXSXIASCSQDGRVFIWXCDDASSNXWSPKLLHKFNDVVWHVSWSIXANILAVSGGDNKVXLWKESVDGQWVCISDVNKGQGSVSASVXEGQQNEQ

SEQ ID NO: 24776 - protein, 89 aa, Homo sapiens
  MOD_RES (8)..(8): Selenocysteine
  MOD_RES (20)..(20): Selenocysteine
  MOD_RES (71)..(71): Selenocysteine
  MOD_RES (80)..(80): Selenocysteine
AYERRFPXCPLIPMFVGSDXVNEFKSEDGAIHVIERRCKLDVDAPRLLKKIAGVDYVYFVQKNSLNSRERXLHIEAYNEXAFSLSAGSP

SEQ ID NO: 24777 - protein, 143 aa, Homo sapiens
  MOD_RES (7)..(7): Selenocysteine
  MOD_RES (58)..(58): Selenocysteine
  MOD_RES (67)..(67): Selenocysteine
  MOD_RES (81)..(81): Selenocysteine
  MOD_RES (90)..(90): Selenocysteine
  MOD_RES (109)..(109): Selenocysteine
  MOD_RES (119)..(119): Selenocysteine
  MOD_RES (142)..(142): Selenocysteine
MFVGSDXVNEFKSEDGAIHVIERRCKLDVDAPRLLKKIAGVDYVYFVQKNSLNSRERXLHIEAYNEXFSNRVIINEHCCYXVHPENEDWXCFEQSASLDIKSFFGFESXVEKIAMKQYXSNIKKGKEIIEYYLRQLEEEGIXF

SEQ ID NO: 24778 - protein, 681 aa, Homo sapiens
  MOD_RES (7)..(7): Selenocysteine
  MOD_RES (58)..(58): Selenocysteine
  MOD_RES (67)..(67): Selenocysteine
  MOD_RES (81)..(81): Selenocysteine
  MOD_RES (90)..(90): Selenocysteine
  MOD_RES (109)..(109): Selenocysteine
  MOD_RES (119)..(119): Selenocysteine
  MOD_RES (142)..(142): Selenocysteine
  MOD_RES (153)..(154): Selenocysteine
  MOD_RES (158)..(158): Selenocysteine
  MOD_RES (200)..(200): Selenocysteine
  MOD_RES (218)..(218): Selenocysteine
  MOD_RES (235)..(235): Selenocysteine
  MOD_RES (269)..(269): Selenocysteine
  MOD_RES (282)..(282): Selenocysteine
  MOD_RES (284)..(284): Selenocysteine
  MOD_RES (317)..(317): Selenocysteine
  MOD_RES (348)..(348): Selenocysteine
  MOD_RES (359)..(359): Selenocysteine
  MOD_RES (394)..(394): Selenocysteine
  MOD_RES (412)..(412): Selenocysteine
  MOD_RES (422)..(422): Selenocysteine
  MOD_RES (474)..(474): Selenocysteine
  MOD_RES (487)..(487): Selenocysteine
  MOD_RES (489)..(489): Selenocysteine
  MOD_RES (516)..(516): Selenocysteine
  MOD_RES (551)..(551): Selenocysteine
  MOD_RES (592)..(592): Selenocysteine
  MOD_RES (638)..(638): Selenocysteine
  MOD_RES (651)..(651): Selenocysteine
  MOD_RES (667)..(668): Selenocysteine
MFVGSDXVNEFKSEDGAIHVIERRCKLDVDAPRLLKKIAGVDYVYFVQKNSLNSRERXLHIEAYNEXFSNRVIINEHCCYXVHPENEDWXCFEQSASLDIKSFFGFESXVEKIAMKQYXSNIKKGKEIIEYYLRQLEEEGIXFVPRWSPPSIXXSSEXSSSSSKKQAASMAVVIPEAALKEGLSGDALSSPSAPEPVVGXPDDKLDADYIKRYLGDLXPLQESCLIRLRQWLQEXHKGKIPKDEHILRFLRARDFNIDKAREIMCQSLXWRKQHQVDYILEXWXPPQVLQDYYAGGWHHHDKDGRPLYVLRLGQMDXKGLVRALGEEALLRYVLSINEEGLRRCEENXKVFGRPISSWXCLVDLEGLNMRHLWRPGVKALLRIIEVVEANYPEXLGRLLILRAPRVFPVLWXLVSPFIDDNXRRKFLIYAGNDYQGPGGLLDYIDKEIIPDFLSGECMCEVPEGGLVPKSLYRXAEELENEDLKLWXEXIYQSASVFKGAPHEILIQIVDASSVIXWDFDVCKGDIVFNIYHSKRSPQPPKKDSLGAHSIXSPGGNNVQLIDKVWQLGRDYSMVESPLICKEGESVQGSHVXRWPGFYILQWKFHSMPACAASSLPRVDDVLASLQVSSHKCKVMYYXEVIGSEDFRGSMXSLESSHSGFSQLSAAXXSSSQSHSSSMISR

SEQ ID NO: 24779 - protein, 14 aa, Homo sapiens
MVQKYQSPVRVYKY

SEQ ID NO: 24780 - protein, 15 aa, Homo sapiens
MVQKYQSPVRVYKYP

SEQ ID NO: 24781 - protein, 60 aa, Homo sapiens
  MOD_RES (29)..(29): Selenocysteine
  MOD_RES (41)..(41): Selenocysteine
MVQKYQSPVRVYKYPFELIMAAYERRFPXCPLIPMFVGSDXVNEFKSEDGAIHVIERRCK

SEQ ID NO: 24782 - protein, 71 aa, Homo sapiens
  MOD_RES (29)..(29): Selenocysteine
  MOD_RES (41)..(41): Selenocysteine
MVQKYQSPVRVYKYPFELIMAAYERRFPXCPLIPMFVGSDXVNEFKSEDGAIHVIERRCKLDVDAPRLLKK

SEQ ID NO: 24783 - protein, 83 aa, Homo sapiens
  MOD_RES (29)..(29): Selenocysteine
  MOD_RES (41)..(41): Selenocysteine
  MOD_RES (82)..(82): Selenocysteine
MVQKYQSPVRVYKYPFELIMAAYERRFPXCPLIPMFVGSDXVNEFKSEDGAIHVIERRCKLDVDAPRLLKKELIMFILSRKXH

SEQ ID NO: 24784 - protein, 445 aa, Homo sapiens
  MOD_RES (29)..(29): Selenocysteine
  MOD_RES (41)..(41): Selenocysteine
  MOD_RES (92)..(92): Selenocysteine
  MOD_RES (101)..(101): Selenocysteine
  MOD_RES (115)..(115): Selenocysteine
  MOD_RES (124)..(124): Selenocysteine
  MOD_RES (143)..(143): Selenocysteine
  MOD_RES (153)..(153): Selenocysteine
  MOD_RES (176)..(176): Selenocysteine
  MOD_RES (187)..(188): Selenocysteine
  MOD_RES (192)..(192): Selenocysteine
  MOD_RES (234)..(234): Selenocysteine
  MOD_RES (252)..(252): Selenocysteine
  MOD_RES (269)..(269): Selenocysteine
  MOD_RES (303)..(303): Selenocysteine
  MOD_RES (316)..(316): Selenocysteine
  MOD_RES (318)..(318): Selenocysteine
  MOD_RES (351)..(351): Selenocysteine
  MOD_RES (382)..(382): Selenocysteine
  MOD_RES (393)..(393): Selenocysteine
  MOD_RES (428)..(428): Selenocysteine
MVQKYQSPVRVYKYPFELIMAAYERRFPXCPLIPMFVGSDXVNEFKSEDGAIHVIERRCKLDVDAPRLLKKIAGVDYVYFVQKNSLNSRERXLHIEAYNEXFSNRVIINEHCCYXVHPENEDWXCFEQSASLDIKSFFGFESXVEKIAMKQYXSNIKKGKEIIEYYLRQLEEEGIXFVPRWSPPSIXXSSEXSSSSSKKQAASMAVVIPEAALKEGLSGDALSSPSAPEPVVGXPDDKLDADYIKRYLGDLXPLQESCLIRLRQWLQEXHKGKIPKDEHILRFLRARDFNIDKAREIMCQSLXWRKQHQVDYILEXWXPPQVLQDYYAGGWHHHDKDGRPLYVLRLGQMDXKGLVRALGEEALLRYVLSINEEGLRRCEENXKVFGRPISSWXCLVDLEGLNMRHLWRPGVKALLRIIEVVEANYPEXLGRLLILRAPRVFPVLW

SEQ ID NO: 24785 - protein, 715 aa, Homo sapiens
  MOD_RES (29)..(29): Selenocysteine
  MOD_RES (41)..(41): Selenocysteine
  MOD_RES (92)..(92): Selenocysteine
  MOD_RES (101)..(101): Selenocysteine
  MOD_RES (115)..(115): Selenocysteine
  MOD_RES (124)..(124): Selenocysteine
  MOD_RES (143)..(143): Selenocysteine
  MOD_RES (153)..(153): Selenocysteine
  MOD_RES (176)..(176): Selenocysteine
  MOD_RES (187)..(188): Selenocysteine
  MOD_RES (192)..(192): Selenocysteine
  MOD_RES (234)..(234): Selenocysteine
  MOD_RES (252)..(252): Selenocysteine
  MOD_RES (269)..(269): Selenocysteine
  MOD_RES (303)..(303): Selenocysteine
  MOD_RES (316)..(316): Selenocysteine
  MOD_RES (318)..(318): Selenocysteine
  MOD_RES (351)..(351): Selenocysteine
  MOD_RES (382)..(382): Selenocysteine
  MOD_RES (393)..(393): Selenocysteine
  MOD_RES (428)..(428): Selenocysteine
  MOD_RES (446)..(446): Selenocysteine
  MOD_RES (456)..(456): Selenocysteine
  MOD_RES (508)..(508): Selenocysteine
  MOD_RES (521)..(521): Selenocysteine
  MOD_RES (523)..(523): Selenocysteine
  MOD_RES (550)..(550): Selenocysteine
  MOD_RES (585)..(585): Selenocysteine
  MOD_RES (626)..(626): Selenocysteine
  MOD_RES (672)..(672): Selenocysteine
  MOD_RES (685)..(685): Selenocysteine
  MOD_RES (701)..(702): Selenocysteine
MVQKYQSPVRVYKYPFELIMAAYERRFPXCPLIPMFVGSDXVNEFKSEDGAIHVIERRCKLDVDAPRLLKKIAGVDYVYFVQKNSLNSRERXLHIEAYNEXFSNRVIINEHCCYXVHPENEDWXCFEQSASLDIKSFFGFESXVEKIAMKQYXSNIKKGKEIIEYYLRQLEEEGIXFVPRWSPPSIXXSSEXSSSSSKKQAASMAVVIPEAALKEGLSGDALSSPSAPEPVVGXPDDKLDADYIKRYLGDLXPLQESCLIRLRQWLQEXHKGKIPKDEHILRFLRARDFNIDKAREIMCQSLXWRKQHQVDYILEXWXPPQVLQDYYAGGWHHHDKDGRPLYVLRLGQMDXKGLVRALGEEALLRYVLSINEEGLRRCEENXKVFGRPISSWXCLVDLEGLNMRHLWRPGVKALLRIIEVVEANYPEXLGRLLILRAPRVFPVLWXLVSPFIDDNXRRKFLIYAGNDYQGPGGLLDYIDKEIIPDFLSGECMCEVPEGGLVPKSLYRXAEELENEDLKLWXEXIYQSASVFKGAPHEILIQIVDASSVIXWDFDVCKGDIVFNIYHSKRSPQPPKKDSLGAHSIXSPGGNNVQLIDKVWQLGRDYSMVESPLICKEGESVQGSHVXRWPGFYILQWKFHSMPACAASSLPRVDDVLASLQVSSHKCKVMYYXEVIGSEDFRGSMXSLESSHSGFSQLSAAXXSSSQSHSSSMISR

SEQ ID NO: 24786 - protein, 719 aa, Homo sapiens
  MOD_RES (29)..(29): Selenocysteine
  MOD_RES (41)..(41): Selenocysteine
  MOD_RES (92)..(92): Selenocysteine
  MOD_RES (101)..(101): Selenocysteine
  MOD_RES (115)..(115): Selenocysteine
  MOD_RES (124)..(124): Selenocysteine
  MOD_RES (143)..(143): Selenocysteine
  MOD_RES (153)..(153): Selenocysteine
  MOD_RES (176)..(176): Selenocysteine
  MOD_RES (187)..(188): Selenocysteine
  MOD_RES (192)..(192): Selenocysteine
  MOD_RES (234)..(234): Selenocysteine
  MOD_RES (252)..(252): Selenocysteine
  MOD_RES (269)..(269): Selenocysteine
  MOD_RES (303)..(303): Selenocysteine
  MOD_RES (316)..(316): Selenocysteine
  MOD_RES (318)..(318): Selenocysteine
  MOD_RES (351)..(351): Selenocysteine
  MOD_RES (382)..(382): Selenocysteine
  MOD_RES (393)..(393): Selenocysteine
  MOD_RES (428)..(428): Selenocysteine
  MOD_RES (446)..(446): Selenocysteine
  MOD_RES (456)..(456): Selenocysteine
  MOD_RES (508)..(508): Selenocysteine
  MOD_RES (521)..(521): Selenocysteine
  MOD_RES (523)..(523): Selenocysteine
  MOD_RES (550)..(550): Selenocysteine
  MOD_RES (585)..(585): Selenocysteine
  MOD_RES (626)..(626): Selenocysteine
  MOD_RES (672)..(672): Selenocysteine
  MOD_RES (685)..(685): Selenocysteine
  MOD_RES (701)..(702): Selenocysteine
MVQKYQSPVRVYKYPFELIMAAYERRFPXCPLIPMFVGSDXVNEFKSEDGAIHVIERRCKLDVDAPRLLKKIAGVDYVYFVQKNSLNSRERXLHIEAYNEXFSNRVIINEHCCYXVHPENEDWXCFEQSASLDIKSFFGFESXVEKIAMKQYXSNIKKGKEIIEYYLRQLEEEGIXFVPRWSPPSIXXSSEXSSSSSKKQAASMAVVIPEAALKEGLSGDALSSPSAPEPVVGXPDDKLDADYIKRYLGDLXPLQESCLIRLRQWLQEXHKGKIPKDEHILRFLRARDFNIDKAREIMCQSLXWRKQHQVDYILEXWXPPQVLQDYYAGGWHHHDKDGRPLYVLRLGQMDXKGLVRALGEEALLRYVLSINEEGLRRCEENXKVFGRPISSWXCLVDLEGLNMRHLWRPGVKALLRIIEVVEANYPEXLGRLLILRAPRVFPVLWXLVSPFIDDNXRRKFLIYAGNDYQGPGGLLDYIDKEIIPDFLSGECMCEVPEGGLVPKSLYRXAEELENEDLKLWXEXIYQSASVFKGAPHEILIQIVDASSVIXWDFDVCKGDIVFNIYHSKRSPQPPKKDSLGAHSIXSPGGNNVQLIDKVWQLGRDYSMVESPLICKEGESVQGSHVXRWPGFYILQWKFHSMPACAASSLPRVDDVLASLQVSSHKCKVMYYXEVIGSEDFRGSMXSLESSHSGFSQLSAAXXSSSQSHSSSMISRWRFC

SEQ ID NO: 24787 - protein, 156 aa, Homo sapiens
  MOD_RES (9)..(9): Selenocysteine
  MOD_RES (28)..(28): Selenocysteine
  MOD_RES (38)..(38): Selenocysteine
  MOD_RES (61)..(61): Selenocysteine
  MOD_RES (72)..(73): Selenocysteine
  MOD_RES (77)..(77): Selenocysteine
  MOD_RES (119)..(119): Selenocysteine
VHPENEDWXCFEQSASLDIKSFFGFESXVEKIAMKQYXSNIKKGKEIIEYYLRQLEEEGIXFVPRWSPPSIXXSSEXSSSSSKKQAASMAVVIPEAALKEGLSGDALSSPSAPEPVVGXPDGGSGRGFIPRARLGKSALPFSLCLLCLFPLPWNIR

SEQ ID NO: 24788 - protein, 118 aa, Homo sapiens
  MOD_RES (32)..(32): Selenocysteine
  MOD_RES (45)..(45): Selenocysteine
  MOD_RES (47)..(47): Selenocysteine
  MOD_RES (74)..(74): Selenocysteine
  MOD_RES (109)..(109): Selenocysteine
  MOD_RES (115)..(115): Selenocysteine
YIDKEIIPDFLSGECMCEVPEGGLVPKSLYRXAEELENEDLKLWXEXIYQSASVFKGAPHEILIQIVDASSVIXWDFDVCKGDIVFNIYHSKRSPQPPKKDSLGAHSIXSPASPXPAP

SEQ ID NO: 24789 - protein, 476 aa, Homo sapiens
  MOD_RES (35)..(35): Selenocysteine
  MOD_RES (38)..(38): Selenocysteine
  MOD_RES (75)..(75): Selenocysteine
  MOD_RES (86)..(86): Selenocysteine
  MOD_RES (105)..(105): Selenocysteine
  MOD_RES (124)..(124): Selenocysteine
  MOD_RES (134)..(134): Selenocysteine
  MOD_RES (152)..(152): Selenocysteine
  MOD_RES (185)..(185): Selenocysteine
  MOD_RES (190)..(190): Selenocysteine
  MOD_RES (199)..(200): Selenocysteine
  MOD_RES (203)..(203): Selenocysteine
  MOD_RES (222)..(222): Selenocysteine
  MOD_RES (224)..(224): Selenocysteine
  MOD_RES (248)..(248): Selenocysteine
  MOD_RES (278)..(278): Selenocysteine
  MOD_RES (286)..(286): Selenocysteine
  MOD_RES (323)..(323): Selenocysteine
  MOD_RES (327)..(327): Selenocysteine
  MOD_RES (378)..(378): Selenocysteine
  MOD_RES (407)..(407): Selenocysteine
  MOD_RES (419)..(419): Selenocysteine
  MOD_RES (445)..(445): Selenocysteine
  MOD_RES (452)..(452): Selenocysteine
MAIKFLEVIKPFCVILPEIQKPERKIQFKEKVLWXAIXLFIFLVCCQIPLFGIMSSDSADPFYWMRVILASNRGXLMELGISPIVXSGLIMQLLAGAKIIEVGDXPKDRALFNGAQKLFGMIIXIGQSIVYVMXGMYGDPSEMGAGICLLIXIQLFVAGLIVLLLDELLQKGYGLGSGISLFIAXNICEXIVWKAFSPXXVNXGRGMEFEGAIIALFHLLAXRXDKVRALREAFYRQNLPNLMNLIAXIFVFAVVIYFQGFRVDLPIKSARYRGQYNXYPIKLFYXSNIPIILQSALVSNLYVISQMLSARFSGNLLVSLLGXWSDXSSGGPARAYPVGGLCYYLSPPESFGSVLEDPVHAVVYIVFMLGSCAFFSKXWIEVSGSSAKDVAKQLKEQQMVMRGHREXSMVHELNRYIPXAAAFGGLCIGALSVLADFLGAIGSGXGILLAVXIIYQYFEIFVKEQSEVGSMGALLF

SEQ ID NO: 24790 - protein, 356 aa, Homo sapiens
  MOD_RES (4)..(4): Selenocysteine
  MOD_RES (14)..(14): Selenocysteine
  MOD_RES (32)..(32): Selenocysteine
  MOD_RES (65)..(65): Selenocysteine
  MOD_RES (70)..(70): Selenocysteine
  MOD_RES (79)..(80): Selenocysteine
  MOD_RES (83)..(83): Selenocysteine
  MOD_RES (102)..(102): Selenocysteine
  MOD_RES (104)..(104): Selenocysteine
  MOD_RES (128)..(128): Selenocysteine
  MOD_RES (158)..(158): Selenocysteine
  MOD_RES (166)..(166): Selenocysteine
  MOD_RES (203)..(203): Selenocysteine
  MOD_RES (207)..(207): Selenocysteine
  MOD_RES (258)..(258): Selenocysteine
  MOD_RES (287)..(287): Selenocysteine
  MOD_RES (299)..(299): Selenocysteine
  MOD_RES (325)..(325): Selenocysteine
  MOD_RES (332)..(332): Selenocysteine
MIIXIGQSIVYVMXGMYGDPSEMGAGICLLIXIQLFVAGLIVLLLDELLQKGYGLGSGISLFIAXNICEXIVWKAFSPXXVNXGRGMEFEGAIIALFHLLAXRXDKVRALREAFYRQNLPNLMNLIAXIFVFAVVIYFQGFRVDLPIKSARYRGQYNXYPIKLFYXSNIPIILQSALVSNLYVISQMLSARFSGNLLVSLLGXWSDXSSGGPARAYPVGGLCYYLSPPESFGSVLEDPVHAVVYIVFMLGSCAFFSKXWIEVSGSSAKDVAKQLKEQQMVMRGHREXSMVHELNRYIPXAAAFGGLCIGALSVLADFLGAIGSGXGILLAVXIIYQYFEIFVKEQSEVGSMGALLF

SEQ ID NO: 24791 - protein, 101 aa, Homo sapiens
  MOD_RES (22)..(22): Selenocysteine
  MOD_RES (33)..(33): Selenocysteine
  MOD_RES (52)..(52): Selenocysteine
  MOD_RES (71)..(71): Selenocysteine
  MOD_RES (81)..(81): Selenocysteine
  MOD_RES (99)..(99): Selenocysteine
MSSDSADPFYWMRVILASNRGXLMELGISPIVXSGLIMQLLAGAKIIEVGDXPKDRALFNGAQKLFGMIIXIGQSIVYVMXGMYGDPSEMGAGICLLIXIQ

SEQ ID NO: 24792 - protein, 482 aa, Homo sapiens
  MOD_RES (2)..(2): Selenocysteine
  MOD_RES (4)..(4): Selenocysteine
  MOD_RES (41)..(41): Selenocysteine
  MOD_RES (44)..(44): Selenocysteine
  MOD_RES (81)..(81): Selenocysteine
  MOD_RES (92)..(92): Selenocysteine
  MOD_RES (111)..(111): Selenocysteine
  MOD_RES (130)..(130): Selenocysteine
  MOD_RES (140)..(140): Selenocysteine
  MOD_RES (158)..(158): Selenocysteine
  MOD_RES (191)..(191): Selenocysteine
  MOD_RES (196)..(196): Selenocysteine
  MOD_RES (205)..(206): Selenocysteine
  MOD_RES (209)..(209): Selenocysteine
  MOD_RES (228)..(228): Selenocysteine
  MOD_RES (230)..(230): Selenocysteine
  MOD_RES (254)..(254): Selenocysteine
  MOD_RES (284)..(284): Selenocysteine
  MOD_RES (292)..(292): Selenocysteine
  MOD_RES (329)..(329): Selenocysteine
  MOD_RES (333)..(333): Selenocysteine
  MOD_RES (384)..(384): Selenocysteine
  MOD_RES (413)..(413): Selenocysteine
  MOD_RES (425)..(425): Selenocysteine
  MOD_RES (451)..(451): Selenocysteine
  MOD_RES (458)..(458): Selenocysteine
MXQXARVLVKFLEVIKPFCVILPEIQKPERKIQFKEKVLWXAIXLFIFLVCCQIPLFGIMSSDSADPFYWMRVILASNRGXLMELGISPIVXSGLIMQLLAGAKIIEVGDXPKDRALFNGAQKLFGMIIXIGQSIVYVMXGMYGDPSEMGAGICLLIXIQLFVAGLIVLLLDELLQKGYGLGSGISLFIAXNICEXIVWKAFSPXXVNXGRGMEFEGAIIALFHLLAXRXDKVRALREAFYRQNLPNLMNLIAXIFVFAVVIYFQGFRVDLPIKSARYRGQYNXYPIKLFYXSNIPIILQSALVSNLYVISQMLSARFSGNLLVSLLGXWSDXSSGGPARAYPVGGLCYYLSPPESFGSVLEDPVHAVVYIVFMLGSCAFFSKXWIEVSGSSAKDVAKQLKEQQMVMRGHREXSMVHELNRYIPXAAAFGGLCIGALSVLADFLGAIGSGXGILLAVXIIYQYFEIFVKEQSEVGSMGALLF

SEQ ID NO: 24793 - protein, 454 aa, Homo sapiens
  MOD_RES (53)..(53): Selenocysteine
  MOD_RES (64)..(64): Selenocysteine
  MOD_RES (83)..(83): Selenocysteine
  MOD_RES (102)..(102): Selenocysteine
  MOD_RES (112)..(112): Selenocysteine
  MOD_RES (163)..(163): Selenocysteine
  MOD_RES (168)..(168): Selenocysteine
  MOD_RES (177)..(178): Selenocysteine
  MOD_RES (181)..(181): Selenocysteine
  MOD_RES (185)..(185): Selenocysteine
  MOD_RES (200)..(200): Selenocysteine
  MOD_RES (202)..(202): Selenocysteine
  MOD_RES (226)..(226): Selenocysteine
  MOD_RES (264)..(264): Selenocysteine
  MOD_RES (356)..(356): Selenocysteine
  MOD_RES (385)..(385): Selenocysteine
  MOD_RES (397)..(397): Selenocysteine
  MOD_RES (423)..(423): Selenocysteine
  MOD_RES (430)..(430): Selenocysteine
MGIKFLEVIKPFCAVLPEIQKPERKIPLFGIMSSDSADPFYWMRVILASNRGXLMELGISPIVXSGLIMQLLAGAKIIEVGDXPKDRALFNGAQKLFGMIIXIGQAIVYVMXGMYGDPAEMGAGICLLIIIQLFVAGLIVLLLDELLQKGYGLGSGISLFIAXNICEXIVWKAFSPXXINXGRGXEFEGAVIALFHLLAXRXDKVRALREAFYRQNLPNLMNLIAXVFVFAVVIYFQGFRVDLPIKSARYRGQYSSYPIKLFYXSNIPIILQSALVSNLYVISQMLSVRFSGNFLVNLLGQWADVSGGGPARSYPVGGLCYYLSPPESMGAIFEDPVHVVVYIIFMLGSCAFFSKXWIEVSGSSAKDVAKQLKEQQMVMRGHRDXSMVHELNRYIPXAAAFGGLCIGALSVLADFLGAIGSGXGILLAVXIIYQYFEIFVKEQAEVGGMGALFF

SEQ ID NO: 24794 - protein, 168 aa, Homo sapiens
  MOD_RES (35)..(35): Selenocysteine
  MOD_RES (38)..(38): Selenocysteine
  MOD_RES (75)..(75): Selenocysteine
  MOD_RES (86)..(86): Selenocysteine
  MOD_RES (105)..(105): Selenocysteine
  MOD_RES (124)..(124): Selenocysteine
  MOD_RES (134)..(134): Selenocysteine
  MOD_RES (158)..(158): Selenocysteine
  MOD_RES (165)..(165): Selenocysteine
MGIKFLEVIKPFCAVLPEIQKPERKIQFREKVLWXAIXLFIFLVCCQIPLFGIMSSDSADPFYWMRVILASNRGXLMELGISPIVXSGLIMQLLAGAKIIEVGDXPKDRALFNGAQKLFGMIIXIGQAIVYVMXGMYGDPAEMGAGICLLIIIQALLXLKICGYXEEL

SEQ ID NO: 24795 - protein, 159 aa, Homo sapiens
  MOD_RES (35)..(35): Selenocysteine
  MOD_RES (38)..(38): Selenocysteine
  MOD_RES (75)..(75): Selenocysteine
  MOD_RES (86)..(86): Selenocysteine
  MOD_RES (105)..(105): Selenocysteine
  MOD_RES (124)..(124): Selenocysteine
  MOD_RES (134)..(134): Selenocysteine
MGIKFLEVIKPFCAVLPEIQKPERKIQFREKVLWXAIXLFIFLVCCQIPLFGIMSSDSADPFYWMRVILASNRGXLMELGISPIVXSGLIMQLLAGAKIIEVGDXPKDRALFNGAQKLFGMIIXIGQAIVYVMXGMYGDPAEMGAGICLLIIIQDQHSP

SEQ ID NO: 24796 - protein, 410 aa, Homo sapiens
  MOD_RES (35)..(35): Selenocysteine
  MOD_RES (38)..(38): Selenocysteine
  MOD_RES (75)..(75): Selenocysteine
  MOD_RES (86)..(86): Selenocysteine
  MOD_RES (105)..(105): Selenocysteine
  MOD_RES (124)..(124): Selenocysteine
  MOD_RES (134)..(134): Selenocysteine
  MOD_RES (185)..(185): Selenocysteine
  MOD_RES (190)..(190): Selenocysteine
  MOD_RES (199)..(200): Selenocysteine
  MOD_RES (203)..(203): Selenocysteine
  MOD_RES (207)..(207): Selenocysteine
  MOD_RES (222)..(222): Selenocysteine
  MOD_RES (224)..(224): Selenocysteine
  MOD_RES (248)..(248): Selenocysteine
  MOD_RES (312)..(312): Selenocysteine
  MOD_RES (341)..(341): Selenocysteine
  MOD_RES (353)..(353): Selenocysteine
  MOD_RES (379)..(379): Selenocysteine
  MOD_RES (386)..(386): Selenocysteine
MGIKFLEVIKPFCAVLPEIQKPERKIQFREKVLWXAIXLFIFLVCCQIPLFGIMSSDSADPFYWMRVILASNRGXLMELGISPIVXSGLIMQLLAGAKIIEVGDXPKDRALFNGAQKLFGMIIXIGQAIVYVMXGMYGDPAEMGAGICLLIIIQLFVAGLIVLLLDELLQKGYGLGSGISLFIAXNICEXIVWKAFSPXXINXGRGXEFEGAVIALFHLLAXRXDKVRALREAFYRQNLPNLMNLIAXVFVFAVVIYFQDVSGGGPARSYPVGGLCYYLSPPESMGAIFEDPVHVVVYIIFMLGSCAFFSKXWIEVSGSSAKDVAKQLKEQQMVMRGHRDXSMVHELNRYIPXAAAFGGLCIGALSVLADFLGAIGSGXGILLAVXIIYQYFEIFVKEQAEVGGMGALFF

SEQ ID NO: 24797 - protein, 418 aa, Homo sapiens
  MOD_RES (35)..(35): Selenocysteine
  MOD_RES (38)..(38): Selenocysteine
  MOD_RES (75)..(75): Selenocysteine
  MOD_RES (86)..(86): Selenocysteine
  MOD_RES (105)..(105): Selenocysteine
  MOD_RES (124)..(124): Selenocysteine
  MOD_RES (134)..(134): Selenocysteine
  MOD_RES (185)..(185): Selenocysteine
  MOD_RES (190)..(190): Selenocysteine
  MOD_RES (199)..(200): Selenocysteine
  MOD_RES (203)..(203): Selenocysteine
  MOD_RES (207)..(207): Selenocysteine
  MOD_RES (222)..(222): Selenocysteine
  MOD_RES (224)..(224): Selenocysteine
  MOD_RES (248)..(248): Selenocysteine
  MOD_RES (286)..(286): Selenocysteine
  MOD_RES (378)..(378): Selenocysteine
  MOD_RES (407)..(407): Selenocysteine
MGIKFLEVIKPFCAVLPEIQKPERKIQFREKVLWXAIXLFIFLVCCQIPLFGIMSSDSADPFYWMRVILASNRGXLMELGISPIVXSGLIMQLLAGAKIIEVGDXPKDRALFNGAQKLFGMIIXIGQAIVYVMXGMYGDPAEMGAGICLLIIIQLFVAGLIVLLLDELLQKGYGLGSGISLFIAXNICEXIVWKAFSPXXINXGRGXEFEGAVIALFHLLAXRXDKVRALREAFYRQNLPNLMNLIAXVFVFAVVIYFQGFRVDLPIKSARYRGQYSSYPIKLFYXSNIPIILQSALVSNLYVISQMLSVRFSGNFLVNLLGQWADVSGGGPARSYPVGGLCYYLSPPESMGAIFEDPVHVVVYIIFMLGSCAFFSKXWIEVSGSSAKDVAKQLKEQQMVMRGHRDXSMVHELNSARA

SEQ ID NO: 24798 - protein, 437 aa, Homo sapiens
  MOD_RES (35)..(35): Selenocysteine
  MOD_RES (38)..(38): Selenocysteine
  MOD_RES (75)..(75): Selenocysteine
  MOD_RES (86)..(86): Selenocysteine
  MOD_RES (105)..(105): Selenocysteine
  MOD_RES (124)..(124): Selenocysteine
  MOD_RES (134)..(134): Selenocysteine
  MOD_RES (185)..(185): Selenocysteine
  MOD_RES (190)..(190): Selenocysteine
  MOD_RES (199)..(200): Selenocysteine
  MOD_RES (203)..(203): Selenocysteine
  MOD_RES (207)..(207): Selenocysteine
  MOD_RES (222)..(222): Selenocysteine
  MOD_RES (224)..(224): Selenocysteine
  MOD_RES (248)..(248): Selenocysteine
  MOD_RES (286)..(286): Selenocysteine
  MOD_RES (378)..(378): Selenocysteine
  MOD_RES (407)..(407): Selenocysteine
  MOD_RES (431)..(431): Selenocysteine
MGIKFLEVIKPFCAVLPEIQKPERKIQFREKVLWXAIXLFIFLVCCQIPLFGIMSSDSADPFYWMRVILASNRGXLMELGISPIVXSGLIMQLLAGAKIIEVGDXPKDRALFNGAQKLFGMIIXIGQAIVYVMXGMYGDPAEMGAGICLLIIIQLFVAGLIVLLLDELLQKGYGLGSGISLFIAXNICEXIVWKAFSPXXINXGRGXEFEGAVIALFHLLAXRXDKVRALREAFYRQNLPNLMNLIAXVFVFAVVIYFQGFRVDLPIKSARYRGQYSSYPIKLFYXSNIPIILQSALVSNLYVISQMLSVRFSGNFLVNLLGQWADVSGGGPARSYPVGGLCYYLSPPESMGAIFEDPVHVVVYIIFMLGSCAFFSKXWIEVSGSSAKDVAKQLKEQQMVMRGHRDXSMVHELNRPKVKLRRWKGEGRHFXKRILFY

SEQ ID NO: 24799 - protein, 476 aa, Homo sapiens
  MOD_RES (35)..(35): Selenocysteine
  MOD_RES (38)..(38): Selenocysteine
  MOD_RES (75)..(75): Selenocysteine
  MOD_RES (86)..(86): Selenocysteine
  MOD_RES (105)..(105): Selenocysteine
  MOD_RES (124)..(124): Selenocysteine
  MOD_RES (134)..(134): Selenocysteine
  MOD_RES (185)..(185): Selenocysteine
  MOD_RES (190)..(190): Selenocysteine
  MOD_RES (199)..(200): Selenocysteine
  MOD_RES (203)..(203): Selenocysteine
  MOD_RES (207)..(207): Selenocysteine
  MOD_RES (222)..(222): Selenocysteine
  MOD_RES (224)..(224): Selenocysteine
  MOD_RES (248)..(248): Selenocysteine
  MOD_RES (286)..(286): Selenocysteine
  MOD_RES (378)..(378): Selenocysteine
  MOD_RES (407)..(407): Selenocysteine
  MOD_RES (419)..(419): Selenocysteine
  MOD_RES (445)..(445): Selenocysteine
  MOD_RES (452)..(452): Selenocysteine
MGIKFLEVIKPFCAVLPEIQKPERKIQFREKVLWXAIXLFIFLVCCQIPLFGIMSSDSADPFYWMRVILASNRGXLMELGISPIVXSGLIMQLLAGAKIIEVGDXPKDRALFNGAQKLFGMIIXIGQAIVYVMXGMYGDPAEMGAGICLLIIIQLFVAGLIVLLLDELLQKGYGLGSGISLFIAXNICEXIVWKAFSPXXINXGRGXEFEGAVIALFHLLAXRXDKVRALREAFYRQNLPNLMNLIAXVFVFAVVIYFQGFRVDLPIKSARYRGQYSSYPIKLFYXSNIPIILQSALVSNLYVISQMLSVRFSGNFLVNLLGQWADVSGGGPARSYPVGGLCYYLSPPESMGAIFEDPVHVVVYIIFMLGSCAFFSKXWIEVSGSSAKDVAKQLKEQQMVMRGHRDXSMVHELNRYIPXAAAFGGLCIGALSVLADFLGAIGSGXGILLAVXIIYQYFEIFVKEQAEVGGMGALFF

SEQ ID NO: 24800 - protein, 162 aa, Homo sapiens
  MOD_RES (35)..(35): Selenocysteine
  MOD_RES (38)..(38): Selenocysteine
  MOD_RES (75)..(75): Selenocysteine
  MOD_RES (86)..(86): Selenocysteine
  MOD_RES (105)..(105): Selenocysteine
  MOD_RES (124)..(124): Selenocysteine
  MOD_RES (134)..(134): Selenocysteine
MGIKFLEVIKPFCAVLPEIQKPERKIQFREKVLWXAIXLFIFLVCCQIPLFGIMSSDSADPFYWMRVILASNRGXLMELGISPIVXSGLIMQLLAGAKIIEVGDXPKDRALFNGAQKLFGMIIXIGQAIVYVMXGMYGDPAEMGAGICLLIIIQVLSLRVQS

SEQ ID NO: 24801 - protein, 189 aa, Homo sapiens
  MOD_RES (35)..(35): Selenocysteine
  MOD_RES (38)..(38): Selenocysteine
  MOD_RES (75)..(75): Selenocysteine
  MOD_RES (86)..(86): Selenocysteine
  MOD_RES (105)..(105): Selenocysteine
  MOD_RES (119)..(119): Selenocysteine
  MOD_RES (134)..(134): Selenocysteine
  MOD_RES (136)..(136): Selenocysteine
  MOD_RES (160)..(160): Selenocysteine
MGIKFLEVIKPFCAVLPEIQKPERKIQFREKVLWXAIXLFIFLVCCQIPLFGIMSSDSADPFYWMRVILASNRGXLMELGISPIVXSGLIMQLLAGAKIIEVGDXPKDRALFNGAQKRXEFEGAVIALFHLLAXRXDKVRALREAFYRQNLPNLMNLIAXVFVFAVVIYFQGFRVDLPIKSARYRGQYS

SEQ ID NO: 24802 - protein, 94 aa, Homo sapiens
  MOD_RES (1)..(1): Any amino acid
  MOD_RES (9)..(9): Selenocysteine
  MOD_RES (12)..(12): Selenocysteine
  MOD_RES (49)..(49): Selenocysteine
  MOD_RES (60)..(60): Selenocysteine
  MOD_RES (79)..(79): Selenocysteine
XFREKVLWXAIXLFIFLVCCQIPLFGIMSSDSADPFYWMRVILASNRGXLMELGISPIVXSGLIMQLLAGAKIIEVGDXPKDRALFNGAQKREH

SEQ ID NO: 24803 - protein, 228 aa, Homo sapiens
  MOD_RES (1)..(1): Any amino acid
  MOD_RES (6)..(6): Selenocysteine
  MOD_RES (16)..(16): Selenocysteine
  MOD_RES (67)..(67): Selenocysteine
  MOD_RES (72)..(72): Selenocysteine
  MOD_RES (81)..(82): Selenocysteine
  MOD_RES (85)..(85): Selenocysteine
  MOD_RES (89)..(89): Selenocysteine
  MOD_RES (104)..(104): Selenocysteine
  MOD_RES (106)..(106): Selenocysteine
  MOD_RES (130)..(130): Selenocysteine
  MOD_RES (159)..(159): Selenocysteine
  MOD_RES (171)..(171): Selenocysteine
  MOD_RES (197)..(197): Selenocysteine
  MOD_RES (204)..(204): Selenocysteine
XGMIIXIGQAIVYVMXGMYGDPAEMGAGICLLIIIQLFVAGLIVLLLDELLQKGYGLGSGISLFIAXNICEXIVWKAFSPXXINXGRGXEFEGAVIALFHLLAXRXDKVRALREAFYRQNLPNLMNLIAXVFVFAVVIYFQVAKQLKEQQMVMRGHRDXSMVHELNRYIPXAAAFGGLCIGALSVLADFLGAIGSGXGILLAVXIIYQYFEIFVKEQAEVGGMGALFF

SEQ ID NO: 24804 - protein, 145 aa, Homo sapiens
  MOD_RES (1)..(1): Any amino acid
  MOD_RES (21)..(21): Selenocysteine
  MOD_RES (32)..(32): Selenocysteine
  MOD_RES (51)..(51): Selenocysteine
  MOD_RES (70)..(70): Selenocysteine
  MOD_RES (80)..(80): Selenocysteine
  MOD_RES (127)..(127): Selenocysteine
XSDSADPFYWMRVILASNRGXLMELGISPIVXSGLIMQLLAGAKIIEVGDXPKDRALFNGAQKLFGMIIXIGQAIVYVMXGMYGDPAEMGAGICLLIIIQGFRVDLPIKSARYRGQYSSYPIKLFYXSNIPIILQSALVSNLYVI

SEQ ID NO: 24805 - protein, 96 aa, Homo sapiens
  MOD_RES (5)..(5): Selenocysteine
  MOD_RES (9)..(9): Selenocysteine
  MOD_RES (30)..(30): Selenocysteine
  MOD_RES (41)..(41): Selenocysteine
  MOD_RES (47)..(48): Selenocysteine
  MOD_RES (52)..(52): Selenocysteine
  MOD_RES (60)..(60): Selenocysteine
  MOD_RES (94)..(94): Selenocysteine
MPGPXPSGXNVGSSGRSPSKAVAARAAGSXVRQRKNASCGXRSAGRXXSAGXGGMWRFYXEDSPGLKVGPVPVLVMSLLFIASVFMLHIWGKYXRS

SEQ ID NO: 24806 - protein, 42 aa, Homo sapiens
  MOD_RES (6)..(6): Selenocysteine
  MOD_RES (40)..(40): Selenocysteine
MWRFYXEDSPGLKVGPVPVLVMSLLFIASVFMLHIWGKYXRS

SEQ ID NO: 24807 - protein, 68 aa, Homo sapiens
  MOD_RES (26)..(26): Selenocysteine
  MOD_RES (40)..(40): Selenocysteine
MDQVMQFVEPSRQFVKDSIRLVKRCXKPDRKEFQKIAMAXAIGFAIMGFIGFFVKLIHIPINNIIVGG

SEQ ID NO: 24808 - protein, 43 aa, Homo sapiens
  MOD_RES (3)..(3): Selenocysteine
  MOD_RES (18)..(18): Selenocysteine
MQXCPLAFPGHVSQALGXLLFLAASLSAQNEAACPRAGERHLQ

SEQ ID NO: 24809 - protein, 44 aa, Homo sapiens
  MOD_RES (3)..(3): Selenocysteine
  MOD_RES (18)..(18): Selenocysteine
  MOD_RES (39)..(39): Selenocysteine
MQXCPLAFPGHVSQALGXLLFLAASLSAQNEGWDSPICXEGVVS

SEQ ID NO: 24810 - protein, 85 aa, Homo sapiens
  MOD_RES (3)..(3): Selenocysteine
  MOD_RES (18)..(18): Selenocysteine
  MOD_RES (39)..(39): Selenocysteine
  MOD_RES (51)..(51): Selenocysteine
MQXCPLAFPGHVSQALGXLLFLAASLSAQNEGWDSPICXEGVVSVSWGENXVMSCNISNAFSHVNIKLRAHGQESAIFNEVAPGY

SEQ ID NO: 24811 - protein, 147 aa, Homo sapiens
  MOD_RES (3)..(3): Selenocysteine
  MOD_RES (18)..(18): Selenocysteine
  MOD_RES (39)..(39): Selenocysteine
  MOD_RES (51)..(51): Selenocysteine
  MOD_RES (130)..(130): Selenocysteine
MQXCPLAFPGHVSQALGXLLFLAASLSAQNEGWDSPICXEGVVSVSWGENXVMSCNISNAFSHVNIKLRAHGQESAIFNEVAPGYFSRDGWQLQVQGGVAQLVIKGARDSHAGLYMWHLVGHQRNNRQVXLEVSEPRGLKDRASAQL

SEQ ID NO: 24812 - protein, 170 aa, Homo sapiens
  MOD_RES (3)..(3): Selenocysteine
  MOD_RES (18)..(18): Selenocysteine
  MOD_RES (39)..(39): Selenocysteine
  MOD_RES (51)..(51): Selenocysteine
  MOD_RES (130)..(130): Selenocysteine
  MOD_RES (152)..(152): Selenocysteine
  MOD_RES (164)..(164): Selenocysteine
MQXCPLAFPGHVSQALGXLLFLAASLSAQNEGWDSPICXEGVVSVSWGENXVMSCNISNAFSHVNIKLRAHGQESAIFNEVAPGYFSRDGWQLQVQGGVAQLVIKGARDSHAGLYMWHLVGHQRNNRQVXLEVSEPRGLKDRASAQLLGPGXSRGAEPQSAPDXGFWPVP

SEQ ID NO: 24813 - protein, 149 aa, Homo sapiens
  MOD_RES (3)..(3): Selenocysteine
  MOD_RES (18)..(18): Selenocysteine
  MOD_RES (39)..(39): Selenocysteine
  MOD_RES (51)..(51): Selenocysteine
  MOD_RES (130)..(130): Selenocysteine
MQXCPLAFPGHVSQALGXLLFLAASLSAQNEGWDSPICXEGVVSVSWGENXVMSCNISNAFSHVNIKLRAHGQESAIFNEVAPGYFSRDGWQLQVQGGVAQLVIKGARDSHAGLYMWHLVGHQRNNRQVXLEVSGAAVPSNAGRRSSSS

SEQ ID NO: 24814 - protein, 178 aa, Homo sapiens
  MOD_RES (3)..(3): Selenocysteine
  MOD_RES (18)..(18): Selenocysteine
  MOD_RES (39)..(39): Selenocysteine
  MOD_RES (51)..(51): Selenocysteine
  MOD_RES (130)..(130): Selenocysteine
  MOD_RES (144)..(144): Selenocysteine
  MOD_RES (154)..(154): Selenocysteine
MQXCPLAFPGHVSQALGXLLFLAASLSAQNEGWDSPICXEGVVSVSWGENXVMSCNISNAFSHVNIKLRAHGQESAIFNEVAPGYFSRDGWQLQVQGGVAQLVIKGARDSHAGLYMWHLVGHQRNNRQVXLEVSGAEPQSAPDXGFWPVPAVVXAVFILLVALVMFAWYRCRCSQQRR

SEQ ID NO: 24815 - protein, 248 aa, Homo sapiens
  MOD_RES (3)..(3): Selenocysteine
  MOD_RES (18)..(18): Selenocysteine
  MOD_RES (39)..(39): Selenocysteine
  MOD_RES (51)..(51): Selenocysteine
  MOD_RES (130)..(130): Selenocysteine
  MOD_RES (144)..(144): Selenocysteine
  MOD_RES (154)..(154): Selenocysteine
  MOD_RES (211)..(211): Selenocysteine
  MOD_RES (217)..(217): Selenocysteine
MQXCPLAFPGHVSQALGXLLFLAASLSAQNEGWDSPICXEGVVSVSWGENXVMSCNISNAFSHVNIKLRAHGQESAIFNEVAPGYFSRDGWQLQVQGGVAQLVIKGARDSHAGLYMWHLVGHQRNNRQVXLEVSGAEPQSAPDXGFWPVPAVVXAVFILLVALVMFAWYRCRCSQQRREKKFFLLEPQMKVAALRAGAQQGLSRASAELWXPDSEPXPRPLALVFKPSPLGALELLSPQPLFPYAADP

SEQ ID NO: 24816 - protein, 77 aa, Homo sapiens
  MOD_RES (3)..(3): Selenocysteine
  MOD_RES (24)..(24): Selenocysteine
  MOD_RES (29)..(29): Selenocysteine
  MOD_RES (38)..(38): Selenocysteine
  MOD_RES (56)..(56): Selenocysteine
MAXCSSDQSVKVWDKSESGDWHCXASWKXHSGSVWRVXWAHPEFGQVLASCSFDRXAAVWEEIVGESNDKLRGQSHW

SEQ ID NO: 24817 - protein, 189 aa, Homo sapiens
  MOD_RES (29)..(29): Selenocysteine
  MOD_RES (38)..(38): Selenocysteine
  MOD_RES (47)..(47): Selenocysteine
  MOD_RES (65)..(65): Selenocysteine
  MOD_RES (90)..(91): Selenocysteine
  MOD_RES (97)..(97): Selenocysteine
  MOD_RES (100)..(100): Selenocysteine
  MOD_RES (115)..(115): Selenocysteine
  MOD_RES (189)..(189): Selenocysteine
MFVARSIAADHKDLIHDVSFDFHGRRMAXCSSDQSVKXHSGSVWRVXWAHPEFGQVLASCSFDRXAAVWEEIVGESNDKLRGQSHWVKRXXLVDSRXSVXDVKFAPKHMGLMLAXCSADGIVRIYEAPDVMNLSQWSLQHEISCKLSCSCISWNPSSSRAHSPMIAVGSDDSSPNAMAKVQIFEYNENX

SEQ ID NO: 24818 - protein, 263 aa, Homo sapiens
  MOD_RES (29)..(29): Selenocysteine
  MOD_RES (50)..(50): Selenocysteine
  MOD_RES (55)..(55): Selenocysteine
  MOD_RES (64)..(64): Selenocysteine
  MOD_RES (82)..(82): Selenocysteine
  MOD_RES (107)..(108): Selenocysteine
  MOD_RES (114)..(114): Selenocysteine
  MOD_RES (117)..(117): Selenocysteine
  MOD_RES (132)..(132): Selenocysteine
  MOD_RES (226)..(226): Selenocysteine
  MOD_RES (234)..(234): Selenocysteine
  MOD_RES (237)..(237): Selenocysteine
  MOD_RES (239)..(239): Selenocysteine
  MOD_RES (262)..(262): Selenocysteine
MFVARSIAADHKDLIHDVSFDFHGRRMAXCSSDQSVKVWDKSESGDWHCXASWKXHSGSVWRVXWAHPEFGQVLASCSFDRXAAVWEEIVGESNDKLRGQSHWVKRXXLVDSRXSVXDVKFAPKHMGLMLAXCSADGIVRIYEAPDVMNLSQWSLQHEISCKLSCSCISWNPSRISKLIEKMNRAHLYNFHIPSSRAHSPMIAVGSDDSSPNAMAKVQIFEYNENXRKYAKAEXLMXVXDPVHDIAFAPNLGRSFHILAIAXK

SEQ ID NO: 24819 - protein, 360 aa, Homo sapiens
  MOD_RES (29)..(29): Selenocysteine
  MOD_RES (50)..(50): Selenocysteine
  MOD_RES (55)..(55): Selenocysteine
  MOD_RES (64)..(64): Selenocysteine
  MOD_RES (82)..(82): Selenocysteine
  MOD_RES (107)..(108): Selenocysteine
  MOD_RES (114)..(114): Selenocysteine
  MOD_RES (117)..(117): Selenocysteine
  MOD_RES (132)..(132): Selenocysteine
  MOD_RES (206)..(206): Selenocysteine
  MOD_RES (214)..(214): Selenocysteine
  MOD_RES (217)..(217): Selenocysteine
  MOD_RES (219)..(219): Selenocysteine
  MOD_RES (242)..(242): Selenocysteine
  MOD_RES (249)..(249): Selenocysteine
  MOD_RES (258)..(258): Selenocysteine
  MOD_RES (264)..(264): Selenocysteine
  MOD_RES (289)..(289): Selenocysteine
  MOD_RES (291)..(291): Selenocysteine
  MOD_RES (316)..(316): Selenocysteine
  MOD_RES (334)..(334): Selenocysteine
  MOD_RES (342)..(342): Selenocysteine
MFVARSIAADHKDLIHDVSFDFHGRRMAXCSSDQSVKVWDKSESGDWHCXASWKXHSGSVWRVXWAHPEFGQVLASCSFDRXAAVWEEIVGESNDKLRGQSHWVKRXXLVDSRXSVXDVKFAPKHMGLMLAXCSADGIVRIYEAPDVMNLSQWSLQHEISCKLSCSCISWNPSSSRAHSPMIAVGSDDSSPNAMAKVQIFEYNENXRKYAKAEXLMXVXDPVHDIAFAPNLGRSFHILAIAXKDVRIFXLKPVRKELXSSGGPXKFEIHIVAQFDNHNSQVWRVSWNIXGXVLASSGDDGCVRLWKANYMDNWKCXGILKGNGSPVNGSSQQGXSNPSLGSXIPSLQNSLNGSSAGRKHS

SEQ ID NO: 24820 - protein, 421 aa, Homo sapiens
  MOD_RES (29)..(29): Selenocysteine
  MOD_RES (50)..(50): Selenocysteine
  MOD_RES (55)..(55): Selenocysteine
  MOD_RES (64)..(64): Selenocysteine
  MOD_RES (82)..(82): Selenocysteine
  MOD_RES (107)..(108): Selenocysteine
  MOD_RES (114)..(114): Selenocysteine
  MOD_RES (117)..(117): Selenocysteine
  MOD_RES (132)..(132): Selenocysteine
  MOD_RES (206)..(206): Selenocysteine
  MOD_RES (214)..(214): Selenocysteine
  MOD_RES (217)..(217): Selenocysteine
  MOD_RES (219)..(219): Selenocysteine
  MOD_RES (242)..(242): Selenocysteine
  MOD_RES (249)..(249): Selenocysteine
  MOD_RES (258)..(258): Selenocysteine
  MOD_RES (264)..(264): Selenocysteine
  MOD_RES (289)..(289): Selenocysteine
  MOD_RES (291)..(291): Selenocysteine
  MOD_RES (316)..(316): Selenocysteine
  MOD_RES (334)..(334): Selenocysteine
  MOD_RES (342)..(342): Selenocysteine
  MOD_RES (361)..(361): Selenocysteine
  MOD_RES (395)..(395): Selenocysteine
MFVARSIAADHKDLIHDVSFDFHGRRMAXCSSDQSVKVWDKSESGDWHCXASWKXHSGSVWRVXWAHPEFGQVLASCSFDRXAAVWEEIVGESNDKLRGQSHWVKRXXLVDSRXSVXDVKFAPKHMGLMLAXCSADGIVRIYEAPDVMNLSQWSLQHEISCKLSCSCISWNPSSSRAHSPMIAVGSDDSSPNAMAKVQIFEYNENXRKYAKAEXLMXVXDPVHDIAFAPNLGRSFHILAIAXKDVRIFXLKPVRKELXSSGGPXKFEIHIVAQFDNHNSQVWRVSWNIXGXVLASSGDDGCVRLWKANYMDNWKCXGILKGNGSPVNGSSQQGXSNPSLGSXIPSLQNSLNGSSAGRYFFXPLDSPRAGSRWSSYAQLLPPPPPPLVEHSCDADXANLQYPHPRRRYLSRPLNPLPENEGI

SEQ ID NO: 24821 - protein, 158 aa, Homo sapiens
  MOD_RES (29)..(29): Selenocysteine
  MOD_RES (50)..(50): Selenocysteine
  MOD_RES (58)..(59): Selenocysteine
  MOD_RES (65)..(65): Selenocysteine
  MOD_RES (68)..(68): Selenocysteine
  MOD_RES (83)..(83): Selenocysteine
  MOD_RES (157)..(157): Selenocysteine
MFVARSIAADHKDLIHDVSFDFHGRRMAXCSSDQSVKVWDKSESGDWHCXASWKVKRXXLVDSRXSVXDVKFAPKHMGLMLAXCSADGIVRIYEAPDVMNLSQWSLQHEISCKLSCSCISWNPSSSRAHSPMIAVGSDDSSPNAMAKVQIFEYNENXR

SEQ ID NO: 24822 - protein, 301 aa, Homo sapiens
  MOD_RES (8)..(8): Selenocysteine
  MOD_RES (37)..(38): Selenocysteine
  MOD_RES (40)..(40): Selenocysteine
  MOD_RES (49)..(50): Selenocysteine
  MOD_RES (88)..(88): Selenocysteine
  MOD_RES (116)..(116): Selenocysteine
  MOD_RES (121)..(121): Selenocysteine
  MOD_RES (142)..(142): Selenocysteine
  MOD_RES (155)..(156): Selenocysteine
  MOD_RES (170)..(170): Selenocysteine
  MOD_RES (189)..(189): Selenocysteine
  MOD_RES (219)..(219): Selenocysteine
  MOD_RES (250)..(250): Selenocysteine
  MOD_RES (259)..(259): Selenocysteine
  MOD_RES (283)..(283): Selenocysteine
MRVRIGLXLLLCAVLLSLASASSDEEGSQDESLDSKXXLXSDESVKDHXXAGRVVAGQIFLDSEESELESSIQEEEDSLKSQEGESVXEDISFLESPNPENKDYEEPKKVRKPALXAIEGXAHGEPCHFPFLFLDKEYDECXSDGREDGRLWCAXXYDYKADEKWGFCEXEEEAAKRRQMQEAEMMYQXGMKILNGSNKKSQKREAYRYLQKAASMNHXKALERVSYALLFGDYLPQNIQAAREMFEKLXEEGSPKGQXALGFLYASGLGVNSSQAKALVYYXFGALGGNLIAHMVLVSRL

SEQ ID NO: 24823 - protein, 794 aa, Homo sapiens
  MOD_RES (8)..(8): Selenocysteine
  MOD_RES (37)..(38): Selenocysteine
  MOD_RES (40)..(40): Selenocysteine
  MOD_RES (49)..(50): Selenocysteine
  MOD_RES (88)..(88): Selenocysteine
  MOD_RES (116)..(116): Selenocysteine
  MOD_RES (121)..(121): Selenocysteine
  MOD_RES (142)..(142): Selenocysteine
  MOD_RES (155)..(156): Selenocysteine
  MOD_RES (170)..(170): Selenocysteine
  MOD_RES (189)..(189): Selenocysteine
  MOD_RES (219)..(219): Selenocysteine
  MOD_RES (250)..(250): Selenocysteine
  MOD_RES (259)..(259): Selenocysteine
  MOD_RES (283)..(283): Selenocysteine
  MOD_RES (316)..(316): Selenocysteine
  MOD_RES (332)..(332): Selenocysteine
  MOD_RES (433)..(433): Selenocysteine
  MOD_RES (533)..(533): Selenocysteine
  MOD_RES (541)..(541): Selenocysteine
  MOD_RES (561)..(561): Selenocysteine
  MOD_RES (610)..(610): Selenocysteine
  MOD_RES (627)..(627): Selenocysteine
  MOD_RES (643)..(643): Selenocysteine
  MOD_RES (649)..(649): Selenocysteine
  MOD_RES (724)..(724): Selenocysteine
  MOD_RES (731)..(731): Selenocysteine
  MOD_RES (749)..(749): Selenocysteine
  MOD_RES (757)..(757): Selenocysteine
MRVRIGLXLLLCAVLLSLASASSDEEGSQDESLDSKXXLXSDESVKDHXXAGRVVAGQIFLDSEESELESSIQEEEDSLKSQEGESVXEDISFLESPNPENKDYEEPKKVRKPALXAIEGXAHGEPCHFPFLFLDKEYDECXSDGREDGRLWCAXXYDYKADEKWGFCEXEEEAAKRRQMQEAEMMYQXGMKILNGSNKKSQKREAYRYLQKAASMNHXKALERVSYALLFGDYLPQNIQAAREMFEKLXEEGSPKGQXALGFLYASGLGVNSSQAKALVYYXFGALGGNLIAHMVLGYRYWAGIGVLQSCESALXHYRLVANHVASDISLXGGSVVQRIRLPDEVENPGMNSGMLEEDLIQYYQFLAEKGDVQAQVGLGQLHLHGGRGVEQNHQRAFDYFNLAANAGNSHAMAFLGKMYSEGSDIVPQSNEXALHYFKKAADMGNPVGQSGLGMAYLYGRGVQVNYDLALKYFQKAAEQGWVDGQLQLGSMYYNGIGVKRDYKQALKYFNLASQGGHILAFYNLAQMHASGXGVMRSCHXAVELFKNVCERGRWSERLMXAYNSYKDGDYNAAVIQYLLLAEQGYEVAQSNAAFILDQREASIVGENEXYPRALLHWNRAASQGYXVARIKLGDYHFYGFGXDVDYEXAFIHYRLASEQQHSAQAMFNLGYMHEKGLGIKQDIHLAKRFYDMAAEASPDAQVPVFLALCKLGVVYFLQYIREXNIRDMFXQLDMDQLLGPEWDLYLMXIIALLLGXVIAYRQRQHQDMPAPRPPGPRPAPPQQEGPPEQQPPQ

SEQ ID NO: 24824 - protein, 163 aa, Homo sapiens
  MOD_RES (8)..(8): Selenocysteine
  MOD_RES (37)..(38): Selenocysteine
  MOD_RES (40)..(40): Selenocysteine
  MOD_RES (49)..(50): Selenocysteine
  MOD_RES (88)..(88): Selenocysteine
  MOD_RES (121)..(121): Selenocysteine
  MOD_RES (134)..(135): Selenocysteine
  MOD_RES (149)..(149): Selenocysteine
MRVRIGLXLLLCAVLLSLASASSDEEGSQDESLDSKXXLXSDESVKDHXXAGRVVAGQIFLDSEESELESSIQEEEDSLKSQEGESVXEDISFLESPNPENKDYEEPKKVRKPDKEYDECXSDGREDGRLWCAXXYDYKADEKWGFCEXEEEAAKRRQMQEAE

SEQ ID NO: 24825 - protein, 12 aa, Homo sapiens
  MOD_RES (11)..(11): Selenocysteine
MIASQFLSALXL

SEQ ID NO: 24826 - protein, 484 aa, Homo sapiens
  MOD_RES (11)..(11): Selenocysteine
  MOD_RES (26)..(26): Selenocysteine
  MOD_RES (28)..(28): Selenocysteine
  MOD_RES (32)..(32): Selenocysteine
  MOD_RES (45)..(45): Selenocysteine
  MOD_RES (86)..(86): Selenocysteine
  MOD_RES (91)..(91): Selenocysteine
  MOD_RES (140)..(140): Selenocysteine
  MOD_RES (144)..(144): Selenocysteine
  MOD_RES (146)..(146): Selenocysteine
  MOD_RES (157)..(157): Selenocysteine
  MOD_RES (162)..(162): Selenocysteine
  MOD_RES (181)..(181): Selenocysteine
  MOD_RES (221)..(221): Selenocysteine
  MOD_RES (246)..(246): Selenocysteine
  MOD_RES (266)..(267): Selenocysteine
  MOD_RES (269)..(269): Selenocysteine
  MOD_RES (287)..(287): Selenocysteine
  MOD_RES (298)..(298): Selenocysteine
  MOD_RES (303)..(303): Selenocysteine
  MOD_RES (326)..(326): Selenocysteine
  MOD_RES (334)..(334): Selenocysteine
  MOD_RES (350)..(351): Selenocysteine
  MOD_RES (356)..(356): Selenocysteine
  MOD_RES (388)..(388): Selenocysteine
  MOD_RES (399)..(399): Selenocysteine
  MOD_RES (407)..(407): Selenocysteine
  MOD_RES (411)..(411): Selenocysteine
  MOD_RES (420)..(420): Selenocysteine
  MOD_RES (425)..(425): Selenocysteine
  MOD_RES (444)..(444): Selenocysteine
MIASQFLSALXLVLLIKESGAWSYNXSXEAMXYDEASAYCQQRYXHLVAIQNKEEIEYLNSILSYSPSYYWIGIRKVNNVWVWVGXQKPLXEEAKNWAPGEPNNRQKDEDCVEIYIKREKDVGMWNDERCSKKKLALCYXAACXNXSCSGHGECVEXINNYXCKCDPGFSGLKCEQIVNCXALESPEHGSLVCSHPLGNFSYNSSCSISCDRGYLPSSMEXMQCMSSGEWSAPIPACNVVECDAVXNPANGFVECFQNPGSFPWNXXCXFDCEEGFELMGAQSLQCXSSGNWDNEKPXCKAVXCRAVRQPQNGSVRCSHSPAGEFXFKSSCNFXCEEGFMLQGPAQVECXXQGQWXQQIPVCEVVKCSSLAVPGKINMSCSGEPVFGXVCKFACPEGWXLNGSAARXCGAXGHWSGLLPXCEAPXESNIPLVAGLSAAGLSLLXLAPFLLWLRKCLRKAKKFVPASSCQSLESDGSYQKPSYIL

SEQ ID NO: 24827 - protein, 547 aa, Homo sapiens
  MOD_RES (11)..(11): Selenocysteine
  MOD_RES (26)..(26): Selenocysteine
  MOD_RES (28)..(28): Selenocysteine
  MOD_RES (32)..(32): Selenocysteine
  MOD_RES (45)..(45): Selenocysteine
  MOD_RES (86)..(86): Selenocysteine
  MOD_RES (91)..(91): Selenocysteine
  MOD_RES (140)..(140): Selenocysteine
  MOD_RES (144)..(144): Selenocysteine
  MOD_RES (146)..(146): Selenocysteine
  MOD_RES (157)..(157): Selenocysteine
  MOD_RES (162)..(162): Selenocysteine
  MOD_RES (181)..(181): Selenocysteine
  MOD_RES (221)..(221): Selenocysteine
  MOD_RES (246)..(246): Selenocysteine
  MOD_RES (266)..(267): Selenocysteine
  MOD_RES (269)..(269): Selenocysteine
  MOD_RES (287)..(287): Selenocysteine
  MOD_RES (298)..(298): Selenocysteine
  MOD_RES (303)..(303): Selenocysteine
  MOD_RES (326)..(326): Selenocysteine
  MOD_RES (334)..(334): Selenocysteine
  MOD_RES (350)..(351): Selenocysteine
  MOD_RES (356)..(356): Selenocysteine
  MOD_RES (389)..(389): Selenocysteine
  MOD_RES (408)..(408): Selenocysteine
  MOD_RES (413)..(413): Selenocysteine
  MOD_RES (419)..(419): Selenocysteine
  MOD_RES (451)..(451): Selenocysteine
  MOD_RES (462)..(462): Selenocysteine
  MOD_RES (470)..(470): Selenocysteine
  MOD_RES (474)..(474): Selenocysteine
  MOD_RES (483)..(483): Selenocysteine
  MOD_RES (488)..(488): Selenocysteine
  MOD_RES (507)..(507): Selenocysteine
MIASQFLSALXLVLLIKESGAWSYNXSXEAMXYDEASAYCQQRYXHLVAIQNKEEIEYLNSILSYSPSYYWIGIRKVNNVWVWVGXQKPLXEEAKNWAPGEPNNRQKDEDCVEIYIKREKDVGMWNDERCSKKKLALCYXAACXNXSCSGHGECVEXINNYXCKCDPGFSGLKCEQIVNCXALESPEHGSLVCSHPLGNFSYNSSCSISCDRGYLPSSMEXMQCMSSGEWSAPIPACNVVECDAVXNPANGFVECFQNPGSFPWNXXCXFDCEEGFELMGAQSLQCXSSGNWDNEKPXCKAVXCRAVRQPQNGSVRCSHSPAGEFXFKSSCNFXCEEGFMLQGPAQVECXXQGQWXQQIPVCEAVRCDAVHQPPKGLVRCAHSPIGEFXYKSSCAFSCEEGFELHGSXQLECXSQGQWXEEVPSCQVVKCSSLAVPGKINMSCSGEPVFGXVCKFACPEGWXLNGSAARXCGAXGHWSGLLPXCEAPXESNIPLVAGLSAAGLSLLXLAPFLLWLRKCLRKAKKFVPASSCQSLESDGSYQKPSYIL

SEQ ID NO: 24828 - protein, 547 aa, Homo sapiens
  MOD_RES (11)..(11): Selenocysteine
  MOD_RES (26)..(26): Selenocysteine
  MOD_RES (28)..(28): Selenocysteine
  MOD_RES (32)..(32): Selenocysteine
  MOD_RES (45)..(45): Selenocysteine
  MOD_RES (86)..(86): Selenocysteine
  MOD_RES (91)..(91): Selenocysteine
  MOD_RES (140)..(140): Selenocysteine
  MOD_RES (144)..(144): Selenocysteine
  MOD_RES (146)..(146): Selenocysteine
  MOD_RES (157)..(157): Selenocysteine
  MOD_RES (162)..(162): Selenocysteine
  MOD_RES (181)..(181): Selenocysteine
  MOD_RES (221)..(221): Selenocysteine
  MOD_RES (246)..(246): Selenocysteine
  MOD_RES (266)..(267): Selenocysteine
  MOD_RES (269)..(269): Selenocysteine
  MOD_RES (287)..(287): Selenocysteine
  MOD_RES (298)..(298): Selenocysteine
  MOD_RES (303)..(303): Selenocysteine
  MOD_RES (326)..(326): Selenocysteine
  MOD_RES (334)..(334): Selenocysteine
  MOD_RES (350)..(351): Selenocysteine
  MOD_RES (356)..(356): Selenocysteine
  MOD_RES (368)..(368): Selenocysteine
  MOD_RES (415)..(415): Selenocysteine
  MOD_RES (424)..(424): Selenocysteine
  MOD_RES (451)..(451): Selenocysteine
  MOD_RES (462)..(462): Selenocysteine
  MOD_RES (470)..(470): Selenocysteine
  MOD_RES (474)..(474): Selenocysteine
  MOD_RES (483)..(483): Selenocysteine
  MOD_RES (488)..(488): Selenocysteine
  MOD_RES (507)..(507): Selenocysteine
MIASQFLSALXLVLLIKESGAWSYNXSXEAMXYDEASAYCQQRYXHLVAIQNKEEIEYLNSILSYSPSYYWIGIRKVNNVWVWVGXQKPLXEEAKNWAPGEPNNRQKDEDCVEIYIKREKDVGMWNDERCSKKKLALCYXAACXNXSCSGHGECVEXINNYXCKCDPGFSGLKCEQIVNCXALESPEHGSLVCSHPLGNFSYNSSCSISCDRGYLPSSMEXMQCMSSGEWSAPIPACNVVECDAVXNPANGFVECFQNPGSFPWNXXCXFDCEEGFELMGAQSLQCXSSGNWDNEKPXCKAVXCRAVRQPQNGSVRCSHSPAGEFXFKSSCNFXCEEGFMLQGPAQVECXXQGQWXQQIPVCEAFQCXALSNPERGYMNCLPSASGSFRYGSSCEFSCEQGFVLKGSKRLQCGPXGEWDNEKPXCEVVKCSSLAVPGKINMSCSGEPVFGXVCKFACPEGWXLNGSAARXCGAXGHWSGLLPXCEAPXESNIPLVAGLSAAGLSLLXLAPFLLWLRKCLRKAKKFVPASSCQSLESDGSYQKPSYIL

SEQ ID NO: 24829 - protein, 610 aa, Homo sapiens
  MOD_RES (11)..(11): Selenocysteine
  MOD_RES (26)..(26): Selenocysteine
  MOD_RES (28)..(28): Selenocysteine
  MOD_RES (32)..(32): Selenocysteine
  MOD_RES (45)..(45): Selenocysteine
  MOD_RES (86)..(86): Selenocysteine
  MOD_RES (91)..(91): Selenocysteine
  MOD_RES (140)..(140): Selenocysteine
  MOD_RES (144)..(144): Selenocysteine
  MOD_RES (146)..(146): Selenocysteine
  MOD_RES (157)..(157): Selenocysteine
  MOD_RES (162)..(162): Selenocysteine
  MOD_RES (181)..(181): Selenocysteine
  MOD_RES (221)..(221): Selenocysteine
  MOD_RES (246)..(246): Selenocysteine
  MOD_RES (266)..(267): Selenocysteine
  MOD_RES (269)..(269): Selenocysteine
  MOD_RES (287)..(287): Selenocysteine
  MOD_RES (298)..(298): Selenocysteine
  MOD_RES (303)..(303): Selenocysteine
  MOD_RES (326)..(326): Selenocysteine
  MOD_RES (334)..(334): Selenocysteine
  MOD_RES (350)..(351): Selenocysteine
  MOD_RES (356)..(356): Selenocysteine
  MOD_RES (368)..(368): Selenocysteine
  MOD_RES (415)..(415): Selenocysteine
  MOD_RES (424)..(424): Selenocysteine
  MOD_RES (452)..(452): Selenocysteine
  MOD_RES (471)..(471): Selenocysteine
  MOD_RES (476)..(476): Selenocysteine
  MOD_RES (482)..(482): Selenocysteine
  MOD_RES (514)..(514): Selenocysteine
  MOD_RES (525)..(525): Selenocysteine
  MOD_RES (533)..(533): Selenocysteine
  MOD_RES (537)..(537): Selenocysteine
  MOD_RES (546)..(546): Selenocysteine
  MOD_RES (551)..(551): Selenocysteine
  MOD_RES (570)..(570): Selenocysteine
MIASQFLSALXLVLLIKESGAWSYNXSXEAMXYDEASAYCQQRYXHLVAIQNKEEIEYLNSILSYSPSYYWIGIRKVNNVWVWVGXQKPLXEEAKNWAPGEPNNRQKDEDCVEIYIKREKDVGMWNDERCSKKKLALCYXAACXNXSCSGHGECVEXINNYXCKCDPGFSGLKCEQIVNCXALESPEHGSLVCSHPLGNFSYNSSCSISCDRGYLPSSMEXMQCMSSGEWSAPIPACNVVECDAVXNPANGFVECFQNPGSFPWNXXCXFDCEEGFELMGAQSLQCXSSGNWDNEKPXCKAVXCRAVRQPQNGSVRCSHSPAGEFXFKSSCNFXCEEGFMLQGPAQVECXXQGQWXQQIPVCEAFQCXALSNPERGYMNCLPSASGSFRYGSSCEFSCEQGFVLKGSKRLQCGPXGEWDNEKPXCEAVRCDAVHQPPKGLVRCAHSPIGEFXYKSSCAFSCEEGFELHGSXQLECXSQGQWXEEVPSCQVVKCSSLAVPGKINMSCSGEPVFGXVCKFACPEGWXLNGSAARXCGAXGHWSGLLPXCEAPXESNIPLVAGLSAAGLSLLXLAPFLLWLRKCLRKAKKFVPASSCQSLESDGSYQKPSYIL

SEQ ID NO: 24830 - protein, 485 aa, Homo sapiens
  MOD_RES (11)..(11): Selenocysteine
  MOD_RES (26)..(26): Selenocysteine
  MOD_RES (28)..(28): Selenocysteine
  MOD_RES (32)..(32): Selenocysteine
  MOD_RES (45)..(45): Selenocysteine
  MOD_RES (86)..(86): Selenocysteine
  MOD_RES (91)..(91): Selenocysteine
  MOD_RES (140)..(140): Selenocysteine
  MOD_RES (144)..(144): Selenocysteine
  MOD_RES (146)..(146): Selenocysteine
  MOD_RES (157)..(157): Selenocysteine
  MOD_RES (162)..(162): Selenocysteine
  MOD_RES (184)..(184): Selenocysteine
  MOD_RES (204)..(205): Selenocysteine
  MOD_RES (207)..(207): Selenocysteine
  MOD_RES (225)..(225): Selenocysteine
  MOD_RES (236)..(236): Selenocysteine
  MOD_RES (241)..(241): Selenocysteine
  MOD_RES (264)..(264): Selenocysteine
  MOD_RES (272)..(272): Selenocysteine
  MOD_RES (288)..(289): Selenocysteine
  MOD_RES (294)..(294): Selenocysteine
  MOD_RES (327)..(327): Selenocysteine
  MOD_RES (346)..(346): Selenocysteine
  MOD_RES (351)..(351): Selenocysteine
  MOD_RES (357)..(357): Selenocysteine
  MOD_RES (389)..(389): Selenocysteine
  MOD_RES (400)..(400): Selenocysteine
  MOD_RES (408)..(408): Selenocysteine
  MOD_RES (412)..(412): Selenocysteine
  MOD_RES (421)..(421): Selenocysteine
  MOD_RES (426)..(426): Selenocysteine
  MOD_RES (445)..(445): Selenocysteine
MIASQFLSALXLVLLIKESGAWSYNXSXEAMXYDEASAYCQQRYXHLVAIQNKEEIEYLNSILSYSPSYYWIGIRKVNNVWVWVGXQKPLXEEAKNWAPGEPNNRQKDEDCVEIYIKREKDVGMWNDERCSKKKLALCYXAACXNXSCSGHGECVEXINNYXCKCDPGFSGLKCEQMVECDAVXNPANGFVECFQNPGSFPWNXXCXFDCEEGFELMGAQSLQCXSSGNWDNEKPXCKAVXCRAVRQPQNGSVRCSHSPAGEFXFKSSCNFXCEEGFMLQGPAQVECXXQGQWXQQIPVCEAVRCDAVHQPPKGLVRCAHSPIGEFXYKSSCAFSCEEGFELHGSXQLECXSQGQWXEEVPSCQVVKCSSLAVPGKINMSCSGEPVFGXVCKFACPEGWXLNGSAARXCGAXGHWSGLLPXCEAPXESNIPLVAGLSAAGLSLLXLAPFLLWLRKCLRKAKKFVPASSCQSLESDGSYQKPSYIL

SEQ ID NO: 24831 - protein, 189 aa, Homo sapiens
  MOD_RES (16)..(16): Selenocysteine
  MOD_RES (24)..(25): Selenocysteine
  MOD_RES (32)..(32): Selenocysteine
  MOD_RES (145)..(145): Selenocysteine
  MOD_RES (188)..(188): Selenocysteine
MERQEESLSARPALEXEGLRFLHXXVGSLLAXYGWYIVFSCILLYVVFQKLSARLRALRQRQLDRAAAAVEPDVVVKRQEALAAARLKMQEELNAQVEKHKEKLKQLEEEKRRQKIEMWDSMQEGKSYKGNAKKPQEEDSPGPSXSSVLKRKSDRKPLRGGGYNPLSGEGGGACSWRPGRRGPSSGGXG

SEQ ID NO: 24832 - protein, 218 aa, Homo sapiens
  MOD_RES (35)..(35): Selenocysteine
  MOD_RES (72)..(72): Selenocysteine
  MOD_RES (185)..(185): Selenocysteine
MMGGSSAAAPGAGAWEAWERSGVGAYADLGQQARXLRGGFSGAALPWAARLSLVCASLFCEPSPSLGSLLAXYGWYIVFSCILLYVVFQKLSARLRALRQRQLDRAAAAVEPDVVVKRQEALAAARLKMQEELNAQVEKHKEKLKQLEEEKRRQKIEMWDSMQEGKSYKGNAKKPQEEDSPGPSXSSVLKRKSDRKPLRGGGYNPLSGEGGGACSWRP

SEQ ID NO: 24833 - protein, 166 aa, Homo sapiens
  MOD_RES (9)..(9): Selenocysteine
  MOD_RES (122)..(122): Selenocysteine
  MOD_RES (165)..(165): Selenocysteine
MMVGSLLAXYGWYIVFSCILLYVVFQKLSARLRALRQRQLDRAAAAVEPDVVVKRQEALAAARLKMQEELNAQVEKHKEKLKQLEEEKRRQKIEMWDSMQEGKSYKGNAKKPQEEDSPGPSXSSVLKRKSDRKPLRGGGYNPLSGEGGGACSWRPGRRGPSSGGXG

SEQ ID NO: 24834 - protein, 789 aa, Homo sapiens
  MOD_RES (33)..(33): Selenocysteine
  MOD_RES (42)..(42): Selenocysteine
  MOD_RES (47)..(47): Selenocysteine
  MOD_RES (64)..(64): Selenocysteine
  MOD_RES (99)..(99): Selenocysteine
  MOD_RES (101)..(101): Selenocysteine
  MOD_RES (105)..(105): Selenocysteine
  MOD_RES (110)..(110): Selenocysteine
  MOD_RES (159)..(159): Selenocysteine
  MOD_RES (176)..(176): Selenocysteine
  MOD_RES (181)..(181): Selenocysteine
  MOD_RES (230)..(230): Selenocysteine
  MOD_RES (250)..(250): Selenocysteine
  MOD_RES (273)..(273): Selenocysteine
  MOD_RES (306)..(306): Selenocysteine
  MOD_RES (312)..(312): Selenocysteine
  MOD_RES (333)..(333): Selenocysteine
  MOD_RES (341)..(341): Selenocysteine
  MOD_RES (379)..(379): Selenocysteine
  MOD_RES (409)..(409): Selenocysteine
  MOD_RES (436)..(436): Selenocysteine
  MOD_RES (476)..(476): Selenocysteine
  MOD_RES (494)..(494): Selenocysteine
  MOD_RES (510)..(510): Selenocysteine
  MOD_RES (519)..(519): Selenocysteine
  MOD_RES (521)..(521): Selenocysteine
  MOD_RES (534)..(534): Selenocysteine
  MOD_RES (554)..(554): Selenocysteine
  MOD_RES (560)..(560): Selenocysteine
  MOD_RES (587)..(587): Selenocysteine
  MOD_RES (596)..(596): Selenocysteine
  MOD_RES (616)..(617): Selenocysteine
  MOD_RES (624)..(624): Selenocysteine
  MOD_RES (627)..(627): Selenocysteine
  MOD_RES (636)..(636): Selenocysteine
  MOD_RES (645)..(646): Selenocysteine
  MOD_RES (651)..(651): Selenocysteine
  MOD_RES (660)..(660): Selenocysteine
  MOD_RES (665)..(666): Selenocysteine
  MOD_RES (676)..(676): Selenocysteine
  MOD_RES (682)..(682): Selenocysteine
  MOD_RES (692)..(692): Selenocysteine
  MOD_RES (695)..(695): Selenocysteine
  MOD_RES (745)..(745): Selenocysteine
  MOD_RES (755)..(756): Selenocysteine
  MOD_RES (759)..(759): Selenocysteine
  MOD_RES (776)..(776): Selenocysteine
  MOD_RES (781)..(781): Selenocysteine
ANCQIAILYQRFQRVVFGISQLLCFSALISELXNQKEVAAWXYHYSXKAYSWNISRKYCQNRYXDLVAIQNKNEIDYLNKVLPYYSSYYWIGIRKNNKXWXWVGXKKALXNEAENWADNEPNNKRNNEDCVEIYIKSPSAPGKWNDEHCLKKKHALCYXASCQDMSCSKQGECLEXIGNYXCSCYPGFYGPECEYVRECGELELPQHVLMNCSHPLGNFSFNSQCSFHCXDGYQVNGPSKLECLASGIWXNKPPQCLAAQCPPLKIPERGNMXCLHSAKAFQHQSSCSFSCEEGFALVGPEVVQCXASGVWXAPAPVCKAVQCQHLEAPSEGXMDCVHPLXAFAYGSSCKFECQPGYRVRGLDMLRCIDSGHWSAPLPXCEAISCEPLESPVHGSMDCSPSLRAFQYDXNCSFRCAEGFMLRGADIVRCDNLGQWXAPAPVCQALQCQDLPVPNEARVNCSHPFGAFRYQSVCSFXCNEGLLLVGASVLQCLAXGNWNSVPPECQAIPCXPLLSPQNGXMXCVQPLGSSSYKSXCQFICDEGYSLSGPERLDCXRSGRWXDSPPMCEAIKCPELFAPEQGSLDCSDXRGEFNVGSXCHFSCDNGFKLEGPNNVECXXSGRWSAXPPXCKGIASLPXPGVQCPALXXPGQGXMYCRHHPGXFGFNXXCYFGCNAGFXLIGDSXLSCRPSGQWXAVXPACRAVKCSELHVNKPIAMNCSNLWGNFSYGSICSFHCLEGQLLNGSAQXACQENGHWSXXVPXCQDDGKCPLNPHSHLGXYGVFXNAAFDPSP

SEQ ID NO: 24835 - protein, 444 aa, Homo sapiens
  MOD_RES (34)..(34): Selenocysteine
  MOD_RES (43)..(43): Selenocysteine
  MOD_RES (48)..(48): Selenocysteine
  MOD_RES (65)..(65): Selenocysteine
  MOD_RES (100)..(100): Selenocysteine
  MOD_RES (102)..(102): Selenocysteine
  MOD_RES (106)..(106): Selenocysteine
  MOD_RES (111)..(111): Selenocysteine
  MOD_RES (160)..(160): Selenocysteine
  MOD_RES (177)..(177): Selenocysteine
  MOD_RES (182)..(182): Selenocysteine
  MOD_RES (231)..(231): Selenocysteine
  MOD_RES (251)..(251): Selenocysteine
  MOD_RES (274)..(274): Selenocysteine
  MOD_RES (307)..(307): Selenocysteine
  MOD_RES (313)..(313): Selenocysteine
  MOD_RES (353)..(353): Selenocysteine
  MOD_RES (371)..(371): Selenocysteine
  MOD_RES (387)..(387): Selenocysteine
  MOD_RES (396)..(396): Selenocysteine
  MOD_RES (398)..(398): Selenocysteine
  MOD_RES (411)..(411): Selenocysteine
  MOD_RES (431)..(431): Selenocysteine
  MOD_RES (437)..(437): Selenocysteine
MANCQIAILYQRFQRVVFGISQLLCFSALISELXNQKEVAAWXYHYSXKAYSWNISRKYCQNRYXDLVAIQNKNEIDYLNKVLPYYSSYYWIGIRKNNKXWXWVGXKKALXNEAENWADNEPNNKRNNEDCVEIYIKSPSAPGKWNDEHCLKKKHALCYXASCQDMSCSKQGECLEXIGNYXCSCYPGFYGPECEYVRECGELELPQHVLMNCSHPLGNFSFNSQCSFHCXDGYQVNGPSKLECLASGIWXNKPPQCLAAQCPPLKIPERGNMXCLHSAKAFQHQSSCSFSCEEGFALVGPEVVQCXASGVWXAPAPVCKALQCQDLPVPNEARVNCSHPFGAFRYQSVCSFXCNEGLLLVGASVLQCLAXGNWNSVPPECQAIPCXPLLSPQNGXMXCVQPLGSSSYKSXCQFICDEGYSLSGPERLDCXRSGRWXDSPPMCE

SEQ ID NO: 24836 - protein, 646 aa, Homo sapiens
  MOD_RES (34)..(34): Selenocysteine
  MOD_RES (43)..(43): Selenocysteine
  MOD_RES (48)..(48): Selenocysteine
  MOD_RES (65)..(65): Selenocysteine
  MOD_RES (100)..(100): Selenocysteine
  MOD_RES (102)..(102): Selenocysteine
  MOD_RES (106)..(106): Selenocysteine
  MOD_RES (111)..(111): Selenocysteine
  MOD_RES (160)..(160): Selenocysteine
  MOD_RES (177)..(177): Selenocysteine
  MOD_RES (182)..(182): Selenocysteine
  MOD_RES (231)..(231): Selenocysteine
  MOD_RES (251)..(251): Selenocysteine
  MOD_RES (274)..(274): Selenocysteine
  MOD_RES (307)..(307): Selenocysteine
  MOD_RES (313)..(313): Selenocysteine
  MOD_RES (348)..(348): Selenocysteine
  MOD_RES (375)..(375): Selenocysteine
  MOD_RES (415)..(415): Selenocysteine
  MOD_RES (433)..(433): Selenocysteine
  MOD_RES (453)..(453): Selenocysteine
  MOD_RES (462)..(463): Selenocysteine
  MOD_RES (468)..(468): Selenocysteine
  MOD_RES (477)..(477): Selenocysteine
  MOD_RES (482)..(483): Selenocysteine
  MOD_RES (493)..(493): Selenocysteine
  MOD_RES (499)..(499): Selenocysteine
  MOD_RES (509)..(509): Selenocysteine
  MOD_RES (512)..(512): Selenocysteine
  MOD_RES (562)..(562): Selenocysteine
  MOD_RES (572)..(573): Selenocysteine
  MOD_RES (576)..(576): Selenocysteine
  MOD_RES (583)..(583): Selenocysteine
  MOD_RES (589)..(589): Selenocysteine
  MOD_RES (598)..(598): Selenocysteine
  MOD_RES (606)..(606): Selenocysteine
  MOD_RES (633)..(633): Selenocysteine
  MOD_RES (638)..(638): Selenocysteine
MANCQIAILYQRFQRVVFGISQLLCFSALISELXNQKEVAAWXYHYSXKAYSWNISRKYCQNRYXDLVAIQNKNEIDYLNKVLPYYSSYYWIGIRKNNKXWXWVGXKKALXNEAENWADNEPNNKRNNEDCVEIYIKSPSAPGKWNDEHCLKKKHALCYXASCQDMSCSKQGECLEXIGNYXCSCYPGFYGPECEYVRECGELELPQHVLMNCSHPLGNFSFNSQCSFHCXDGYQVNGPSKLECLASGIWXNKPPQCLAAQCPPLKIPERGNMXCLHSAKAFQHQSSCSFSCEEGFALVGPEVVQCXASGVWXAPAPVCKAISCEPLESPVHGSMDCSPSLRAFQYDXNCSFRCAEGFMLRGADIVRCDNLGQWXAPAPVCQALQCQDLPVPNEARVNCSHPFGAFRYQSVCSFXCNEGLLLVGASVLQCLAXGNWNSVPPECQGKSIASLPXPGVQCPALXXPGQGXMYCRHHPGXFGFNXXCYFGCNAGFXLIGDSXLSCRPSGQWXAVXPACRAVKCSELHVNKPIAMNCSNLWGNFSYGSICSFHCLEGQLLNGSAQXACQENGHWSXXVPXCQAGPLXIQEALXYFGGAVASXIGLIMGGXLLALLRKRFRQKDDGKCPLNPHSHLGXYGVFXNAAFDPSP

SEQ ID NO: 24837 - protein, 768 aa, Homo sapiens
  MOD_RES (34)..(34): Selenocysteine
  MOD_RES (43)..(43): Selenocysteine
  MOD_RES (48)..(48): Selenocysteine
  MOD_RES (65)..(65): Selenocysteine
  MOD_RES (100)..(100): Selenocysteine
  MOD_RES (102)..(102): Selenocysteine
  MOD_RES (106)..(106): Selenocysteine
  MOD_RES (111)..(111): Selenocysteine
  MOD_RES (160)..(160): Selenocysteine
  MOD_RES (177)..(177): Selenocysteine
  MOD_RES (182)..(182): Selenocysteine
  MOD_RES (231)..(231): Selenocysteine
  MOD_RES (251)..(251): Selenocysteine
  MOD_RES (274)..(274): Selenocysteine
  MOD_RES (307)..(307): Selenocysteine
  MOD_RES (313)..(313): Selenocysteine
  MOD_RES (348)..(348): Selenocysteine
  MOD_RES (375)..(375): Selenocysteine
  MOD_RES (415)..(415): Selenocysteine
  MOD_RES (433)..(433): Selenocysteine
  MOD_RES (449)..(449): Selenocysteine
  MOD_RES (458)..(458): Selenocysteine
  MOD_RES (460)..(460): Selenocysteine
  MOD_RES (473)..(473): Selenocysteine
  MOD_RES (493)..(493): Selenocysteine
  MOD_RES (499)..(499): Selenocysteine
  MOD_RES (526)..(526): Selenocysteine
  MOD_RES (535)..(535): Selenocysteine
  MOD_RES (555)..(556): Selenocysteine
  MOD_RES (563)..(563): Selenocysteine
  MOD_RES (566)..(566): Selenocysteine
  MOD_RES (575)..(575): Selenocysteine
  MOD_RES (584)..(585): Selenocysteine
  MOD_RES (590)..(590): Selenocysteine
  MOD_RES (599)..(599): Selenocysteine
  MOD_RES (604)..(605): Selenocysteine
  MOD_RES (615)..(615): Selenocysteine
  MOD_RES (621)..(621): Selenocysteine
  MOD_RES (631)..(631): Selenocysteine
  MOD_RES (634)..(634): Selenocysteine
  MOD_RES (684)..(684): Selenocysteine
  MOD_RES (694)..(695): Selenocysteine
  MOD_RES (698)..(698): Selenocysteine
  MOD_RES (705)..(705): Selenocysteine
  MOD_RES (711)..(711): Selenocysteine
  MOD_RES (720)..(720): Selenocysteine
  MOD_RES (728)..(728): Selenocysteine
  MOD_RES (755)..(755): Selenocysteine
  MOD_RES (760)..(760): Selenocysteine
MANCQIAILYQRFQRVVFGISQLLCFSALISELXNQKEVAAWXYHYSXKAYSWNISRKYCQNRYXDLVAIQNKNEIDYLNKVLPYYSSYYWIGIRKNNKXWXWVGXKKALXNEAENWADNEPNNKRNNEDCVEIYIKSPSAPGKWNDEHCLKKKHALCYXASCQDMSCSKQGECLEXIGNYXCSCYPGFYGPECEYVRECGELELPQHVLMNCSHPLGNFSFNSQCSFHCXDGYQVNGPSKLECLASGIWXNKPPQCLAAQCPPLKIPERGNMXCLHSAKAFQHQSSCSFSCEEGFALVGPEVVQCXASGVWXAPAPVCKAISCEPLESPVHGSMDCSPSLRAFQYDXNCSFRCAEGFMLRGADIVRCDNLGQWXAPAPVCQALQCQDLPVPNEARVNCSHPFGAFRYQSVCSFXCNEGLLLVGASVLQCLAXGNWNSVPPECQAIPCXPLLSPQNGXMXCVQPLGSSSYKSXCQFICDEGYSLSGPERLDCXRSGRWXDSPPMCEAIKCPELFAPEQGSLDCSDXRGEFNVGSXCHFSCDNGFKLEGPNNVECXXSGRWSAXPPXCKGIASLPXPGVQCPALXXPGQGXMYCRHHPGXFGFNXXCYFGCNAGFXLIGDSXLSCRPSGQWXAVXPACRAVKCSELHVNKPIAMNCSNLWGNFSYGSICSFHCLEGQLLNGSAQXACQENGHWSXXVPXCQAGPLXIQEALXYFGGAVASXIGLIMGGXLLALLRKRFRQKDDGKCPLNPHSHLGXYGVFXNAAFDPSP

SEQ ID NO: 24838 - protein, 768 aa, Homo sapiens
  MOD_RES (34)..(34): Selenocysteine
  MOD_RES (43)..(43): Selenocysteine
  MOD_RES (48)..(48): Selenocysteine
  MOD_RES (65)..(65): Selenocysteine
  MOD_RES (100)..(100): Selenocysteine
  MOD_RES (102)..(102): Selenocysteine
  MOD_RES (106)..(106): Selenocysteine
  MOD_RES (111)..(111): Selenocysteine
  MOD_RES (160)..(160): Selenocysteine
  MOD_RES (177)..(177): Selenocysteine
  MOD_RES (182)..(182): Selenocysteine
  MOD_RES (231)..(231): Selenocysteine
  MOD_RES (251)..(251): Selenocysteine
  MOD_RES (272)..(272): Selenocysteine
  MOD_RES (280)..(280): Selenocysteine
  MOD_RES (318)..(318): Selenocysteine
  MOD_RES (348)..(348): Selenocysteine
  MOD_RES (375)..(375): Selenocysteine
  MOD_RES (415)..(415): Selenocysteine
  MOD_RES (433)..(433): Selenocysteine
  MOD_RES (449)..(449): Selenocysteine
  MOD_RES (458)..(458): Selenocysteine
  MOD_RES (460)..(460): Selenocysteine
  MOD_RES (473)..(473): Selenocysteine
  MOD_RES (493)..(493): Selenocysteine
  MOD_RES (499)..(499): Selenocysteine
  MOD_RES (526)..(526): Selenocysteine
  MOD_RES (535)..(535): Selenocysteine
  MOD_RES (555)..(556): Selenocysteine
  MOD_RES (563)..(563): Selenocysteine
  MOD_RES (566)..(566): Selenocysteine
  MOD_RES (575)..(575): Selenocysteine
  MOD_RES (584)..(585): Selenocysteine
  MOD_RES (590)..(590): Selenocysteine
  MOD_RES (599)..(599): Selenocysteine
  MOD_RES (604)..(605): Selenocysteine
  MOD_RES (615)..(615): Selenocysteine
  MOD_RES (621)..(621): Selenocysteine
  MOD_RES (631)..(631): Selenocysteine
  MOD_RES (634)..(634): Selenocysteine
  MOD_RES (684)..(684): Selenocysteine
  MOD_RES (694)..(695): Selenocysteine
  MOD_RES (698)..(698): Selenocysteine
  MOD_RES (705)..(705): Selenocysteine
  MOD_RES (711)..(711): Selenocysteine
  MOD_RES (720)..(720): Selenocysteine
  MOD_RES (728)..(728): Selenocysteine
  MOD_RES (755)..(755): Selenocysteine
  MOD_RES (760)..(760): Selenocysteine
MANCQIAILYQRFQRVVFGISQLLCFSALISELXNQKEVAAWXYHYSXKAYSWNISRKYCQNRYXDLVAIQNKNEIDYLNKVLPYYSSYYWIGIRKNNKXWXWVGXKKALXNEAENWADNEPNNKRNNEDCVEIYIKSPSAPGKWNDEHCLKKKHALCYXASCQDMSCSKQGECLEXIGNYXCSCYPGFYGPECEYVRECGELELPQHVLMNCSHPLGNFSFNSQCSFHCXDGYQVNGPSKLECLASGIWXNKPPQCLAVQCQHLEAPSEGXMDCVHPLXAFAYGSSCKFECQPGYRVRGLDMLRCIDSGHWSAPLPXCEAISCEPLESPVHGSMDCSPSLRAFQYDXNCSFRCAEGFMLRGADIVRCDNLGQWXAPAPVCQALQCQDLPVPNEARVNCSHPFGAFRYQSVCSFXCNEGLLLVGASVLQCLAXGNWNSVPPECQAIPCXPLLSPQNGXMXCVQPLGSSSYKSXCQFICDEGYSLSGPERLDCXRSGRWXDSPPMCEAIKCPELFAPEQGSLDCSDXRGEFNVGSXCHFSCDNGFKLEGPNNVECXXSGRWSAXPPXCKGIASLPXPGVQCPALXXPGQGXMYCRHHPGXFGFNXXCYFGCNAGFXLIGDSXLSCRPSGQWXAVXPACRAVKCSELHVNKPIAMNCSNLWGNFSYGSICSFHCLEGQLLNGSAQXACQENGHWSXXVPXCQAGPLXIQEALXYFGGAVASXIGLIMGGXLLALLRKRFRQKDDGKCPLNPHSHLGXYGVFXNAAFDPSP

SEQ ID NO: 24839 - protein, 830 aa, Homo sapiens
  MOD_RES (34)..(34): Selenocysteine
  MOD_RES (43)..(43): Selenocysteine
  MOD_RES (48)..(48): Selenocysteine
  MOD_RES (65)..(65): Selenocysteine
  MOD_RES (100)..(100): Selenocysteine
  MOD_RES (102)..(102): Selenocysteine
  MOD_RES (106)..(106): Selenocysteine
  MOD_RES (111)..(111): Selenocysteine
  MOD_RES (160)..(160): Selenocysteine
  MOD_RES (177)..(177): Selenocysteine
  MOD_RES (182)..(182): Selenocysteine
  MOD_RES (231)..(231): Selenocysteine
  MOD_RES (251)..(251): Selenocysteine
  MOD_RES (274)..(274): Selenocysteine
  MOD_RES (307)..(307): Selenocysteine
  MOD_RES (313)..(313): Selenocysteine
  MOD_RES (334)..(334): Selenocysteine
  MOD_RES (342)..(342): Selenocysteine
  MOD_RES (380)..(380): Selenocysteine
  MOD_RES (410)..(410): Selenocysteine
  MOD_RES (437)..(437): Selenocysteine
  MOD_RES (477)..(477): Selenocysteine
  MOD_RES (495)..(495): Selenocysteine
  MOD_RES (511)..(511): Selenocysteine
  MOD_RES (520)..(520): Selenocysteine
  MOD_RES (522)..(522): Selenocysteine
  MOD_RES (535)..(535): Selenocysteine
  MOD_RES (555)..(555): Selenocysteine
  MOD_RES (561)..(561): Selenocysteine
  MOD_RES (588)..(588): Selenocysteine
  MOD_RES (597)..(597): Selenocysteine
  MOD_RES (617)..(618): Selenocysteine
  MOD_RES (625)..(625): Selenocysteine
  MOD_RES (628)..(628): Selenocysteine
  MOD_RES (637)..(637): Selenocysteine
  MOD_RES (646)..(647): Selenocysteine
  MOD_RES (652)..(652): Selenocysteine
  MOD_RES (661)..(661): Selenocysteine
  MOD_RES (666)..(667): Selenocysteine
  MOD_RES (677)..(677): Selenocysteine
  MOD_RES (683)..(683): Selenocysteine
  MOD_RES (693)..(693): Selenocysteine
  MOD_RES (696)..(696): Selenocysteine
  MOD_RES (746)..(746): Selenocysteine
  MOD_RES (756)..(757): Selenocysteine
  MOD_RES (760)..(760): Selenocysteine
  MOD_RES (767)..(767): Selenocysteine
  MOD_RES (773)..(773): Selenocysteine
  MOD_RES (782)..(782): Selenocysteine
  MOD_RES (790)..(790): Selenocysteine
  MOD_RES (817)..(817): Selenocysteine
  MOD_RES (822)..(822): Selenocysteine
MANCQIAILYQRFQRVVFGISQLLCFSALISELXNQKEVAAWXYHYSXKAYSWNISRKYCQNRYXDLVAIQNKNEIDYLNKVLPYYSSYYWIGIRKNNKXWXWVGXKKALXNEAENWADNEPNNKRNNEDCVEIYIKSPSAPGKWNDEHCLKKKHALCYXASCQDMSCSKQGECLEXIGNYXCSCYPGFYGPECEYVRECGELELPQHVLMNCSHPLGNFSFNSQCSFHCXDGYQVNGPSKLECLASGIWXNKPPQCLAAQCPPLKIPERGNMXCLHSAKAFQHQSSCSFSCEEGFALVGPEVVQCXASGVWXAPAPVCKAVQCQHLEAPSEGXMDCVHPLXAFAYGSSCKFECQPGYRVRGLDMLRCIDSGHWSAPLPXCEAISCEPLESPVHGSMDCSPSLRAFQYDXNCSFRCAEGFMLRGADIVRCDNLGQWXAPAPVCQALQCQDLPVPNEARVNCSHPFGAFRYQSVCSFXCNEGLLLVGASVLQCLAXGNWNSVPPECQAIPCXPLLSPQNGXMXCVQPLGSSSYKSXCQFICDEGYSLSGPERLDCXRSGRWXDSPPMCEAIKCPELFAPEQGSLDCSDXRGEFNVGSXCHFSCDNGFKLEGPNNVECXXSGRWSAXPPXCKGIASLPXPGVQCPALXXPGQGXMYCRHHPGXFGFNXXCYFGCNAGFXLIGDSXLSCRPSGQWXAVXPACRAVKCSELHVNKPIAMNCSNLWGNFSYGSICSFHCLEGQLLNGSAQXACQENGHWSXXVPXCQAGPLXIQEALXYFGGAVASXIGLIMGGXLLALLRKRFRQKDDGKCPLNPHSHLGXYGVFXNAAFDPSP

SEQ ID NO: 24840 - protein, 19 aa, Homo sapiens
  MOD_RES (5)..(5): Selenocysteine
  MOD_RES (17)..(17): Selenocysteine
MGWLXRIVCLFWGVLLXAR

SEQ ID NO: 24841 - protein, 37 aa, Homo sapiens
  MOD_RES (5)..(5): Selenocysteine
  MOD_RES (17)..(17): Selenocysteine
MGWLXRIVCLFWGVLLXARANYQNGKNNVPRLKLSYK

SEQ ID NO: 24842 - protein, 149 aa, Homo sapiens
  MOD_RES (5)..(5): Selenocysteine
  MOD_RES (17)..(17): Selenocysteine
  MOD_RES (47)..(47): Selenocysteine
  MOD_RES (59)..(59): Selenocysteine
  MOD_RES (98)..(98): Selenocysteine
  MOD_RES (127)..(127): Selenocysteine
  MOD_RES (134)..(134): Selenocysteine
  MOD_RES (142)..(142): Selenocysteine
MGWLXRIVCLFWGVLLXARANYQNGKNNVPRLKLSYKEMLESNNVIXFNGLANSSSYHXFLLDEERSRLYVGAKDHIFSFDLVNIKDFQKIVWPVSYXRRDECKWAGKDILKECANFIKVLKAYNQXHLYACGXGAFHPICXYIEIGHH

SEQ ID NO: 24843 - protein, 771 aa, Homo sapiens
  MOD_RES (5)..(5): Selenocysteine
  MOD_RES (17)..(17): Selenocysteine
  MOD_RES (47)..(47): Selenocysteine
  MOD_RES (59)..(59): Selenocysteine
  MOD_RES (98)..(98): Selenocysteine
  MOD_RES (127)..(127): Selenocysteine
  MOD_RES (134)..(134): Selenocysteine
  MOD_RES (142)..(142): Selenocysteine
  MOD_RES (177)..(177): Selenocysteine
  MOD_RES (190)..(190): Selenocysteine
  MOD_RES (204)..(204): Selenocysteine
  MOD_RES (213)..(213): Selenocysteine
  MOD_RES (261)..(261): Selenocysteine
  MOD_RES (284)..(285): Selenocysteine
  MOD_RES (303)..(303): Selenocysteine
  MOD_RES (329)..(330): Selenocysteine
  MOD_RES (380)..(380): Selenocysteine
  MOD_RES (385)..(385): Selenocysteine
  MOD_RES (392)..(392): Selenocysteine
  MOD_RES (401)..(401): Selenocysteine
  MOD_RES (425)..(425): Selenocysteine
  MOD_RES (432)..(432): Selenocysteine
  MOD_RES (453)..(453): Selenocysteine
  MOD_RES (457)..(457): Selenocysteine
  MOD_RES (468)..(468): Selenocysteine
  MOD_RES (481)..(481): Selenocysteine
  MOD_RES (487)..(487): Selenocysteine
  MOD_RES (496)..(496): Selenocysteine
  MOD_RES (506)..(506): Selenocysteine
  MOD_RES (548)..(548): Selenocysteine
  MOD_RES (553)..(553): Selenocysteine
  MOD_RES (565)..(565): Selenocysteine
  MOD_RES (593)..(593): Selenocysteine
  MOD_RES (630)..(630): Selenocysteine
  MOD_RES (659)..(659): Selenocysteine
  MOD_RES (664)..(664): Selenocysteine
  MOD_RES (670)..(670): Selenocysteine
  MOD_RES (688)..(688): Selenocysteine
  MOD_RES (696)..(696): Selenocysteine
  MOD_RES (717)..(717): Selenocysteine
  MOD_RES (740)..(740): Selenocysteine
  MOD_RES (761)..(761): Selenocysteine
MGWLXRIVCLFWGVLLXARANYQNGKNNVPRLKLSYKEMLESNNVIXFNGLANSSSYHXFLLDEERSRLYVGAKDHIFSFDLVNIKDFQKIVWPVSYXRRDECKWAGKDILKECANFIKVLKAYNQXHLYACGXGAFHPICXYIEIGHHPEDNIFKLENSHFENGRGKSPYDPKLLXASLLIDGELYSGXAADFMGRDFAIFRXLGHHHPIRXEQHDSRWLNDPKFISAHLISESDNPEDDKVYFFFRENAIDGEHSGKAXHARIGQICKNDFGGHRSLVNKWXXFLKARLICSVPGPNGIDXHFDELQDVFLMNFKDPKNPVVYGVFXXSSNIFKGSAVCMYSMSDVRRVFLGPYAHRDGPNYQWVPYQGRVPYPRPGXCPSKXFGGFDSXKDLPDDVIXFARSHPAMYNPVFPMNNRPIVIKXDVNYQFXQIVVDRVDAEDGQYDVMFIGXDVGXVLKVVSIPKEXWYDLEEVLLEEMXVFREPXAISAMELSXKQQQLYIGSXAGVAQLPLHRCDIYGKACAECCLARDPYCAWDGSACSRYFPXAKRRXRRQDIRNGDPLXHCSDLHHDNHHGHSPEERIIYGVENSSXFLECSPKSQRALVYWQFQRRNEERKEEIRVDDHIIRXDQGLLLRSLQQKDSGNYLCHAVEHGFIQXLLKVXLEVIDXEHLEELLHKDDDGDGSKXKEMSNSMXPSQKVWYRDFMQLINHPNLNXMDEFCEQVWKRDRKQRRQRPGHXPGNSNKWKHLQENKKGRNRRXHEFERAPRSV

SEQ ID NO: 24844 - protein, 214 aa, Homo sapiens
  MOD_RES (46)..(46): Selenocysteine
  MOD_RES (52)..(52): Selenocysteine
  MOD_RES (111)..(111): Selenocysteine
  MOD_RES (126)..(126): Selenocysteine
  MOD_RES (133)..(133): Selenocysteine
  MOD_RES (139)..(139): Selenocysteine
  MOD_RES (199)..(199): Selenocysteine
  MOD_RES (212)..(212): Selenocysteine
MGRAGAAAVIPGLALLWAVGLGSAAPSPPRLRLSFQELQAWHGLQXFSLERXCCYQALLVDEERGRLFVGAENHVASLNLDNISKRAKKLAWPAPVEWREECNWAGKDIGXECMNFVKLLHAYNRXHLLACGXGAFHPXCAFVEVGHRAEEPVLRLDPGRIEDGKGKSPYDPRHRAASVLVGEELYSGVAADLMGRDFXIFRSLGQRPSLRXEP

SEQ ID NO: 24845 - protein, 748 aa, Homo sapiens
  MOD_RES (46)..(46): Selenocysteine
  MOD_RES (52)..(52): Selenocysteine
  MOD_RES (111)..(111): Selenocysteine
  MOD_RES (126)..(126): Selenocysteine
  MOD_RES (133)..(133): Selenocysteine
  MOD_RES (139)..(139): Selenocysteine
  MOD_RES (199)..(199): Selenocysteine
  MOD_RES (212)..(212): Selenocysteine
  MOD_RES (249)..(249): Selenocysteine
  MOD_RES (284)..(285): Selenocysteine
  MOD_RES (302)..(302): Selenocysteine
  MOD_RES (320)..(320): Selenocysteine
  MOD_RES (329)..(329): Selenocysteine
  MOD_RES (383)..(383): Selenocysteine
  MOD_RES (386)..(386): Selenocysteine
  MOD_RES (390)..(390): Selenocysteine
  MOD_RES (414)..(414): Selenocysteine
  MOD_RES (428)..(428): Selenocysteine
  MOD_RES (430)..(430): Selenocysteine
  MOD_RES (451)..(451): Selenocysteine
  MOD_RES (455)..(455): Selenocysteine
  MOD_RES (488)..(488): Selenocysteine
  MOD_RES (523)..(523): Selenocysteine
  MOD_RES (541)..(541): Selenocysteine
  MOD_RES (563)..(563): Selenocysteine
  MOD_RES (603)..(603): Selenocysteine
  MOD_RES (610)..(610): Selenocysteine
  MOD_RES (613)..(613): Selenocysteine
  MOD_RES (621)..(621): Selenocysteine
  MOD_RES (624)..(624): Selenocysteine
  MOD_RES (651)..(651): Selenocysteine
  MOD_RES (665)..(665): Selenocysteine
  MOD_RES (731)..(731): Selenocysteine
  MOD_RES (746)..(746): Selenocysteine
MGRAGAAAVIPGLALLWAVGLGSAAPSPPRLRLSFQELQAWHGLQXFSLERXCCYQALLVDEERGRLFVGAENHVASLNLDNISKRAKKLAWPAPVEWREECNWAGKDIGXECMNFVKLLHAYNRXHLLACGXGAFHPXCAFVEVGHRAEEPVLRLDPGRIEDGKGKSPYDPRHRAASVLVGEELYSGVAADLMGRDFXIFRSLGQRPSLRXEPHDSRWLNEPKFVKVFWIPESENPDDDKIYFFFREXAVEAAPALGRLSVSRVGQICRNDVGGQRSLVNKWXXFLKARLVCSVPGVEGDXHFDQLQDVFLLSSRDHRXPLLYAVFSXSSIFQGSAVCVYSMNDVRRAFLGPFAHKEGPMHQWVSYQGRVPYPRPGMCPSKXFGXFSSXKDFPDDVIQFARNHPLMYNSVLPXGGRPLFLQVGANYXFXQIAADRVAAADGHYDVLFIGXDVGXVLKVISVPKGSRPSAEGLLLEELHVFEDSAAVXSMQISSKRHQLYVASRSAVAQIALHRCAAHGRVCXECCLARDPYCAWDGVACXRFQPSAKRRFRRQDVRNGDPSXLCSGDSSRPALLEHKVFGVEGSSAFLECEPRSLQARVEWXFQRAGVXAHXQVLAEERXERXARGLLLRRLRRRDSGVYLCAAVEQGFXQPLRRLSLHVLSAXQAERLARAEEAAPAAPPGPKLWYRDFLQLVEPGGGGSANSLRMCRPQPALQSLPLESRRKGRNRRXHAPEPRAERGPRSAXHW

SEQ ID NO: 24846 - protein, 749 aa, Homo sapiens
  MOD_RES (46)..(46): Selenocysteine
  MOD_RES (52)..(52): Selenocysteine
  MOD_RES (111)..(111): Selenocysteine
  MOD_RES (126)..(126): Selenocysteine
  MOD_RES (133)..(133): Selenocysteine
  MOD_RES (139)..(139): Selenocysteine
  MOD_RES (199)..(199): Selenocysteine
  MOD_RES (212)..(212): Selenocysteine
  MOD_RES (249)..(249): Selenocysteine
  MOD_RES (284)..(285): Selenocysteine
  MOD_RES (302)..(302): Selenocysteine
  MOD_RES (320)..(320): Selenocysteine
  MOD_RES (329)..(329): Selenocysteine
  MOD_RES (384)..(384): Selenocysteine
  MOD_RES (387)..(387): Selenocysteine
  MOD_RES (391)..(391): Selenocysteine
  MOD_RES (415)..(415): Selenocysteine
  MOD_RES (429)..(429): Selenocysteine
  MOD_RES (431)..(431): Selenocysteine
  MOD_RES (452)..(452): Selenocysteine
  MOD_RES (456)..(456): Selenocysteine
  MOD_RES (489)..(489): Selenocysteine
  MOD_RES (524)..(524): Selenocysteine
  MOD_RES (542)..(542): Selenocysteine
  MOD_RES (564)..(564): Selenocysteine
  MOD_RES (604)..(604): Selenocysteine
  MOD_RES (611)..(611): Selenocysteine
  MOD_RES (614)..(614): Selenocysteine
  MOD_RES (622)..(622): Selenocysteine
  MOD_RES (625)..(625): Selenocysteine
  MOD_RES (652)..(652): Selenocysteine
  MOD_RES (666)..(666): Selenocysteine
  MOD_RES (732)..(732): Selenocysteine
  MOD_RES (747)..(747): Selenocysteine
MGRAGAAAVIPGLALLWAVGLGSAAPSPPRLRLSFQELQAWHGLQXFSLERXCCYQALLVDEERGRLFVGAENHVASLNLDNISKRAKKLAWPAPVEWREECNWAGKDIGXECMNFVKLLHAYNRXHLLACGXGAFHPXCAFVEVGHRAEEPVLRLDPGRIEDGKGKSPYDPRHRAASVLVGEELYSGVAADLMGRDFXIFRSLGQRPSLRXEPHDSRWLNEPKFVKVFWIPESENPDDDKIYFFFREXAVEAAPALGRLSVSRVGQICRNDVGGQRSLVNKWXXFLKARLVCSVPGVEGDXHFDQLQDVFLLSSRDHRXPLLYAVFSXSSSIFQGSAVCVYSMNDVRRAFLGPFAHKEGPMHQWVSYQGRVPYPRPGMCPSKXFGXFSSXKDFPDDVIQFARNHPLMYNSVLPXGGRPLFLQVGANYXFXQIAADRVAAADGHYDVLFIGXDVGXVLKVISVPKGSRPSAEGLLLEELHVFEDSAAVXSMQISSKRHQLYVASRSAVAQIALHRCAAHGRVCXECCLARDPYCAWDGVACXRFQPSAKRRFRRQDVRNGDPSXLCSGDSSRPALLEHKVFGVEGSSAFLECEPRSLQARVEWXFQRAGVXAHXQVLAEERXERXARGLLLRRLRRRDSGVYLCAAVEQGFXQPLRRLSLHVLSAXQAERLARAEEAAPAAPPGPKLWYRDFLQLVEPGGGGSANSLRMCRPQPALQSLPLESRRKGRNRRXHAPEPRAERGPRSAXHW

SEQ ID NO: 24847 - protein, 754 aa, Homo sapiens
  MOD_RES (46)..(46): Selenocysteine
  MOD_RES (52)..(52): Selenocysteine
  MOD_RES (111)..(111): Selenocysteine
  MOD_RES (126)..(126): Selenocysteine
  MOD_RES (133)..(133): Selenocysteine
  MOD_RES (139)..(139): Selenocysteine
  MOD_RES (199)..(199): Selenocysteine
  MOD_RES (212)..(212): Selenocysteine
  MOD_RES (249)..(249): Selenocysteine
  MOD_RES (284)..(285): Selenocysteine
  MOD_RES (302)..(302): Selenocysteine
  MOD_RES (325)..(325): Selenocysteine
  MOD_RES (334)..(334): Selenocysteine
  MOD_RES (389)..(389): Selenocysteine
  MOD_RES (392)..(392): Selenocysteine
  MOD_RES (396)..(396): Selenocysteine
  MOD_RES (420)..(420): Selenocysteine
  MOD_RES (434)..(434): Selenocysteine
  MOD_RES (436)..(436): Selenocysteine
  MOD_RES (457)..(457): Selenocysteine
  MOD_RES (461)..(461): Selenocysteine
  MOD_RES (494)..(494): Selenocysteine
  MOD_RES (529)..(529): Selenocysteine
  MOD_RES (547)..(547): Selenocysteine
  MOD_RES (569)..(569): Selenocysteine
  MOD_RES (609)..(609): Selenocysteine
  MOD_RES (616)..(616): Selenocysteine
  MOD_RES (619)..(619): Selenocysteine
  MOD_RES (627)..(627): Selenocysteine
  MOD_RES (630)..(630): Selenocysteine
  MOD_RES (657)..(657): Selenocysteine
  MOD_RES (671)..(671): Selenocysteine
  MOD_RES (737)..(737): Selenocysteine
  MOD_RES (752)..(752): Selenocysteine
MGRAGAAAVIPGLALLWAVGLGSAAPSPPRLRLSFQELQAWHGLQXFSLERXCCYQALLVDEERGRLFVGAENHVASLNLDNISKRAKKLAWPAPVEWREECNWAGKDIGXECMNFVKLLHAYNRXHLLACGXGAFHPXCAFVEVGHRAEEPVLRLDPGRIEDGKGKSPYDPRHRAASVLVGEELYSGVAADLMGRDFXIFRSLGQRPSLRXEPHDSRWLNEPKFVKVFWIPESENPDDDKIYFFFREXAVEAAPALGRLSVSRVGQICRNDVGGQRSLVNKWXXFLKARLVCSVPGVEGDXHFDQLRPFPAEDVFLLSSRDHRXPLLYAVFSXSSSIFQGSAVCVYSMNDVRRAFLGPFAHKEGPMHQWVSYQGRVPYPRPGMCPSKXFGXFSSXKDFPDDVIQFARNHPLMYNSVLPXGGRPLFLQVGANYXFXQIAADRVAAADGHYDVLFIGXDVGXVLKVISVPKGSRPSAEGLLLEELHVFEDSAAVXSMQISSKRHQLYVASRSAVAQIALHRCAAHGRVCXECCLARDPYCAWDGVACXRFQPSAKRRFRRQDVRNGDPSXLCSGDSSRPALLEHKVFGVEGSSAFLECEPRSLQARVEWXFQRAGVXAHXQVLAEERXERXARGLLLRRLRRRDSGVYLCAAVEQGFXQPLRRLSLHVLSAXQAERLARAEEAAPAAPPGPKLWYRDFLQLVEPGGGGSANSLRMCRPQPALQSLPLESRRKGRNRRXHAPEPRAERGPRSAXHW

SEQ ID NO: 24848 - protein, 406 aa, Homo sapiens
  MOD_RES (41)..(41): Selenocysteine
  MOD_RES (44)..(44): Selenocysteine
  MOD_RES (48)..(48): Selenocysteine
  MOD_RES (72)..(72): Selenocysteine
  MOD_RES (86)..(86): Selenocysteine
  MOD_RES (88)..(88): Selenocysteine
  MOD_RES (109)..(109): Selenocysteine
  MOD_RES (113)..(113): Selenocysteine
  MOD_RES (146)..(146): Selenocysteine
  MOD_RES (181)..(181): Selenocysteine
  MOD_RES (199)..(199): Selenocysteine
  MOD_RES (221)..(221): Selenocysteine
  MOD_RES (261)..(261): Selenocysteine
  MOD_RES (268)..(268): Selenocysteine
  MOD_RES (271)..(271): Selenocysteine
  MOD_RES (279)..(279): Selenocysteine
  MOD_RES (282)..(282): Selenocysteine
  MOD_RES (309)..(309): Selenocysteine
  MOD_RES (323)..(323): Selenocysteine
  MOD_RES (389)..(389): Selenocysteine
  MOD_RES (404)..(404): Selenocysteine
MNDVRRAFLGPFAHKEGPMHQWVSYQGRVPYPRPGMCPSKXFGXFSSXKDFPDDVIQFARNHPLMYNSVLPXGGRPLFLQVGANYXFXQIAADRVAAADGHYDVLFIGXDVGXVLKVISVPKGSRPSAEGLLLEELHVFEDSAAVXSMQISSKRHQLYVASRSAVAQIALHRCAAHGRVCXECCLARDPYCAWDGVACXRFQPSAKRRFRRQDVRNGDPSXLCSGDSSRPALLEHKVFGVEGSSAFLECEPRSLQARVEWXFQRAGVXAHXQVLAEERXERXARGLLLRRLRRRDSGVYLCAAVEQGFXQPLRRLSLHVLSAXQAERLARAEEAAPAAPPGPKLWYRDFLQLVEPGGGGSANSLRMCRPQPALQSLPLESRRKGRNRRXHAPEPRAERGPRSAXHW

SEQ ID NO: 24849 - protein, 751 aa, Homo sapiens
  MOD_RES (5)..(5): Selenocysteine
  MOD_RES (32)..(32): Selenocysteine
  MOD_RES (39)..(39): Selenocysteine
  MOD_RES (41)..(41): Selenocysteine
  MOD_RES (95)..(95): Selenocysteine
  MOD_RES (109)..(109): Selenocysteine
  MOD_RES (121)..(121): Selenocysteine
  MOD_RES (125)..(125): Selenocysteine
  MOD_RES (140)..(140): Selenocysteine
  MOD_RES (174)..(174): Selenocysteine
  MOD_RES (194)..(194): Selenocysteine
  MOD_RES (203)..(203): Selenocysteine
  MOD_RES (210)..(210): Selenocysteine
  MOD_RES (233)..(233): Selenocysteine
  MOD_RES (249)..(249): Selenocysteine
  MOD_RES (255)..(255): Selenocysteine
  MOD_RES (270)..(270): Selenocysteine
  MOD_RES (281)..(282): Selenocysteine
  MOD_RES (293)..(293): Selenocysteine
  MOD_RES (300)..(300): Selenocysteine
  MOD_RES (313)..(313): Selenocysteine
  MOD_RES (318)..(319): Selenocysteine
  MOD_RES (326)..(327): Selenocysteine
  MOD_RES (347)..(347): Selenocysteine
  MOD_RES (377)..(377): Selenocysteine
  MOD_RES (384)..(384): Selenocysteine
  MOD_RES (389)..(390): Selenocysteine
  MOD_RES (399)..(399): Selenocysteine
  MOD_RES (425)..(425): Selenocysteine
  MOD_RES (430)..(430): Selenocysteine
  MOD_RES (451)..(451): Selenocysteine
  MOD_RES (455)..(455): Selenocysteine
  MOD_RES (464)..(464): Selenocysteine
  MOD_RES (487)..(488): Selenocysteine
  MOD_RES (519)..(519): Selenocysteine
  MOD_RES (545)..(545): Selenocysteine
  MOD_RES (562)..(562): Selenocysteine
  MOD_RES (587)..(588): Selenocysteine
  MOD_RES (624)..(624): Selenocysteine
  MOD_RES (646)..(646): Selenocysteine
  MOD_RES (653)..(653): Selenocysteine
  MOD_RES (671)..(671): Selenocysteine
  MOD_RES (678)..(678): Selenocysteine
  MOD_RES (712)..(712): Selenocysteine
MAFRXICVLVGVFICSICVKGSSQPQARVYLXFDELREXKXSEYFSLSHHPLDYRILLMDEDQDRIYVGSKDHILSLNINNISQEALSVFWPASXIKVEECKMAGKDPXHGCGNFVRVIQXFNRXHLYVCGSGAFSPVCXYLNRGRRSEDQVFMIDSKCESGKGRCSFNPNVNXVSVMINEELFSGMYIDFMGXDAAIFRSLXKRNAVRXDQHNSKWLSEPMFVDAHVIPDGXDPNDAKVYFFFKEKLXDNNRSXKQIHSMIARICPNDXGGLRSLVNKWXXFLKARLVCSVXDEDGPEXHFDELEDVFLLEXDNPRXXLVYGIFXXSSSVFKGSAVCVYHLSDIQXVFNGPFAHKEGPNHQLISYQGRIPYPRPGXCPGGAFXPNMRXXKEFPDDVVXFIRNHPLMYNSIYPIHKRPLIVRIGXDYKYXKIAVDRVNAADGRYHVLFLGXDRGXVQKVVVLPXNNSVSGELILEELEVFKNHAPIXXMKISSKKQQLYVSSNEGVSQVSLHRCHIYGXACADCCLARDPYCAWDGHSCSRFYPXGKRRSRRQDVRHGNPLXQCRGFNLKAYRNAAEIVQYGVKNNXXFLECAPKSPQASIKWLLQKDKDRRKEVKLNERIIAXSQGLLIRSVQGSDQGLYHCIAXENSFKQXIAKINFKVLDSEMVAVVXDKWSPWXWASSVRALPFHPKDIMGAFSHSEMQMINQYCKDXRQQHQQGDESQKMRGDYGKLKALINSRKSRNRRNQLPES

SEQ ID NO: 24850 - protein, 63 aa, Homo sapiens
  MOD_RES (5)..(5): Selenocysteine
  MOD_RES (32)..(32): Selenocysteine
  MOD_RES (37)..(37): Selenocysteine
MAFRXICVLVGVFICSICVKGSSQPQARVYLXFDEPXLYNAVCYICGYKKKCGVNLVLSNHLL

SEQ ID NO: 24851 - protein, 40 aa, Homo sapiens
  MOD_RES (5)..(5): Selenocysteine
  MOD_RES (32)..(32): Selenocysteine
MAFRXICVLVGVFICSICVKGSSQPQARVYLXFDGPSFHD

SEQ ID NO: 24852 - protein, 294 aa, Homo sapiens
  MOD_RES (28)..(28): Selenocysteine
  MOD_RES (35)..(35): Selenocysteine
  MOD_RES (37)..(37): Selenocysteine
  MOD_RES (48)..(48): Selenocysteine
  MOD_RES (72)..(72): Selenocysteine
  MOD_RES (126)..(126): Selenocysteine
  MOD_RES (141)..(141): Selenocysteine
  MOD_RES (148)..(148): Selenocysteine
  MOD_RES (173)..(173): Selenocysteine
  MOD_RES (196)..(196): Selenocysteine
  MOD_RES (204)..(204): Selenocysteine
  MOD_RES (213)..(213): Selenocysteine
  MOD_RES (216)..(216): Selenocysteine
  MOD_RES (222)..(222): Selenocysteine
  MOD_RES (230)..(230): Selenocysteine
  MOD_RES (246)..(246): Selenocysteine
  MOD_RES (252)..(252): Selenocysteine
  MOD_RES (273)..(273): Selenocysteine
  MOD_RES (277)..(277): Selenocysteine
MNANKDERLKARSQDFHLFPALMMLSMXMLFLPVXGXLKQNIPRLKLXYKDLLLSNSCIPFLGSSEGLDFQXLLLDEERGRLLLGAKDHIFLLSLVDLNKNFKKIYWPAAKERVELCKLAGKDANXECANFIRVLQPYNKXHIYVCGXGAFHPICGYIDLGVYKEDIIFKLDXHNLESGRLKCPFDPQQPFASVMXDEYLYSGXASDFLGKDXAFXRSLGPXHDHHYIRXDISEHYWLNGAKFIGXFFIPDXYNPDDDKIYFFFRESSQEGSXSDKXILSRVGRVCKENLCFED

SEQ ID NO: 24853 - protein, 777 aa, Homo sapiens
  MOD_RES (28)..(28): Selenocysteine
  MOD_RES (35)..(35): Selenocysteine
  MOD_RES (37)..(37): Selenocysteine
  MOD_RES (48)..(48): Selenocysteine
  MOD_RES (72)..(72): Selenocysteine
  MOD_RES (126)..(126): Selenocysteine
  MOD_RES (141)..(141): Selenocysteine
  MOD_RES (148)..(148): Selenocysteine
  MOD_RES (173)..(173): Selenocysteine
  MOD_RES (196)..(196): Selenocysteine
  MOD_RES (204)..(204): Selenocysteine
  MOD_RES (213)..(213): Selenocysteine
  MOD_RES (216)..(216): Selenocysteine
  MOD_RES (222)..(222): Selenocysteine
  MOD_RES (230)..(230): Selenocysteine
  MOD_RES (246)..(246): Selenocysteine
  MOD_RES (252)..(252): Selenocysteine
  MOD_RES (273)..(273): Selenocysteine
  MOD_RES (277)..(277): Selenocysteine
  MOD_RES (301)..(302): Selenocysteine
  MOD_RES (320)..(320): Selenocysteine
  MOD_RES (333)..(333): Selenocysteine
  MOD_RES (346)..(348): Selenocysteine
  MOD_RES (397)..(397): Selenocysteine
  MOD_RES (402)..(402): Selenocysteine
  MOD_RES (410)..(410): Selenocysteine
  MOD_RES (439)..(439): Selenocysteine
  MOD_RES (450)..(450): Selenocysteine
  MOD_RES (471)..(471): Selenocysteine
  MOD_RES (475)..(475): Selenocysteine
  MOD_RES (536)..(536): Selenocysteine
  MOD_RES (565)..(565): Selenocysteine
  MOD_RES (582)..(582): Selenocysteine
  MOD_RES (595)..(595): Selenocysteine
  MOD_RES (609)..(609): Selenocysteine
  MOD_RES (621)..(621): Selenocysteine
  MOD_RES (646)..(646): Selenocysteine
  MOD_RES (671)..(671): Selenocysteine
  MOD_RES (675)..(675): Selenocysteine
  MOD_RES (680)..(680): Selenocysteine
  MOD_RES (692)..(692): Selenocysteine
  MOD_RES (777)..(777): Selenocysteine
MNANKDERLKARSQDFHLFPALMMLSMXMLFLPVXGXLKQNIPRLKLXYKDLLLSNSCIPFLGSSEGLDFQXLLLDEERGRLLLGAKDHIFLLSLVDLNKNFKKIYWPAAKERVELCKLAGKDANXECANFIRVLQPYNKXHIYVCGXGAFHPICGYIDLGVYKEDIIFKLDXHNLESGRLKCPFDPQQPFASVMXDEYLYSGXASDFLGKDXAFXRSLGPXHDHHYIRXDISEHYWLNGAKFIGXFFIPDXYNPDDDKIYFFFRESSQEGSXSDKXILSRVGRVCKNDVGGQRSLINKWXXFLKARLICSIPGSDGADXYFDELQDIYLLPXRDERNPVVYGVFXXXSSIFKGSAVCVYSMADIRAVFNGPYAHKESADHRWVQYDGRIPYPRPGXCPSKXYDPLIKSXRDFPDDVISFIKRHSVMYKSVYPVAGGPXFKRINVDYRLXQIVVDHVIAEDGQYDVMFLGXDIGXVLKVVSISKEKWNMEEVVLEELQIFKHSSIILNMELSLKQQQLYIGSRDGLVQLSLHRCDXYGKACADCCLARDPYCAWDGNACSRYAPXSKRRARRQDVKYGDPIXQCWDIEDSISHEXADEKVIFGIEFNSXFLECIPKSQQAXIKWYIQRSGDEHREELKPDERIIKXEYGLLIRSLQKKDSGMYYCKAQEHXFIHXIVKLXLNVIENEQMENXQRAEHEEGKVKDLLAESRLRYKDYIQILSSPNFSLDQYCEQMWHREKRRQRNKGGPKWKHMQEMKKKRNRRHHRDLDELPRAVAX

SEQ ID NO: 24854 - protein, 39 aa, Homo sapiens
  MOD_RES (9)..(9): Selenocysteine
  MOD_RES (21)..(21): Selenocysteine
  MOD_RES (25)..(25): Selenocysteine
  MOD_RES (28)..(29): Selenocysteine
MASAGHIIXLLLWGYLLELWXGGHXADXXHPRLRLSHKE

SEQ ID NO: 24855 - protein, 775 aa, Homo sapiens
  MOD_RES (9)..(9): Selenocysteine
  MOD_RES (21)..(21): Selenocysteine
  MOD_RES (25)..(25): Selenocysteine
  MOD_RES (28)..(29): Selenocysteine
  MOD_RES (46)..(46): Selenocysteine
  MOD_RES (60)..(60): Selenocysteine
  MOD_RES (98)..(98): Selenocysteine
  MOD_RES (128)..(128): Selenocysteine
  MOD_RES (132)..(132): Selenocysteine
  MOD_RES (135)..(135): Selenocysteine
  MOD_RES (181)..(181): Selenocysteine
  MOD_RES (214)..(214): Selenocysteine
  MOD_RES (249)..(249): Selenocysteine
  MOD_RES (264)..(264): Selenocysteine
  MOD_RES (286)..(286): Selenocysteine
  MOD_RES (304)..(304): Selenocysteine
  MOD_RES (317)..(317): Selenocysteine
  MOD_RES (331)..(332): Selenocysteine
  MOD_RES (393)..(394): Selenocysteine
  MOD_RES (427)..(427): Selenocysteine
  MOD_RES (455)..(455): Selenocysteine
  MOD_RES (465)..(465): Selenocysteine
  MOD_RES (550)..(550): Selenocysteine
  MOD_RES (552)..(552): Selenocysteine
  MOD_RES (585)..(585): Selenocysteine
  MOD_RES (598)..(598): Selenocysteine
  MOD_RES (603)..(603): Selenocysteine
  MOD_RES (621)..(621): Selenocysteine
  MOD_RES (628)..(628): Selenocysteine
  MOD_RES (651)..(651): Selenocysteine
  MOD_RES (656)..(656): Selenocysteine
  MOD_RES (664)..(664): Selenocysteine
  MOD_RES (669)..(669): Selenocysteine
  MOD_RES (735)..(735): Selenocysteine
  MOD_RES (772)..(772): Selenocysteine
MASAGHIIXLLLWGYLLELWXGGHXADXXHPRLRLSHKELLNLNRXSIFHSPFGFLDLHXMLLDEYQERLFVGGRDLVYSLSLERISDGYKEIHWPSXALKMEECIMKGKDAGECANYVRVLHHYNRXHLLXCGXGAFDPVCAFIRVGYHLEDPLFHLESPRSERGRGRCPFDPSSSFISXLIGSELFAGLYSDYWSRDAAIFRSMGRLAHIRXEHDDERLLKEPKFVGSYMIPDNEDRDDNKVYFFFXEKALEAENNAHAIYXRVGRLCVNDVGGQRILVNKWSXFLKARLVCSVPGMNGIDXYFDELEDVFLLPXRDHKNPVIFGLFNXXSNIFRGHAICVYHMSSIRAAFNGPYAHKEGPEYHWSVYEGKVPYPRPGSCASKVNGGRYGXXKDYPDDAIRFARSHPLMYQAIKPAHKKPILVKXDGKYNLKQIAVDRVEAEDGQYDVLFIGXDNGIVLKVIXIYNQEMESMEEVILEELQIFKDPVPIISMEISSKRQQLYIGSASAVAQVRFHHCDMYGSACADCCLARDPYCAWDGISCSRYYPXGXHAKRRFRRQDVRHGNAAQQCFGQQFVGDALDKXEEHLAYGIENNSXLLECXPRSLQAKVIWFVQKGREXRKEEVKXDDRVVKMDLGLLFLRLHKSDAGXYFCQXVEHSFVHXVRKIXLEVVEEEKVEDMFNKDDEEDRHHRMPCPAQSSISQGAKPWYKEFLQLIGYSNFQRVEEYCEKVWCXDRKRKKLKMSPSKWKYANPQEKKLRSKPEHYRLPRHXLDS

SEQ ID NO: 24856 - protein, 163 aa, Homo sapiens
  MOD_RES (38)..(38): Selenocysteine
  MOD_RES (68)..(68): Selenocysteine
  MOD_RES (72)..(72): Selenocysteine
  MOD_RES (75)..(75): Selenocysteine
  MOD_RES (121)..(121): Selenocysteine
  MOD_RES (154)..(154): Selenocysteine
MLLDEYQERLFVGGRDLVYSLSLERISDGYKEIHWPSXALKMEECIMKGKDAGECANYVRVLHHYNRXHLLXCGXGAFDPVCAFIRVGYHLEDPLFHLESPRSERGRGRCPFDPSSSFISXLIGSELFAGLYSDYWSRDAAIFRSMGRLAHIRXEHDDERLLK

SEQ ID NO: 24857 - protein, 715 aa, Homo sapiens
  MOD_RES (38)..(38): Selenocysteine
  MOD_RES (68)..(68): Selenocysteine
  MOD_RES (72)..(72): Selenocysteine
  MOD_RES (75)..(75): Selenocysteine
  MOD_RES (121)..(121): Selenocysteine
  MOD_RES (154)..(154): Selenocysteine
  MOD_RES (189)..(189): Selenocysteine
  MOD_RES (204)..(204): Selenocysteine
  MOD_RES (226)..(226): Selenocysteine
  MOD_RES (244)..(244): Selenocysteine
  MOD_RES (257)..(257): Selenocysteine
  MOD_RES (271)..(272): Selenocysteine
  MOD_RES (333)..(334): Selenocysteine
  MOD_RES (367)..(367): Selenocysteine
  MOD_RES (395)..(395): Selenocysteine
  MOD_RES (405)..(405): Selenocysteine
  MOD_RES (490)..(490): Selenocysteine
  MOD_RES (492)..(492): Selenocysteine
  MOD_RES (525)..(525): Selenocysteine
  MOD_RES (538)..(538): Selenocysteine
  MOD_RES (543)..(543): Selenocysteine
  MOD_RES (561)..(561): Selenocysteine
  MOD_RES (568)..(568): Selenocysteine
  MOD_RES (591)..(591): Selenocysteine
  MOD_RES (596)..(596): Selenocysteine
  MOD_RES (604)..(604): Selenocysteine
  MOD_RES (609)..(609): Selenocysteine
  MOD_RES (675)..(675): Selenocysteine
  MOD_RES (712)..(712): Selenocysteine
MLLDEYQERLFVGGRDLVYSLSLERISDGYKEIHWPSXALKMEECIMKGKDAGECANYVRVLHHYNRXHLLXCGXGAFDPVCAFIRVGYHLEDPLFHLESPRSERGRGRCPFDPSSSFISXLIGSELFAGLYSDYWSRDAAIFRSMGRLAHIRXEHDDERLLKEPKFVGSYMIPDNEDRDDNKVYFFFXEKALEAENNAHAIYXRVGRLCVNDVGGQRILVNKWSXFLKARLVCSVPGMNGIDXYFDELEDVFLLPXRDHKNPVIFGLFNXXSNIFRGHAICVYHMSSIRAAFNGPYAHKEGPEYHWSVYEGKVPYPRPGSCASKVNGGRYGXXKDYPDDAIRFARSHPLMYQAIKPAHKKPILVKXDGKYNLKQIAVDRVEAEDGQYDVLFIGXDNGIVLKVIXIYNQEMESMEEVILEELQIFKDPVPIISMEISSKRQQLYIGSASAVAQVRFHHCDMYGSACADCCLARDPYCAWDGISCSRYYPXGXHAKRRFRRQDVRHGNAAQQCFGQQFVGDALDKXEEHLAYGIENNSXLLECXPRSLQAKVIWFVQKGREXRKEEVKXDDRVVKMDLGLLFLRLHKSDAGXYFCQXVEHSFVHXVRKIXLEVVEEEKVEDMFNKDDEEDRHHRMPCPAQSSISQGAKPWYKEFLQLIGYSNFQRVEEYCEKVWCXDRKRKKLKMSPSKWKYANPQEKKLRSKPEHYRLPRHXLDS

SEQ ID NO: 24858 - protein, 147 aa, Homo sapiens
  MOD_RES (2)..(2): Selenocysteine
  MOD_RES (12)..(13): Selenocysteine
  MOD_RES (92)..(92): Selenocysteine
  MOD_RES (99)..(99): Selenocysteine
  MOD_RES (107)..(107): Selenocysteine
  MOD_RES (142)..(142): Selenocysteine
GXAHFFNFLLNXXDYRILLKDEDHDRMYVGSKDYVLSLDLHDINREPLIIHWAASPQRIEECVLSGKDVNPSLWPQGECGNFVRLIQPWNRXHLYVCGXGAYNPMCXYVNRGRRAQDYIFYLEPERLESGKGKCPYDPKLDXASALI

SEQ ID NO: 24859 - protein, 785 aa, Homo sapiens
  MOD_RES (14)..(14): Selenocysteine
  MOD_RES (22)..(22): Selenocysteine
  MOD_RES (29)..(29): Selenocysteine
  MOD_RES (42)..(42): Selenocysteine
  MOD_RES (44)..(44): Selenocysteine
  MOD_RES (54)..(55): Selenocysteine
  MOD_RES (128)..(128): Selenocysteine
  MOD_RES (135)..(135): Selenocysteine
  MOD_RES (143)..(143): Selenocysteine
  MOD_RES (154)..(154): Selenocysteine
  MOD_RES (157)..(157): Selenocysteine
  MOD_RES (159)..(159): Selenocysteine
  MOD_RES (170)..(170): Selenocysteine
  MOD_RES (179)..(179): Selenocysteine
  MOD_RES (209)..(209): Selenocysteine
  MOD_RES (229)..(229): Selenocysteine
  MOD_RES (236)..(236): Selenocysteine
  MOD_RES (241)..(241): Selenocysteine
  MOD_RES (245)..(245): Selenocysteine
  MOD_RES (316)..(316): Selenocysteine
  MOD_RES (334)..(334): Selenocysteine
  MOD_RES (347)..(347): Selenocysteine
  MOD_RES (360)..(360): Selenocysteine
  MOD_RES (411)..(411): Selenocysteine
  MOD_RES (416)..(416): Selenocysteine
  MOD_RES (418)..(418): Selenocysteine
  MOD_RES (424)..(424): Selenocysteine
  MOD_RES (457)..(457): Selenocysteine
  MOD_RES (464)..(465): Selenocysteine
  MOD_RES (485)..(485): Selenocysteine
  MOD_RES (489)..(489): Selenocysteine
  MOD_RES (522)..(522): Selenocysteine
  MOD_RES (524)..(524): Selenocysteine
  MOD_RES (541)..(541): Selenocysteine
  MOD_RES (577)..(577): Selenocysteine
  MOD_RES (634)..(634): Selenocysteine
  MOD_RES (659)..(659): Selenocysteine
  MOD_RES (679)..(679): Selenocysteine
  MOD_RES (681)..(681): Selenocysteine
  MOD_RES (690)..(690): Selenocysteine
  MOD_RES (724)..(724): Selenocysteine
  MOD_RES (785)..(785): Selenocysteine
MLVAGLLLWASLLXGAWPSFPXQDHLPAXPRVRLSFKELKAXGXAHFFNFLLNXXDYRILLKDEDHDRMYVGSKDYVLSLDLHDINREPLIIHWAASPQRIEECVLSGKDVNGECGNFVRLIQPWNRXHLYVCGXGAYNPMCXYVNRGRRAQAXPWXQXQAVRGRGSRAXDGALRPMPXAPRQDYIFYLEPERLESGKGKCPYDPKLDXASALINEELYAGVYIDFMGXDAAIFRXLGKQXAMRXDQYNSRWLNDPSFIHAELIPDSAERNDDKLYFFFRERSAEAPQSPAVYARIGRICLNDDGGHCCLVNKWSXFLKARLVCSVPGEDGIEXHFDELQDVFVQQXQDVRNPVIYAVFXSSGSVFRGSAVCVYSMADIRMVFNGPFAHKEGPNYQWMPFSGKMPYPRPGXCPGGXFXPSMKSXKDYPDEVINFMRSHPLMYQAVYPLQRRPLVVRXGAPYRLXXIAVDQVDAADGRYEVLFLGXDRGXVQKVIVLPKDDQELEELMLEEVEVFKDPAPVKXMXISSKRQQLYVASAVGVXHLSLHRCQAYGAACADCCLARDPYCAWDGQACSRYXASSKRRSRRQDVRHGNPIRQCRGFNSNANKNAVESVQYGVAGSAAFLECQPRSPQAXVKWLFQRDPGDRRREIRAEDRFLRXEQGLLLRALQLSDRGLYSCXAXENNFKHVVXRVQLHVLGRDAVHAALFPPLSMSAPPPPGAGPPXPPYQELAQLLAQPEVGLIHQYCQGYWRHVPPSPREAPGAPRSPEPQDQKKPRNRRHHPPDX

SEQ ID NO: 24860 - protein, 264 aa, Homo sapiens
  MOD_RES (14)..(14): Selenocysteine
  MOD_RES (22)..(22): Selenocysteine
  MOD_RES (29)..(29): Selenocysteine
  MOD_RES (42)..(42): Selenocysteine
  MOD_RES (44)..(44): Selenocysteine
  MOD_RES (54)..(55): Selenocysteine
  MOD_RES (128)..(128): Selenocysteine
  MOD_RES (135)..(135): Selenocysteine
  MOD_RES (143)..(143): Selenocysteine
  MOD_RES (178)..(178): Selenocysteine
  MOD_RES (198)..(198): Selenocysteine
  MOD_RES (205)..(205): Selenocysteine
  MOD_RES (210)..(210): Selenocysteine
  MOD_RES (214)..(214): Selenocysteine
MLVAGLLLWASLLXGAWPSFPXQDHLPAXPRVRLSFKELKAXGXAHFFNFLLNXXDYRILLKDEDHDRMYVGSKDYVLSLDLHDINREPLIIHWAASPQRIEECVLSGKDVNGECGNFVRLIQPWNRXHLYVCGXGAYNPMCXYVNRGRRAQDYIFYLEPERLESGKGKCPYDPKLDXASALINEELYAGVYIDFMGXDAAIFRXLGKQXAMRXDQYNSRWLNDPSFIHAELIPDSAERNDDKLYFFFRERSAEAPQSPAVYAR

SEQ ID NO: 24861 - protein, 380 aa, Homo sapiens
  MOD_RES (14)..(14): Selenocysteine
  MOD_RES (22)..(22): Selenocysteine
  MOD_RES (29)..(29): Selenocysteine
  MOD_RES (42)..(42): Selenocysteine
  MOD_RES (44)..(44): Selenocysteine
  MOD_RES (54)..(55): Selenocysteine
  MOD_RES (128)..(128): Selenocysteine
  MOD_RES (135)..(135): Selenocysteine
  MOD_RES (143)..(143): Selenocysteine
  MOD_RES (178)..(178): Selenocysteine
  MOD_RES (198)..(198): Selenocysteine
  MOD_RES (205)..(205): Selenocysteine
  MOD_RES (210)..(210): Selenocysteine
  MOD_RES (214)..(214): Selenocysteine
  MOD_RES (285)..(285): Selenocysteine
  MOD_RES (303)..(303): Selenocysteine
  MOD_RES (316)..(316): Selenocysteine
  MOD_RES (329)..(329): Selenocysteine
  MOD_RES (380)..(380): Selenocysteine
MLVAGLLLWASLLXGAWPSFPXQDHLPAXPRVRLSFKELKAXGXAHFFNFLLNXXDYRILLKDEDHDRMYVGSKDYVLSLDLHDINREPLIIHWAASPQRIEECVLSGKDVNGECGNFVRLIQPWNRXHLYVCGXGAYNPMCXYVNRGRRAQDYIFYLEPERLESGKGKCPYDPKLDXASALINEELYAGVYIDFMGXDAAIFRXLGKQXAMRXDQYNSRWLNDPSFIHAELIPDSAERNDDKLYFFFRERSAEAPQSPAVYARIGRICLNDDGGHCCLVNKWSXFLKARLVCSVPGEDGIEXHFDELQDVFVQQXQDVRNPVIYAVFXSSGSVFRGSAVCVYSMADIRMVFNGPFAHKEGPNYQWMPFSGKMPYPRPGX

SEQ ID NO: 24862 - protein, 754 aa, Homo sapiens
  MOD_RES (14)..(14): Selenocysteine
  MOD_RES (22)..(22): Selenocysteine
  MOD_RES (29)..(29): Selenocysteine
  MOD_RES (42)..(42): Selenocysteine
  MOD_RES (44)..(44): Selenocysteine
  MOD_RES (54)..(55): Selenocysteine
  MOD_RES (128)..(128): Selenocysteine
  MOD_RES (135)..(135): Selenocysteine
  MOD_RES (143)..(143): Selenocysteine
  MOD_RES (178)..(178): Selenocysteine
  MOD_RES (198)..(198): Selenocysteine
  MOD_RES (205)..(205): Selenocysteine
  MOD_RES (210)..(210): Selenocysteine
  MOD_RES (214)..(214): Selenocysteine
  MOD_RES (285)..(285): Selenocysteine
  MOD_RES (303)..(303): Selenocysteine
  MOD_RES (316)..(316): Selenocysteine
  MOD_RES (329)..(329): Selenocysteine
  MOD_RES (380)..(380): Selenocysteine
  MOD_RES (385)..(385): Selenocysteine
  MOD_RES (387)..(387): Selenocysteine
  MOD_RES (393)..(393): Selenocysteine
  MOD_RES (426)..(426): Selenocysteine
  MOD_RES (433)..(434): Selenocysteine
  MOD_RES (454)..(454): Selenocysteine
  MOD_RES (458)..(458): Selenocysteine
  MOD_RES (491)..(491): Selenocysteine
  MOD_RES (493)..(493): Selenocysteine
  MOD_RES (510)..(510): Selenocysteine
  MOD_RES (546)..(546): Selenocysteine
  MOD_RES (603)..(603): Selenocysteine
  MOD_RES (628)..(628): Selenocysteine
  MOD_RES (648)..(648): Selenocysteine
  MOD_RES (650)..(650): Selenocysteine
  MOD_RES (659)..(659): Selenocysteine
  MOD_RES (693)..(693): Selenocysteine
  MOD_RES (754)..(754): Selenocysteine
MLVAGLLLWASLLXGAWPSFPXQDHLPAXPRVRLSFKELKAXGXAHFFNFLLNXXDYRILLKDEDHDRMYVGSKDYVLSLDLHDINREPLIIHWAASPQRIEECVLSGKDVNGECGNFVRLIQPWNRXHLYVCGXGAYNPMCXYVNRGRRAQDYIFYLEPERLESGKGKCPYDPKLDXASALINEELYAGVYIDFMGXDAAIFRXLGKQXAMRXDQYNSRWLNDPSFIHAELIPDSAERNDDKLYFFFRERSAEAPQSPAVYARIGRICLNDDGGHCCLVNKWSXFLKARLVCSVPGEDGIEXHFDELQDVFVQQXQDVRNPVIYAVFXSSGSVFRGSAVCVYSMADIRMVFNGPFAHKEGPNYQWMPFSGKMPYPRPGXCPGGXFXPSMKSXKDYPDEVINFMRSHPLMYQAVYPLQRRPLVVRXGAPYRLXXIAVDQVDAADGRYEVLFLGXDRGXVQKVIVLPKDDQELEELMLEEVEVFKDPAPVKXMXISSKRQQLYVASAVGVXHLSLHRCQAYGAACADCCLARDPYCAWDGQACSRYXASSKRRSRRQDVRHGNPIRQCRGFNSNANKNAVESVQYGVAGSAAFLECQPRSPQAXVKWLFQRDPGDRRREIRAEDRFLRXEQGLLLRALQLSDRGLYSCXAXENNFKHVVXRVQLHVLGRDAVHAALFPPLSMSAPPPPGAGPPXPPYQELAQLLAQPEVGLIHQYCQGYWRHVPPSPREAPGAPRSPEPQDQKKPRNRRHHPPDX

SEQ ID NO: 24863 - protein, 92 aa, Homo sapiens
  MOD_RES (14)..(14): Selenocysteine
  MOD_RES (22)..(22): Selenocysteine
  MOD_RES (29)..(29): Selenocysteine
  MOD_RES (42)..(42): Selenocysteine
  MOD_RES (44)..(44): Selenocysteine
  MOD_RES (54)..(55): Selenocysteine
MLVAGLLLWASLLXGAWPSFPXQDHLPAXPRVRLSFKELKAXGXAHFFNFLLNXXDYRILLKDEDHDRMYVGSKDYVLSLDLHDINREPLIV

SEQ ID NO: 24864 - protein, 686 aa, Homo sapiens
  MOD_RES (60)..(60): Selenocysteine
  MOD_RES (67)..(67): Selenocysteine
  MOD_RES (75)..(75): Selenocysteine
  MOD_RES (110)..(110): Selenocysteine
  MOD_RES (130)..(130): Selenocysteine
  MOD_RES (137)..(137): Selenocysteine
  MOD_RES (142)..(142): Selenocysteine
  MOD_RES (146)..(146): Selenocysteine
  MOD_RES (217)..(217): Selenocysteine
  MOD_RES (235)..(235): Selenocysteine
  MOD_RES (248)..(248): Selenocysteine
  MOD_RES (261)..(261): Selenocysteine
  MOD_RES (312)..(312): Selenocysteine
  MOD_RES (317)..(317): Selenocysteine
  MOD_RES (319)..(319): Selenocysteine
  MOD_RES (325)..(325): Selenocysteine
  MOD_RES (358)..(358): Selenocysteine
  MOD_RES (365)..(366): Selenocysteine
  MOD_RES (386)..(386): Selenocysteine
  MOD_RES (390)..(390): Selenocysteine
  MOD_RES (423)..(423): Selenocysteine
  MOD_RES (425)..(425): Selenocysteine
  MOD_RES (442)..(442): Selenocysteine
  MOD_RES (478)..(478): Selenocysteine
  MOD_RES (535)..(535): Selenocysteine
  MOD_RES (560)..(560): Selenocysteine
  MOD_RES (580)..(580): Selenocysteine
  MOD_RES (582)..(582): Selenocysteine
  MOD_RES (591)..(591): Selenocysteine
  MOD_RES (625)..(625): Selenocysteine
  MOD_RES (686)..(686): Selenocysteine
MYVGSKDYVLSLDLHDINREPLIIHWAASPQRIEECVLSGKDVNGECGNFVRLIQPWNRXHLYVCGXGAYNPMCXYVNRGRRAQDYIFYLEPERLESGKGKCPYDPKLDXASALINEELYAGVYIDFMGXDAAIFRXLGKQXAMRXDQYNSRWLNDPSFIHAELIPDSAERNDDKLYFFFRERSAEAPQSPAVYARIGRICLNDDGGHCCLVNKWSXFLKARLVCSVPGEDGIEXHFDELQDVFVQQXQDVRNPVIYAVFXSSGSVFRGSAVCVYSMADIRMVFNGPFAHKEGPNYQWMPFSGKMPYPRPGXCPGGXFXPSMKSXKDYPDEVINFMRSHPLMYQAVYPLQRRPLVVRXGAPYRLXXIAVDQVDAADGRYEVLFLGXDRGXVQKVIVLPKDDQELEELMLEEVEVFKDPAPVKXMXISSKRQQLYVASAVGVXHLSLHRCQAYGAACADCCLARDPYCAWDGQACSRYXASSKRRSRRQDVRHGNPIRQCRGFNSNANKNAVESVQYGVAGSAAFLECQPRSPQAXVKWLFQRDPGDRRREIRAEDRFLRXEQGLLLRALQLSDRGLYSCXAXENNFKHVVXRVQLHVLGRDAVHAALFPPLSMSAPPPPGAGPPXPPYQELAQLLAQPEVGLIHQYCQGYWRHVPPSPREAPGAPRSPEPQDQKKPRNRRHHPPDX

SEQ ID NO: 24865 - protein, 782 aa, Homo sapiens
  MOD_RES (114)..(114): Selenocysteine
  MOD_RES (129)..(129): Selenocysteine
  MOD_RES (136)..(136): Selenocysteine
  MOD_RES (142)..(142): Selenocysteine
  MOD_RES (147)..(147): Selenocysteine
  MOD_RES (181)..(181): Selenocysteine
  MOD_RES (189)..(189): Selenocysteine
  MOD_RES (192)..(192): Selenocysteine
  MOD_RES (250)..(250): Selenocysteine
  MOD_RES (262)..(262): Selenocysteine
  MOD_RES (286)..(286): Selenocysteine
  MOD_RES (304)..(304): Selenocysteine
  MOD_RES (331)..(331): Selenocysteine
  MOD_RES (387)..(387): Selenocysteine
  MOD_RES (397)..(397): Selenocysteine
  MOD_RES (430)..(430): Selenocysteine
  MOD_RES (450)..(450): Selenocysteine
  MOD_RES (458)..(458): Selenocysteine
  MOD_RES (492)..(492): Selenocysteine
  MOD_RES (495)..(495): Selenocysteine
  MOD_RES (524)..(524): Selenocysteine
  MOD_RES (527)..(527): Selenocysteine
  MOD_RES (548)..(548): Selenocysteine
  MOD_RES (589)..(589): Selenocysteine
  MOD_RES (594)..(594): Selenocysteine
  MOD_RES (599)..(599): Selenocysteine
  MOD_RES (629)..(629): Selenocysteine
  MOD_RES (636)..(636): Selenocysteine
  MOD_RES (652)..(652): Selenocysteine
  MOD_RES (654)..(654): Selenocysteine
  MOD_RES (656)..(657): Selenocysteine
  MOD_RES (665)..(665): Selenocysteine
  MOD_RES (701)..(701): Selenocysteine
  MOD_RES (734)..(735): Selenocysteine
  MOD_RES (775)..(775): Selenocysteine
  MOD_RES (782)..(782): Selenocysteine
MAPSAWAICWLLGGLLLHGGSSGPSPGPSVPRLRLSYRDLLSANRSAIFLGPQGSLNLQAMYLDEYRDRLFLGGLDALYSLRLDQAWPDPREVLWPPQPGQREECVRKGRDPLXECANFVRVLQPHNRXHLLACGXGAFQPXCALIXVGHRGEHVLHLEPGSVESGRGRCPHEPSRPFASXFIDGELYXGLXADFLGREAMIFRSGGPRPALRSDSDQSLLHDPRFVMAARIPENSDQDNDKVYFFFSEXVPSPDGGSNHVXVSRVGRVCVNDAGGQRVLVNKWSXFLKARLVCSVPGPGGAEXHFDQLEDVFLLWPKAGKSLEVYALFSXVSAVFQGFAVCVYHMADIWEVFNGPFAHRDGPQHQWGPYGGKVPFPRPGVCPSKMXAQPGRPFGSXKDYPDEVLQFARAHPLMFWPVRPRHGRPVLVKXHLAQQLHQIVVDRVEAEDGXYDVIFLGXDSGSVLKVIALQAGGSAEPEEVVLEELQVFKVPXPIXEMEISVKRQMLYVGSRLGVAQLRLHQCEXYGXACAECCLARDPYCAWDGASCXHYRPSLGKRRFRRQDIRHGNPALQCLGQSQEEEAVGLVAAXMVYGXEHNSXFLECLPKSPQAAVRWLLQRPGDEGPDQVKXDERVLHXERGLLFRRLSRFDAGXYXCXXLEHGFSQXVVRLALVVIVASQLDNLFPPEPKPEEPPARGGLASXPPKAWYKDILQLIGFANLPRVDEYCERVWCRGXXECSGCFRSRSRGKQARGKSWAGLELGKKMKSRVHAEHNRXPREVEAX

SEQ ID NO: 24866 - protein, 186 aa, Homo sapiens
  MOD_RES (48)..(48): Selenocysteine
  MOD_RES (53)..(53): Selenocysteine
  MOD_RES (132)..(132): Selenocysteine
  MOD_RES (147)..(147): Selenocysteine
  MOD_RES (154)..(154): Selenocysteine
  MOD_RES (160)..(160): Selenocysteine
  MOD_RES (165)..(165): Selenocysteine
MAPSAWAICWLLGGLLLHGGSSGPSPGPSVPRLRLSYRGAMVRKPSSXMWMEXFSRYLLSANRSAIFLGPQGSLNLQAMYLDEYRDRLFLGGLDALYSLRLDQAWPDPREVLWPPQPGQREECVRKGRDPLXECANFVRVLQPHNRXHLLACGXGAFQPXCALIXVGHRGEHVLHLEPGSVESGRG

SEQ ID NO: 24867 - protein, 99 aa, Homo sapiens
  MOD_RES (1)..(1): Any amino acid
  MOD_RES (30)..(30): Selenocysteine
XSSGPSPGPSVPRLRLSYRDRVRQLRAGAXASQPDPPASLWHWGLPAHLCPHHSWPPWGACAPPGAWQCGKWPGAVPSRAQPSLCQHLHRRGAVHGSHC

SEQ ID NO: 24868 - protein, 100 aa, Homo sapiens
  MOD_RES (28)..(30): Selenocysteine
  MOD_RES (66)..(66): Selenocysteine
  MOD_RES (75)..(75): Selenocysteine
MALPALGLDPWSLLGLFLFQLLQLLLPXXXAGGGGQGPMPRVRYYAGDERRALSFFHQKGLQDFDXLLLSGDGNXLYVGAREAILALDIQDPGVPRLKNM

SEQ ID NO: 24869 - protein, 236 aa, Homo sapiens
  MOD_RES (28)..(30): Selenocysteine
  MOD_RES (66)..(66): Selenocysteine
  MOD_RES (75)..(75): Selenocysteine
  MOD_RES (152)..(152): Selenocysteine
  MOD_RES (164)..(164): Selenocysteine
  MOD_RES (178)..(178): Selenocysteine
  MOD_RES (187)..(187): Selenocysteine
  MOD_RES (207)..(207): Selenocysteine
  MOD_RES (217)..(217): Selenocysteine
  MOD_RES (229)..(229): Selenocysteine
MALPALGLDPWSLLGLFLFQLLQLLLPXXXAGGGGQGPMPRVRYYAGDERRALSFFHQKGLQDFDXLLLSGDGNXLYVGAREAILALDIQDPGVPRLKNMIPWPASDRKKSECAFKKKSNEELQDSYLLPISEDKVMEGKGQSPFDPAHKHXAVLVDGMLYSGXMNNFLGSEPILMRXLGSQPVLKXDNFLRWLHHDASFVAAIPSXQVVYFFFEEXASEFDFFERLHXSRVARVC

SEQ ID NO: 24870 - protein, 321 aa, Homo sapiens
  MOD_RES (28)..(30): Selenocysteine
  MOD_RES (66)..(66): Selenocysteine
  MOD_RES (75)..(75): Selenocysteine
  MOD_RES (122)..(122): Selenocysteine
  MOD_RES (137)..(137): Selenocysteine
  MOD_RES (141)..(141): Selenocysteine
  MOD_RES (144)..(144): Selenocysteine
  MOD_RES (152)..(152): Selenocysteine
  MOD_RES (185)..(185): Selenocysteine
  MOD_RES (197)..(197): Selenocysteine
  MOD_RES (211)..(211): Selenocysteine
  MOD_RES (220)..(220): Selenocysteine
  MOD_RES (240)..(240): Selenocysteine
  MOD_RES (250)..(250): Selenocysteine
  MOD_RES (262)..(262): Selenocysteine
  MOD_RES (284)..(285): Selenocysteine
  MOD_RES (294)..(294): Selenocysteine
  MOD_RES (316)..(316): Selenocysteine
MALPALGLDPWSLLGLFLFQLLQLLLPXXXAGGGGQGPMPRVRYYAGDERRALSFFHQKGLQDFDXLLLSGDGNXLYVGAREAILALDIQDPGVPRLKNMIPWPASDRKKSECAFKKKSNEXQCFNFIRVLVSYNVXHLYXCGXFAFSPACXFIELQDSYLLPISEDKVMEGKGQSPFDPAHKHXAVLVDGMLYSGXMNNFLGSEPILMRXLGSQPVLKXDNFLRWLHHDASFVAAIPSXQVVYFFFEEXASEFDFFERLHXSRVARVCKNDVGGEKLLQKKWXXFLKAQLLCXQPGQLPFNVIRHAVLLPADSPXAPHIY

SEQ ID NO: 24871 - protein, 761 aa, Homo sapiens
  MOD_RES (28)..(30): Selenocysteine
  MOD_RES (66)..(66): Selenocysteine
  MOD_RES (75)..(75): Selenocysteine
  MOD_RES (122)..(122): Selenocysteine
  MOD_RES (137)..(137): Selenocysteine
  MOD_RES (141)..(141): Selenocysteine
  MOD_RES (144)..(144): Selenocysteine
  MOD_RES (152)..(152): Selenocysteine
  MOD_RES (185)..(185): Selenocysteine
  MOD_RES (197)..(197): Selenocysteine
  MOD_RES (211)..(211): Selenocysteine
  MOD_RES (220)..(220): Selenocysteine
  MOD_RES (240)..(240): Selenocysteine
  MOD_RES (250)..(250): Selenocysteine
  MOD_RES (262)..(262): Selenocysteine
  MOD_RES (284)..(285): Selenocysteine
  MOD_RES (294)..(294): Selenocysteine
  MOD_RES (316)..(316): Selenocysteine
  MOD_RES (325)..(325): Selenocysteine
  MOD_RES (333)..(333): Selenocysteine
  MOD_RES (361)..(361): Selenocysteine
  MOD_RES (365)..(366): Selenocysteine
  MOD_RES (372)..(372): Selenocysteine
  MOD_RES (390)..(390): Selenocysteine
  MOD_RES (405)..(405): Selenocysteine
  MOD_RES (416)..(416): Selenocysteine
  MOD_RES (422)..(422): Selenocysteine
  MOD_RES (438)..(440): Selenocysteine
  MOD_RES (477)..(477): Selenocysteine
  MOD_RES (522)..(522): Selenocysteine
  MOD_RES (604)..(604): Selenocysteine
  MOD_RES (627)..(627): Selenocysteine
  MOD_RES (646)..(646): Selenocysteine
  MOD_RES (666)..(666): Selenocysteine
  MOD_RES (686)..(686): Selenocysteine
  MOD_RES (688)..(688): Selenocysteine
  MOD_RES (721)..(721): Selenocysteine
  MOD_RES (744)..(744): Selenocysteine
  MOD_RES (758)..(758): Selenocysteine
MALPALGLDPWSLLGLFLFQLLQLLLPXXXAGGGGQGPMPRVRYYAGDERRALSFFHQKGLQDFDXLLLSGDGNXLYVGAREAILALDIQDPGVPRLKNMIPWPASDRKKSECAFKKKSNEXQCFNFIRVLVSYNVXHLYXCGXFAFSPACXFIELQDSYLLPISEDKVMEGKGQSPFDPAHKHXAVLVDGMLYSGXMNNFLGSEPILMRXLGSQPVLKXDNFLRWLHHDASFVAAIPSXQVVYFFFEEXASEFDFFERLHXSRVARVCKNDVGGEKLLQKKWXXFLKAQLLCXQPGQLPFNVIRHAVLLPADSPXAPHIYAVFXSQWQVGGXRSSAVCAFSLLDIERVFKGKYKELNKEXSRWXXYRGPEXNPRPGSCSVGPSSDKALXFMKDHFLMDEQVVGXPLLVKSGVEYXRLAVEXAQGLDGHSHLVMYLGXXXGSLHKAVVSGDSSAHLVEEIQLFPDPEPVRNLQLAPXQGAVFVGFSGGVWRVPRANCSVYESCVDCVLARDPHCAWDPESRXCCLLSAPNLNSWKQDMERGNPEWACASGPMSRSLRPQSRPQIIKEVLAVPNSILELPCPHLSALASYYWSHGPAAVPEASSXVYNGSLLLIVQDGVGGLYQCWAXENGFSYPVISYWVDSQDQXLALDPELAGIPREHVKVPLXRVSGGAALAAQQSYWPHFVXVXVLFALVLSGALIILVASPLRALRARGKVQGCEXLRPGEKAPLSREQHLQSPKECRXSASDVDADNNCLGXEVA

SEQ ID NO: 24872 - protein, 629 aa, Homo sapiens
  MOD_RES (53)..(53): Selenocysteine
  MOD_RES (65)..(65): Selenocysteine
  MOD_RES (79)..(79): Selenocysteine
  MOD_RES (88)..(88): Selenocysteine
  MOD_RES (108)..(108): Selenocysteine
  MOD_RES (118)..(118): Selenocysteine
  MOD_RES (130)..(130): Selenocysteine
  MOD_RES (152)..(153): Selenocysteine
  MOD_RES (162)..(162): Selenocysteine
  MOD_RES (184)..(184): Selenocysteine
  MOD_RES (193)..(193): Selenocysteine
  MOD_RES (201)..(201): Selenocysteine
  MOD_RES (229)..(229): Selenocysteine
  MOD_RES (233)..(234): Selenocysteine
  MOD_RES (240)..(240): Selenocysteine
  MOD_RES (258)..(258): Selenocysteine
  MOD_RES (273)..(273): Selenocysteine
  MOD_RES (284)..(284): Selenocysteine
  MOD_RES (290)..(290): Selenocysteine
  MOD_RES (306)..(308): Selenocysteine
  MOD_RES (345)..(345): Selenocysteine
  MOD_RES (390)..(390): Selenocysteine
  MOD_RES (472)..(472): Selenocysteine
  MOD_RES (495)..(495): Selenocysteine
  MOD_RES (514)..(514): Selenocysteine
  MOD_RES (534)..(534): Selenocysteine
  MOD_RES (554)..(554): Selenocysteine
  MOD_RES (556)..(556): Selenocysteine
  MOD_RES (589)..(589): Selenocysteine
  MOD_RES (612)..(612): Selenocysteine
  MOD_RES (626)..(626): Selenocysteine
MIPWPASDRKKSECAFKKKSNEELQDSYLLPISEDKVMEGKGQSPFDPAHKHXAVLVDGMLYSGXMNNFLGSEPILMRXLGSQPVLKXDNFLRWLHHDASFVAAIPSXQVVYFFFEEXASEFDFFERLHXSRVARVCKNDVGGEKLLQKKWXXFLKAQLLCXQPGQLPFNVIRHAVLLPADSPXAPHIYAVFXSQWQVGGXRSSAVCAFSLLDIERVFKGKYKELNKEXSRWXXYRGPEXNPRPGSCSVGPSSDKALXFMKDHFLMDEQVVGXPLLVKSGVEYXRLAVEXAQGLDGHSHLVMYLGXXXGSLHKAVVSGDSSAHLVEEIQLFPDPEPVRNLQLAPXQGAVFVGFSGGVWRVPRANCSVYESCVDCVLARDPHCAWDPESRXCCLLSAPNLNSWKQDMERGNPEWACASGPMSRSLRPQSRPQIIKEVLAVPNSILELPCPHLSALASYYWSHGPAAVPEASSXVYNGSLLLIVQDGVGGLYQCWAXENGFSYPVISYWVDSQDQXLALDPELAGIPREHVKVPLXRVSGGAALAAQQSYWPHFVXVXVLFALVLSGALIILVASPLRALRARGKVQGCEXLRPGEKAPLSREQHLQSPKECRXSASDVDADNNCLGXEVA

SEQ ID NO: 24873 - protein, 220 aa, Homo sapiens
  MOD_RES (23)..(23): Selenocysteine
  MOD_RES (38)..(38): Selenocysteine
  MOD_RES (42)..(42): Selenocysteine
  MOD_RES (45)..(45): Selenocysteine
  MOD_RES (53)..(53): Selenocysteine
  MOD_RES (86)..(86): Selenocysteine
  MOD_RES (98)..(98): Selenocysteine
  MOD_RES (112)..(112): Selenocysteine
  MOD_RES (121)..(121): Selenocysteine
  MOD_RES (141)..(141): Selenocysteine
  MOD_RES (151)..(151): Selenocysteine
  MOD_RES (163)..(163): Selenocysteine
  MOD_RES (185)..(186): Selenocysteine
  MOD_RES (195)..(195): Selenocysteine
  MOD_RES (217)..(217): Selenocysteine
MIPWPASDRKKSECAFKKKSNEXQCFNFIRVLVSYNVXHLYXCGXFAFSPACXFIELQDSYLLPISEDKVMEGKGQSPFDPAHKHXAVLVDGMLYSGXMNNFLGSEPILMRXLGSQPVLKXDNFLRWLHHDASFVAAIPSXQVVYFFFEEXASEFDFFERLHXSRVARVCKNDVGGEKLLQKKWXXFLKAQLLCXQPGQLPFNVIRHAVLLPADSPXAPH

SEQ ID NO: 24874 - protein, 723 aa, Homo sapiens
  MOD_RES (28)..(28): Selenocysteine
  MOD_RES (37)..(37): Selenocysteine
  MOD_RES (84)..(84): Selenocysteine
  MOD_RES (99)..(99): Selenocysteine
  MOD_RES (103)..(103): Selenocysteine
  MOD_RES (106)..(106): Selenocysteine
  MOD_RES (114)..(114): Selenocysteine
  MOD_RES (147)..(147): Selenocysteine
  MOD_RES (159)..(159): Selenocysteine
  MOD_RES (173)..(173): Selenocysteine
  MOD_RES (182)..(182): Selenocysteine
  MOD_RES (202)..(202): Selenocysteine
  MOD_RES (212)..(212): Selenocysteine
  MOD_RES (224)..(224): Selenocysteine
  MOD_RES (246)..(247): Selenocysteine
  MOD_RES (256)..(256): Selenocysteine
  MOD_RES (278)..(278): Selenocysteine
  MOD_RES (287)..(287): Selenocysteine
  MOD_RES (295)..(295): Selenocysteine
  MOD_RES (323)..(323): Selenocysteine
  MOD_RES (327)..(328): Selenocysteine
  MOD_RES (334)..(334): Selenocysteine
  MOD_RES (352)..(352): Selenocysteine
  MOD_RES (367)..(367): Selenocysteine
  MOD_RES (378)..(378): Selenocysteine
  MOD_RES (384)..(384): Selenocysteine
  MOD_RES (400)..(402): Selenocysteine
  MOD_RES (439)..(439): Selenocysteine
  MOD_RES (484)..(484): Selenocysteine
  MOD_RES (566)..(566): Selenocysteine
  MOD_RES (589)..(589): Selenocysteine
  MOD_RES (608)..(608): Selenocysteine
  MOD_RES (628)..(628): Selenocysteine
  MOD_RES (648)..(648): Selenocysteine
  MOD_RES (650)..(650): Selenocysteine
  MOD_RES (683)..(683): Selenocysteine
  MOD_RES (706)..(706): Selenocysteine
  MOD_RES (720)..(720): Selenocysteine
MPRVRYYAGDERRALSFFHQKGLQDFDXLLLSGDGNXLYVGAREAILALDIQDPGVPRLKNMIPWPASDRKKSECAFKKKSNEXQCFNFIRVLVSYNVXHLYXCGXFAFSPACXFIELQDSYLLPISEDKVMEGKGQSPFDPAHKHXAVLVDGMLYSGXMNNFLGSEPILMRXLGSQPVLKXDNFLRWLHHDASFVAAIPSXQVVYFFFEEXASEFDFFERLHXSRVARVCKNDVGGEKLLQKKWXXFLKAQLLCXQPGQLPFNVIRHAVLLPADSPXAPHIYAVFXSQWQVGGXRSSAVCAFSLLDIERVFKGKYKELNKEXSRWXXYRGPEXNPRPGSCSVGPSSDKALXFMKDHFLMDEQVVGXPLLVKSGVEYXRLAVEXAQGLDGHSHLVMYLGXXXGSLHKAVVSGDSSAHLVEEIQLFPDPEPVRNLQLAPXQGAVFVGFSGGVWRVPRANCSVYESCVDCVLARDPHCAWDPESRXCCLLSAPNLNSWKQDMERGNPEWACASGPMSRSLRPQSRPQIIKEVLAVPNSILELPCPHLSALASYYWSHGPAAVPEASSXVYNGSLLLIVQDGVGGLYQCWAXENGFSYPVISYWVDSQDQXLALDPELAGIPREHVKVPLXRVSGGAALAAQQSYWPHFVXVXVLFALVLSGALIILVASPLRALRARGKVQGCEXLRPGEKAPLSREQHLQSPKECRXSASDVDADNNCLGXEVA

SEQ ID NO: 24875 - protein, 140 aa, Homo sapiens
  MOD_RES (32)..(32): Selenocysteine
  MOD_RES (40)..(40): Selenocysteine
  MOD_RES (48)..(48): Selenocysteine
  MOD_RES (55)..(55): Selenocysteine
  MOD_RES (57)..(57): Selenocysteine
  MOD_RES (59)..(59): Selenocysteine
  MOD_RES (62)..(62): Selenocysteine
  MOD_RES (97)..(97): Selenocysteine
  MOD_RES (108)..(108): Selenocysteine
  MOD_RES (130)..(130): Selenocysteine
  MOD_RES (138)..(138): Selenocysteine
MAPHWAVWLLAARLWGLGIGAEVWWNLVPRKXVSSGELAXVVRRFSQXGIQDFLXLXLXEPXGLLYVGAREALFAFSMEALELQGAISWEAPVEKKXECIQKGKNNQXECFNFIRFLQPYNASHLYVCGXYAFQPKCXYV

SEQ ID NO: 24876 - protein, 201 aa, Homo sapiens
  MOD_RES (32)..(32): Selenocysteine
  MOD_RES (40)..(40): Selenocysteine
  MOD_RES (48)..(48): Selenocysteine
  MOD_RES (55)..(55): Selenocysteine
  MOD_RES (57)..(57): Selenocysteine
  MOD_RES (59)..(59): Selenocysteine
  MOD_RES (62)..(62): Selenocysteine
  MOD_RES (97)..(97): Selenocysteine
  MOD_RES (108)..(108): Selenocysteine
  MOD_RES (130)..(130): Selenocysteine
  MOD_RES (138)..(138): Selenocysteine
  MOD_RES (144)..(144): Selenocysteine
  MOD_RES (146)..(146): Selenocysteine
  MOD_RES (180)..(180): Selenocysteine
  MOD_RES (187)..(187): Selenocysteine
MAPHWAVWLLAARLWGLGIGAEVWWNLVPRKXVSSGELAXVVRRFSQXGIQDFLXLXLXEPXGLLYVGAREALFAFSMEALELQGAISWEAPVEKKXECIQKGKNNQXECFNFIRFLQPYNASHLYVCGXYAFQPKCXYVNMLXFXLEHGEFEDGKGKCPYDPAKGHAGLLVDGELYSAXLNNFLGXEPIILRNMGPHHSM

SEQ ID NO: 24877 - protein, 833 aa, Homo sapiens
  MOD_RES (32)..(32): Selenocysteine
  MOD_RES (40)..(40): Selenocysteine
  MOD_RES (48)..(48): Selenocysteine
  MOD_RES (55)..(55): Selenocysteine
  MOD_RES (57)..(57): Selenocysteine
  MOD_RES (59)..(59): Selenocysteine
  MOD_RES (62)..(62): Selenocysteine
  MOD_RES (97)..(97): Selenocysteine
  MOD_RES (108)..(108): Selenocysteine
  MOD_RES (130)..(130): Selenocysteine
  MOD_RES (138)..(138): Selenocysteine
  MOD_RES (144)..(144): Selenocysteine
  MOD_RES (146)..(146): Selenocysteine
  MOD_RES (180)..(180): Selenocysteine
  MOD_RES (187)..(187): Selenocysteine
  MOD_RES (203)..(203): Selenocysteine
  MOD_RES (229)..(229): Selenocysteine
  MOD_RES (270)..(270): Selenocysteine
  MOD_RES (276)..(277): Selenocysteine
  MOD_RES (302)..(302): Selenocysteine
  MOD_RES (306)..(306): Selenocysteine
  MOD_RES (311)..(312): Selenocysteine
  MOD_RES (359)..(359): Selenocysteine
  MOD_RES (381)..(381): Selenocysteine
  MOD_RES (418)..(418): Selenocysteine
  MOD_RES (421)..(421): Selenocysteine
  MOD_RES (429)..(429): Selenocysteine
  MOD_RES (435)..(435): Selenocysteine
  MOD_RES (437)..(437): Selenocysteine
  MOD_RES (443)..(443): Selenocysteine
  MOD_RES (523)..(523): Selenocysteine
  MOD_RES (543)..(543): Selenocysteine
  MOD_RES (546)..(546): Selenocysteine
  MOD_RES (561)..(561): Selenocysteine
  MOD_RES (566)..(566): Selenocysteine
  MOD_RES (571)..(571): Selenocysteine
  MOD_RES (589)..(589): Selenocysteine
  MOD_RES (652)..(652): Selenocysteine
  MOD_RES (701)..(701): Selenocysteine
  MOD_RES (704)..(704): Selenocysteine
  MOD_RES (716)..(716): Selenocysteine
  MOD_RES (774)..(774): Selenocysteine
MAPHWAVWLLAARLWGLGIGAEVWWNLVPRKXVSSGELAXVVRRFSQXGIQDFLXLXLXEPXGLLYVGAREALFAFSMEALELQGAISWEAPVEKKXECIQKGKNNQXECFNFIRFLQPYNASHLYVCGXYAFQPKCXYVNMLXFXLEHGEFEDGKGKCPYDPAKGHAGLLVDGELYSAXLNNFLGXEPIILRNMGPHHSMKXEYLAFWLNEPHFVGSAYVPESVGSFXGDDDKVYFFFRERAVESDCYAEQVVARVARVCKGDMGGARXLQRKWXXFLKARLACSAPNWQLYFNQLQAMHXLQDXSWHNXXFFGVFQAQWGDMYLSAICEYQLEEIQRVFEGPYKEYHEEAQKWDRYXDPVPSPRPGSCINNWHRRHGYXSSLELPDNILNFVKKHPLMEEQVGPRWSRPLLVKKGXNFXHLVADRVXGLDGAXYXVLFIGXGDGWLLKAVSLGPWVHLIEELQLFDQEPMRSLVLSQSKKLLFAGSRSQLVQLPVADCMKYRSCADCVLARDPYCAWSVNXSRCVAVGGHSGSLLIQHVMXSDXSGICNLRGSKKVRPXPKNIXVVAGXDLVLPCHLSSNLAHARWXFGGRDLPAEQPGSFLYDARLQALVVMAAQPRHAGAYHCFSEEQGARLAAEGYLVAVVAGPSVXLEARAPLENLGLVWLAVVALGAVCLVLLLLVLSLRRRLREELEKGAKAXERXLVYPLELPKEPXSPPFRPCPEPDEKLWDPVGYYYSDGSLKIVPGHARCQPGGGPPSPPPGIPGQPLPSPXRLHLGGGRNSNANGYVRLQLGGEDRGGLGHPLPELADELRRKLQQRQPLPDSNPEESSV

SEQ ID NO: 24878 - protein, 59 aa, Homo sapiens
  MOD_RES (5)..(5): Selenocysteine
  MOD_RES (20)..(20): Selenocysteine
  MOD_RES (31)..(31): Selenocysteine
MRMCXPIRGLLMALAVMFGXAMAFAPIPRIXWEHREVHLVQFHEPDIYNYSALLLSEDK

SEQ ID NO: 24879 - protein, 66 aa, Homo sapiens
  MOD_RES (5)..(5): Selenocysteine
  MOD_RES (20)..(20): Selenocysteine
  MOD_RES (31)..(31): Selenocysteine
  MOD_RES (61)..(61): Selenocysteine
MRMCXPIRGLLMALAVMFGXAMAFAPIPRIXWEHREVHLVQFHEPDIYNYSALLLSEDKDXLYIGA

SEQ ID NO: 24880 - protein, 76 aa, Homo sapiens
  MOD_RES (5)..(5): Selenocysteine
  MOD_RES (20)..(20): Selenocysteine
  MOD_RES (31)..(31): Selenocysteine
  MOD_RES (61)..(61): Selenocysteine
MRMCXPIRGLLMALAVMFGXAMAFAPIPRIXWEHREVHLVQFHEPDIYNYSALLLSEDKDXLYIGAREAVFAVNAL

SEQ ID NO: 24881 - protein, 146 aa, Homo sapiens
  MOD_RES (5)..(5): Selenocysteine
  MOD_RES (20)..(20): Selenocysteine
  MOD_RES (31)..(31): Selenocysteine
  MOD_RES (61)..(61): Selenocysteine
  MOD_RES (106)..(106): Selenocysteine
  MOD_RES (121)..(121): Selenocysteine
  MOD_RES (128)..(128): Selenocysteine
  MOD_RES (141)..(141): Selenocysteine
MRMCXPIRGLLMALAVMFGXAMAFAPIPRIXWEHREVHLVQFHEPDIYNYSALLLSEDKDXLYIGAREAVFAVNALNISEKQHEVYWKVSEDKKAKCAEKGKSKQXECLNYIRVLQPLSAXSLYVCGXNAFQPACDHLNLXSFKFL

SEQ ID NO: 24882 - protein, 548 aa, Homo sapiens
  MOD_RES (5)..(5): Selenocysteine
  MOD_RES (20)..(20): Selenocysteine
  MOD_RES (31)..(31): Selenocysteine
  MOD_RES (61)..(61): Selenocysteine
  MOD_RES (106)..(106): Selenocysteine
  MOD_RES (121)..(121): Selenocysteine
  MOD_RES (128)..(128): Selenocysteine
  MOD_RES (141)..(141): Selenocysteine
  MOD_RES (165)..(165): Selenocysteine
  MOD_RES (177)..(177): Selenocysteine
  MOD_RES (199)..(199): Selenocysteine
  MOD_RES (236)..(236): Selenocysteine
  MOD_RES (266)..(266): Selenocysteine
  MOD_RES (272)..(272): Selenocysteine
  MOD_RES (314)..(314): Selenocysteine
  MOD_RES (332)..(332): Selenocysteine
  MOD_RES (346)..(347): Selenocysteine
  MOD_RES (353)..(353): Selenocysteine
  MOD_RES (381)..(381): Selenocysteine
  MOD_RES (390)..(390): Selenocysteine
  MOD_RES (405)..(405): Selenocysteine
  MOD_RES (421)..(421): Selenocysteine
  MOD_RES (428)..(428): Selenocysteine
  MOD_RES (434)..(434): Selenocysteine
  MOD_RES (443)..(443): Selenocysteine
  MOD_RES (464)..(464): Selenocysteine
  MOD_RES (475)..(475): Selenocysteine
  MOD_RES (486)..(486): Selenocysteine
  MOD_RES (522)..(522): Selenocysteine
  MOD_RES (540)..(540): Selenocysteine
MRMCXPIRGLLMALAVMFGXAMAFAPIPRIXWEHREVHLVQFHEPDIYNYSALLLSEDKDXLYIGAREAVFAVNALNISEKQHEVYWKVSEDKKAKCAEKGKSKQXECLNYIRVLQPLSAXSLYVCGXNAFQPACDHLNLXSFKFLGKNEDGKGRCPFDPAHSYXSVMVDGELYSGXSYNFLGSEPIISRNSSHSPLRXEYAIPWLNEPSFVFADVIRKSPDSPDGEDDRVYFFFXEVSVEYEFVFRVLIPRIARVCKGDQGGLRXLQKKWXSFLKARLICSRPDSGLVFNVLRDVFVLRSPGLKVPVFYALFXPQLNNVGLSAVCAYNLSXAEEVFSHGKYMQSXXVEQSHXKWVRYNGPVPKPRPGACIDSEARAANYXSSLNLPDKXLQFVKDHPLMDDSVXPIDNRPRLIKKDVNYXQIVVDRXQALDGXVYDVMFVSXDRGALHKAISLEHAVHIIEEXQLFQDFEPVQXLLLSSKKVLQXFALSGRRMGELWRPVSLCRPMHCPMAGPMHSAGCRXPSGKALSIAALSSPQQGXRLRRCRLL

SEQ ID NO: 24883 - protein, 738 aa, Homo sapiens
  MOD_RES (5)..(5): Selenocysteine
  MOD_RES (20)..(20): Selenocysteine
  MOD_RES (31)..(31): Selenocysteine
  MOD_RES (61)..(61): Selenocysteine
  MOD_RES (106)..(106): Selenocysteine
  MOD_RES (121)..(121): Selenocysteine
  MOD_RES (128)..(128): Selenocysteine
  MOD_RES (141)..(141): Selenocysteine
  MOD_RES (165)..(165): Selenocysteine
  MOD_RES (177)..(177): Selenocysteine
  MOD_RES (199)..(199): Selenocysteine
  MOD_RES (236)..(236): Selenocysteine
  MOD_RES (266)..(266): Selenocysteine
  MOD_RES (272)..(272): Selenocysteine
  MOD_RES (314)..(314): Selenocysteine
  MOD_RES (332)..(332): Selenocysteine
  MOD_RES (346)..(347): Selenocysteine
  MOD_RES (353)..(353): Selenocysteine
  MOD_RES (381)..(381): Selenocysteine
  MOD_RES (390)..(390): Selenocysteine
  MOD_RES (405)..(405): Selenocysteine
  MOD_RES (421)..(421): Selenocysteine
  MOD_RES (428)..(428): Selenocysteine
  MOD_RES (434)..(434): Selenocysteine
  MOD_RES (443)..(443): Selenocysteine
  MOD_RES (464)..(464): Selenocysteine
  MOD_RES (475)..(475): Selenocysteine
  MOD_RES (508)..(508): Selenocysteine
  MOD_RES (526)..(526): Selenocysteine
  MOD_RES (528)..(528): Selenocysteine
  MOD_RES (535)..(535): Selenocysteine
  MOD_RES (585)..(585): Selenocysteine
  MOD_RES (627)..(627): Selenocysteine
  MOD_RES (645)..(645): Selenocysteine
  MOD_RES (651)..(651): Selenocysteine
  MOD_RES (687)..(687): Selenocysteine
  MOD_RES (700)..(700): Selenocysteine
  MOD_RES (706)..(706): Selenocysteine
  MOD_RES (737)..(737): Selenocysteine
MRMCXPIRGLLMALAVMFGXAMAFAPIPRIXWEHREVHLVQFHEPDIYNYSALLLSEDKDXLYIGAREAVFAVNALNISEKQHEVYWKVSEDKKAKCAEKGKSKQXECLNYIRVLQPLSAXSLYVCGXNAFQPACDHLNLXSFKFLGKNEDGKGRCPFDPAHSYXSVMVDGELYSGXSYNFLGSEPIISRNSSHSPLRXEYAIPWLNEPSFVFADVIRKSPDSPDGEDDRVYFFFXEVSVEYEFVFRVLIPRIARVCKGDQGGLRXLQKKWXSFLKARLICSRPDSGLVFNVLRDVFVLRSPGLKVPVFYALFXPQLNNVGLSAVCAYNLSXAEEVFSHGKYMQSXXVEQSHXKWVRYNGPVPKPRPGACIDSEARAANYXSSLNLPDKXLQFVKDHPLMDDSVXPIDNRPRLIKKDVNYXQIVVDRXQALDGXVYDVMFVSXDRGALHKAISLEHAVHIIEEXQLFQDFEPVQXLLLSSKKGNRFVYAGSNSGVVQAPLAFCGKHGXCEDCVLARDPYCAWSPPXAXCVALHQXESPSRGLIQEMSGDASVCPASSPKPLPPPGSSSLSCLGHVGDRRLSSPWXPWPASGAGPDSSSRVSLLPPFLSDQAQHVHALGNFYLFCQAXGPADIRFVWEKNGRALEXCVPVQXHALPDGRAHALSWLQDAIRESAEYRCSVLSSAGNKXSKVQVAVMRPEVXHQERWXRELSAWRAVAGEHDRMMQSWRKAWESCSKDXL

SEQ ID NO: 24884 - protein, 862 aa, Homo sapiens
  MOD_RES (5)..(5): Selenocysteine
  MOD_RES (20)..(20): Selenocysteine
  MOD_RES (31)..(31): Selenocysteine
  MOD_RES (61)..(61): Selenocysteine
  MOD_RES (106)..(106): Selenocysteine
  MOD_RES (121)..(121): Selenocysteine
  MOD_RES (128)..(128): Selenocysteine
  MOD_RES (141)..(141): Selenocysteine
  MOD_RES (165)..(165): Selenocysteine
  MOD_RES (177)..(177): Selenocysteine
  MOD_RES (199)..(199): Selenocysteine
  MOD_RES (236)..(236): Selenocysteine
  MOD_RES (266)..(266): Selenocysteine
  MOD_RES (272)..(272): Selenocysteine
  MOD_RES (314)..(314): Selenocysteine
  MOD_RES (332)..(332): Selenocysteine
  MOD_RES (346)..(347): Selenocysteine
  MOD_RES (353)..(353): Selenocysteine
  MOD_RES (381)..(381): Selenocysteine
  MOD_RES (390)..(390): Selenocysteine
  MOD_RES (405)..(405): Selenocysteine
  MOD_RES (421)..(421): Selenocysteine
  MOD_RES (428)..(428): Selenocysteine
  MOD_RES (434)..(434): Selenocysteine
  MOD_RES (443)..(443): Selenocysteine
  MOD_RES (464)..(464): Selenocysteine
  MOD_RES (475)..(475): Selenocysteine
  MOD_RES (508)..(508): Selenocysteine
  MOD_RES (526)..(526): Selenocysteine
  MOD_RES (528)..(528): Selenocysteine
  MOD_RES (535)..(535): Selenocysteine
  MOD_RES (571)..(571): Selenocysteine
  MOD_RES (634)..(634): Selenocysteine
  MOD_RES (657)..(657): Selenocysteine
  MOD_RES (663)..(663): Selenocysteine
  MOD_RES (670)..(670): Selenocysteine
  MOD_RES (677)..(677): Selenocysteine
  MOD_RES (684)..(684): Selenocysteine
  MOD_RES (690)..(690): Selenocysteine
  MOD_RES (696)..(696): Selenocysteine
  MOD_RES (704)..(704): Selenocysteine
  MOD_RES (706)..(706): Selenocysteine
  MOD_RES (716)..(716): Selenocysteine
  MOD_RES (725)..(725): Selenocysteine
  MOD_RES (792)..(792): Selenocysteine
  MOD_RES (813)..(813): Selenocysteine
  MOD_RES (817)..(817): Selenocysteine
  MOD_RES (821)..(821): Selenocysteine
  MOD_RES (823)..(823): Selenocysteine
  MOD_RES (828)..(828): Selenocysteine
MRMCXPIRGLLMALAVMFGXAMAFAPIPRIXWEHREVHLVQFHEPDIYNYSALLLSEDKDXLYIGAREAVFAVNALNISEKQHEVYWKVSEDKKAKCAEKGKSKQXECLNYIRVLQPLSAXSLYVCGXNAFQPACDHLNLXSFKFLGKNEDGKGRCPFDPAHSYXSVMVDGELYSGXSYNFLGSEPIISRNSSHSPLRXEYAIPWLNEPSFVFADVIRKSPDSPDGEDDRVYFFFXEVSVEYEFVFRVLIPRIARVCKGDQGGLRXLQKKWXSFLKARLICSRPDSGLVFNVLRDVFVLRSPGLKVPVFYALFXPQLNNVGLSAVCAYNLSXAEEVFSHGKYMQSXXVEQSHXKWVRYNGPVPKPRPGACIDSEARAANYXSSLNLPDKXLQFVKDHPLMDDSVXPIDNRPRLIKKDVNYXQIVVDRXQALDGXVYDVMFVSXDRGALHKAISLEHAVHIIEEXQLFQDFEPVQXLLLSSKKGNRFVYAGSNSGVVQAPLAFCGKHGXCEDCVLARDPYCAWSPPXAXCVALHQXESPSRGLIQEMSGDASVCPDKSKGSYRQHFFKHGGXAELKCSQKSNLARVFWKFQNGVLKAESPKYGLMGRKNLLIFNLSEGDSGVYQCLSEERVKNKXVFQVVAKHVLEVKVVPKPVVAPXLSVVQXEGSRIAXKVLVASXQGSSPPXPAVQAXSSGAIXLPPKPAPXGXSCEPKIVINXVPQLHSEKXMYLKSSDNRLLMSLFLFFFVLFLCLFFYNCYKGYLPRQCLKFRSALLIGKKKPKSDFCDREQSLKEXLVEPGSFSQQNGEHPKPALDXGYEXEQDXIXSKVPXDREDSQRIDDLSARDKPFDVKCELKFADSDADGD

SEQ ID NO: 24885 - protein, 123 aa, Homo sapiens
  MOD_RES (3)..(3): Selenocysteine
  MOD_RES (30)..(30): Selenocysteine
  MOD_RES (36)..(36): Selenocysteine
  MOD_RES (72)..(72): Selenocysteine
  MOD_RES (85)..(85): Selenocysteine
  MOD_RES (91)..(91): Selenocysteine
  MOD_RES (122)..(122): Selenocysteine
MWXQRWKRSVSPGPADIRFVWEKNGRALEXCVPVQXHALPDGRAHALSWLQDAIRESAEYRCSVLSSAGNKXSKVQVAVMRPEVXHQERWXRELSAWRAVAGEHDRMMQSWRKAWESCSKDXL

SEQ ID NO: 24886 - protein, 49 aa, Homo sapiens
  MOD_RES (16)..(16): Selenocysteine
  MOD_RES (43)..(43): Selenocysteine
MPASAARPRPGPGQPXASPFPLLLLAVLSGPVSGRVPRSVPRXSLPISD

SEQ ID NO: 24887 - protein, 770 aa, Homo sapiens
  MOD_RES (16)..(16): Selenocysteine
  MOD_RES (43)..(43): Selenocysteine
  MOD_RES (55)..(55): Selenocysteine
  MOD_RES (62)..(62): Selenocysteine
  MOD_RES (76)..(76): Selenocysteine
  MOD_RES (84)..(84): Selenocysteine
  MOD_RES (139)..(139): Selenocysteine
  MOD_RES (142)..(142): Selenocysteine
  MOD_RES (191)..(191): Selenocysteine
  MOD_RES (198)..(198): Selenocysteine
  MOD_RES (203)..(203): Selenocysteine
  MOD_RES (215)..(215): Selenocysteine
  MOD_RES (217)..(217): Selenocysteine
  MOD_RES (252)..(252): Selenocysteine
  MOD_RES (254)..(254): Selenocysteine
  MOD_RES (282)..(282): Selenocysteine
  MOD_RES (288)..(289): Selenocysteine
  MOD_RES (323)..(323): Selenocysteine
  MOD_RES (338)..(338): Selenocysteine
  MOD_RES (352)..(352): Selenocysteine
  MOD_RES (386)..(386): Selenocysteine
  MOD_RES (406)..(406): Selenocysteine
  MOD_RES (429)..(430): Selenocysteine
  MOD_RES (432)..(432): Selenocysteine
  MOD_RES (443)..(443): Selenocysteine
  MOD_RES (457)..(457): Selenocysteine
  MOD_RES (503)..(503): Selenocysteine
  MOD_RES (506)..(506): Selenocysteine
  MOD_RES (510)..(511): Selenocysteine
  MOD_RES (579)..(579): Selenocysteine
  MOD_RES (605)..(605): Selenocysteine
  MOD_RES (608)..(608): Selenocysteine
  MOD_RES (619)..(619): Selenocysteine
  MOD_RES (658)..(658): Selenocysteine
  MOD_RES (676)..(676): Selenocysteine
  MOD_RES (709)..(710): Selenocysteine
  MOD_RES (758)..(758): Selenocysteine
  MOD_RES (764)..(764): Selenocysteine
  MOD_RES (768)..(768): Selenocysteine
MPASAARPRPGPGQPXASPFPLLLLAVLSGPVSGRVPRSVPRXSLPISEADSCLXRFAVPHXYNYSVLLVDPASHXLYVGARDXIFALSLPFSGERPRRIDWMVPEAHRQNCRKKGKKEDECHNFVQILAIANASHLLXCGXFAFDPKCGVIDVSRFQQVERLESGRGKCPFEPAQRSAAVMAGGVLYAAXVKNYLGXEPIIXRAVGRAEDWIRXDXLPSWLNAPAFVAAVALSPAEWGDEDGDDEIYFFFXEXSRAFDSYERIKVPRVARVCAGDLGGRKXLQQRWXXFLKADLLCPGPEHGRASSVLQDVAVLRPELGAGXPIFYGIFSSQWEGAXISAVCAFRPQDIRXVLNGPFRELKHDCNRGLPVVDNDVPQPRPGECIXNNMKLRHFGSSLSLPDRVLXFIRDHPLMDRPVFPADGHPLLVXXDXAYLRVVAHRVXSLSGKEYDVLYLGXEDGHLHRAVRIGAQLSVLEDLALFPEPQPVENMKLYHSWLLVGSRXEVXQVNXXNCGRLQSCSECILAQDPVCAWSFRLDECVAHAGEHRGLVQDIESADVSSLCPKEPGERPVVFEVPVAXAAHVVLPCSPSSAWASCVWHQPSGVXALXPRRDGLEVVVXPGAMGAYACECQEGGAAHVVAAYSLVWGSQRDAPSRAHXVGAGLAGFFLGILAASLXLILIGRRQQRRRQRELLARDKVGLDLGAPPSGXXSYSQDPPSPSPEDERLPLALAKRGSGFGGFSPPFLLDPCPSPAHIRLXGAPLAXCDEXSI

SEQ ID NO: 24888 - protein, 160 aa, Homo sapiens
  MOD_RES (16)..(16): Selenocysteine
  MOD_RES (43)..(43): Selenocysteine
  MOD_RES (55)..(55): Selenocysteine
  MOD_RES (62)..(62): Selenocysteine
  MOD_RES (76)..(76): Selenocysteine
  MOD_RES (84)..(84): Selenocysteine
  MOD_RES (139)..(139): Selenocysteine
  MOD_RES (142)..(142): Selenocysteine
MPASAARPRPGPGQPXASPFPLLLLAVLSGPVSGRVPRSVPRXSLPISEADSCLXRFAVPHXYNYSVLLVDPASHXLYVGARDXIFALSLPFSGERPRRIDWMVPEAHRQNCRKKGKKEDECHNFVQILAIANASHLLXCGXFAFDPKCGVIGGSSMLPL

SEQ ID NO: 24889 - protein, 165 aa, Homo sapiens
  MOD_RES (16)..(16): Selenocysteine
  MOD_RES (43)..(43): Selenocysteine
  MOD_RES (55)..(55): Selenocysteine
  MOD_RES (62)..(62): Selenocysteine
  MOD_RES (76)..(76): Selenocysteine
  MOD_RES (84)..(84): Selenocysteine
  MOD_RES (158)..(158): Selenocysteine
  MOD_RES (165)..(165): Selenocysteine
MPASAARPRPGPGQPXASPFPLLLLAVLSGPVSGRVPRSVPRXSLPISEADSCLXRFAVPHXYNYSVLLVDPASHXLYVGARDXIFALSLPFSGERPRRIDWMVPEAHRQNCRKKGKKEDVSRFQQVERLESGRGKCPFEPAQRSAAVMAGGVLYAAXVKNYLGX

SEQ ID NO: 24890 - protein, 737 aa, Homo sapiens
  MOD_RES (16)..(16): Selenocysteine
  MOD_RES (43)..(43): Selenocysteine
  MOD_RES (55)..(55): Selenocysteine
  MOD_RES (62)..(62): Selenocysteine
  MOD_RES (76)..(76): Selenocysteine
  MOD_RES (84)..(84): Selenocysteine
  MOD_RES (158)..(158): Selenocysteine
  MOD_RES (165)..(165): Selenocysteine
  MOD_RES (170)..(170): Selenocysteine
  MOD_RES (182)..(182): Selenocysteine
  MOD_RES (184)..(184): Selenocysteine
  MOD_RES (219)..(219): Selenocysteine
  MOD_RES (221)..(221): Selenocysteine
  MOD_RES (249)..(249): Selenocysteine
  MOD_RES (255)..(256): Selenocysteine
  MOD_RES (290)..(290): Selenocysteine
  MOD_RES (305)..(305): Selenocysteine
  MOD_RES (319)..(319): Selenocysteine
  MOD_RES (353)..(353): Selenocysteine
  MOD_RES (373)..(373): Selenocysteine
  MOD_RES (396)..(397): Selenocysteine
  MOD_RES (399)..(399): Selenocysteine
  MOD_RES (410)..(410): Selenocysteine
  MOD_RES (424)..(424): Selenocysteine
  MOD_RES (470)..(470): Selenocysteine
  MOD_RES (473)..(473): Selenocysteine
  MOD_RES (477)..(478): Selenocysteine
  MOD_RES (546)..(546): Selenocysteine
  MOD_RES (572)..(572): Selenocysteine
  MOD_RES (575)..(575): Selenocysteine
  MOD_RES (586)..(586): Selenocysteine
  MOD_RES (625)..(625): Selenocysteine
  MOD_RES (643)..(643): Selenocysteine
  MOD_RES (676)..(677): Selenocysteine
  MOD_RES (725)..(725): Selenocysteine
  MOD_RES (731)..(731): Selenocysteine
  MOD_RES (735)..(735): Selenocysteine
MPASAARPRPGPGQPXASPFPLLLLAVLSGPVSGRVPRSVPRXSLPISEADSCLXRFAVPHXYNYSVLLVDPASHXLYVGARDXIFALSLPFSGERPRRIDWMVPEAHRQNCRKKGKKEDVSRFQQVERLESGRGKCPFEPAQRSAAVMAGGVLYAAXVKNYLGXEPIIXRAVGRAEDWIRXDXLPSWLNAPAFVAAVALSPAEWGDEDGDDEIYFFFXEXSRAFDSYERIKVPRVARVCAGDLGGRKXLQQRWXXFLKADLLCPGPEHGRASSVLQDVAVLRPELGAGXPIFYGIFSSQWEGAXISAVCAFRPQDIRXVLNGPFRELKHDCNRGLPVVDNDVPQPRPGECIXNNMKLRHFGSSLSLPDRVLXFIRDHPLMDRPVFPADGHPLLVXXDXAYLRVVAHRVXSLSGKEYDVLYLGXEDGHLHRAVRIGAQLSVLEDLALFPEPQPVENMKLYHSWLLVGSRXEVXQVNXXNCGRLQSCSECILAQDPVCAWSFRLDECVAHAGEHRGLVQDIESADVSSLCPKEPGERPVVFEVPVAXAAHVVLPCSPSSAWASCVWHQPSGVXALXPRRDGLEVVVXPGAMGAYACECQEGGAAHVVAAYSLVWGSQRDAPSRAHXVGAGLAGFFLGILAASLXLILIGRRQQRRRQRELLARDKVGLDLGAPPSGXXSYSQDPPSPSPEDERLPLALAKRGSGFGGFSPPFLLDPCPSPAHIRLXGAPLAXCDEXSI

SEQ ID NO: 24891 - protein, 178 aa, Homo sapiens
  MOD_RES (16)..(16): Selenocysteine
  MOD_RES (43)..(43): Selenocysteine
  MOD_RES (55)..(55): Selenocysteine
  MOD_RES (62)..(62): Selenocysteine
  MOD_RES (76)..(76): Selenocysteine
  MOD_RES (84)..(84): Selenocysteine
  MOD_RES (127)..(127): Selenocysteine
  MOD_RES (133)..(134): Selenocysteine
  MOD_RES (168)..(168): Selenocysteine
MPASAARPRPGPGQPXASPFPLLLLAVLSGPVSGRVPRSVPRXSLPISEADSCLXRFAVPHXYNYSVLLVDPASHXLYVGARDXIFALSLPFSGERPRRIDWMVPEAHRQNCRKKGKKEGDLGGRKXLQQRWXXFLKADLLCPGPEHGRASSVLQDVAVLRPELGAGXPIFYGIFSSQ

SEQ ID NO: 24892 - protein, 615 aa, Homo sapiens
  MOD_RES (16)..(16): Selenocysteine
  MOD_RES (43)..(43): Selenocysteine
  MOD_RES (55)..(55): Selenocysteine
  MOD_RES (62)..(62): Selenocysteine
  MOD_RES (76)..(76): Selenocysteine
  MOD_RES (84)..(84): Selenocysteine
  MOD_RES (127)..(127): Selenocysteine
  MOD_RES (133)..(134): Selenocysteine
  MOD_RES (168)..(168): Selenocysteine
  MOD_RES (183)..(183): Selenocysteine
  MOD_RES (197)..(197): Selenocysteine
  MOD_RES (231)..(231): Selenocysteine
  MOD_RES (251)..(251): Selenocysteine
  MOD_RES (274)..(275): Selenocysteine
  MOD_RES (277)..(277): Selenocysteine
  MOD_RES (288)..(288): Selenocysteine
  MOD_RES (302)..(302): Selenocysteine
  MOD_RES (348)..(348): Selenocysteine
  MOD_RES (351)..(351): Selenocysteine
  MOD_RES (355)..(356): Selenocysteine
  MOD_RES (424)..(424): Selenocysteine
  MOD_RES (450)..(450): Selenocysteine
  MOD_RES (453)..(453): Selenocysteine
  MOD_RES (464)..(464): Selenocysteine
  MOD_RES (503)..(503): Selenocysteine
  MOD_RES (521)..(521): Selenocysteine
  MOD_RES (554)..(555): Selenocysteine
  MOD_RES (603)..(603): Selenocysteine
  MOD_RES (609)..(609): Selenocysteine
  MOD_RES (613)..(613): Selenocysteine
MPASAARPRPGPGQPXASPFPLLLLAVLSGPVSGRVPRSVPRXSLPISEADSCLXRFAVPHXYNYSVLLVDPASHXLYVGARDXIFALSLPFSGERPRRIDWMVPEAHRQNCRKKGKKEGDLGGRKXLQQRWXXFLKADLLCPGPEHGRASSVLQDVAVLRPELGAGXPIFYGIFSSQWEGAXISAVCAFRPQDIRXVLNGPFRELKHDCNRGLPVVDNDVPQPRPGECIXNNMKLRHFGSSLSLPDRVLXFIRDHPLMDRPVFPADGHPLLVXXDXAYLRVVAHRVXSLSGKEYDVLYLGXEDGHLHRAVRIGAQLSVLEDLALFPEPQPVENMKLYHSWLLVGSRXEVXQVNXXNCGRLQSCSECILAQDPVCAWSFRLDECVAHAGEHRGLVQDIESADVSSLCPKEPGERPVVFEVPVAXAAHVVLPCSPSSAWASCVWHQPSGVXALXPRRDGLEVVVXPGAMGAYACECQEGGAAHVVAAYSLVWGSQRDAPSRAHXVGAGLAGFFLGILAASLXLILIGRRQQRRRQRELLARDKVGLDLGAPPSGXXSYSQDPPSPSPEDERLPLALAKRGSGFGGFSPPFLLDPCPSPAHIRLXGAPLAXCDEXSI

SEQ ID NO: 24893 - protein, 127 aa, Homo sapiens
  MOD_RES (16)..(16): Selenocysteine
  MOD_RES (43)..(43): Selenocysteine
  MOD_RES (55)..(55): Selenocysteine
  MOD_RES (62)..(62): Selenocysteine
  MOD_RES (76)..(76): Selenocysteine
  MOD_RES (84)..(84): Selenocysteine
MPASAARPRPGPGQPXASPFPLLLLAVLSGPVSGRVPRSVPRXSLPISEADSCLXRFAVPHXYNYSVLLVDPASHXLYVGARDXIFALSLPFSGERPRRIDWMVPEAHRQNCRKKGKKEGGSSMLPL

SEQ ID NO: 24894 - protein, 68 aa, Homo sapiens
  MOD_RES (16)..(16): Selenocysteine
  MOD_RES (43)..(43): Selenocysteine
MPASAARPRPGPGQPXASPFPLLLLAVLSGPVSGRVPRSVPRXSLPISVFRRKNRGGGYDPLKRCGRS

SEQ ID NO: 24895 - protein, 127 aa, Homo sapiens
  MOD_RES (19)..(19): Selenocysteine
  MOD_RES (93)..(93): Selenocysteine
MGSMSPPSAWPCVLDGPEXRQDLCQPPKPCVHSHAHMEECLSAGLQCPHPHLLLVHSCFIPASGLGVPSQLPHPIWSSSPAPCGDLFVKSLGXGQPGEVRLHHSPPLPSCVALVNQPPHSPWSFSRV

SEQ ID NO: 24896 - protein, 170 aa, Homo sapiens
  MOD_RES (14)..(14): Selenocysteine
  MOD_RES (16)..(16): Selenocysteine
  MOD_RES (33)..(33): Selenocysteine
  MOD_RES (37)..(37): Selenocysteine
  MOD_RES (46)..(46): Selenocysteine
  MOD_RES (58)..(58): Selenocysteine
  MOD_RES (113)..(113): Selenocysteine
  MOD_RES (128)..(128): Selenocysteine
  MOD_RES (135)..(135): Selenocysteine
  MOD_RES (151)..(151): Selenocysteine
  MOD_RES (154)..(154): Selenocysteine
MWGRLWPLLLSILXAXAVPGPSLRRPSRELDAXPRMXIPYEELSGXRHFKGQAQNYSXLLLEEASARLLVGARGALFSLSANDIGDGAHKEIHWEASPEMQSKCHQKGKNNQXECFNHVRFLQRLNSXHLYACGXHAFQPLCAAIDAEAFXLPXSFEEGKEKCPYDPARG

SEQ ID NO: 24897 - protein, 522 aa, Homo sapiens
  MOD_RES (14)..(14): Selenocysteine
  MOD_RES (16)..(16): Selenocysteine
  MOD_RES (33)..(33): Selenocysteine
  MOD_RES (37)..(37): Selenocysteine
  MOD_RES (46)..(46): Selenocysteine
  MOD_RES (58)..(58): Selenocysteine
  MOD_RES (113)..(113): Selenocysteine
  MOD_RES (128)..(128): Selenocysteine
  MOD_RES (135)..(135): Selenocysteine
  MOD_RES (151)..(151): Selenocysteine
  MOD_RES (154)..(154): Selenocysteine
  MOD_RES (172)..(172): Selenocysteine
  MOD_RES (182)..(182): Selenocysteine
  MOD_RES (184)..(184): Selenocysteine
  MOD_RES (205)..(205): Selenocysteine
  MOD_RES (208)..(208): Selenocysteine
  MOD_RES (243)..(243): Selenocysteine
  MOD_RES (247)..(247): Selenocysteine
  MOD_RES (255)..(255): Selenocysteine
  MOD_RES (285)..(285): Selenocysteine
  MOD_RES (301)..(301): Selenocysteine
  MOD_RES (312)..(312): Selenocysteine
  MOD_RES (316)..(316): Selenocysteine
  MOD_RES (323)..(323): Selenocysteine
  MOD_RES (326)..(326): Selenocysteine
  MOD_RES (330)..(330): Selenocysteine
  MOD_RES (379)..(379): Selenocysteine
  MOD_RES (414)..(414): Selenocysteine
  MOD_RES (428)..(428): Selenocysteine
  MOD_RES (431)..(431): Selenocysteine
  MOD_RES (433)..(433): Selenocysteine
  MOD_RES (436)..(437): Selenocysteine
  MOD_RES (442)..(442): Selenocysteine
  MOD_RES (450)..(450): Selenocysteine
  MOD_RES (471)..(471): Selenocysteine
MWGRLWPLLLSILXAXAVPGPSLRRPSRELDAXPRMXIPYEELSGXRHFKGQAQNYSXLLLEEASARLLVGARGALFSLSANDIGDGAHKEIHWEASPEMQSKCHQKGKNNQXECFNHVRFLQRLNSXHLYACGXHAFQPLCAAIDAEAFXLPXSFEEGKEKCPYDPARGFXGLIIDGGLYXAXRYEFRSIPDIRRSRHPHSLRXEEXPMHWLNDAEFVFSVLVRESKASAVGDDDKVYYFFXERAXEEGSGSFXQSRSSHRVARVARVCKGDLGGKKILQKKWXSFLKARLICHIPLYEXLRGVCSLDAEXSSRXHFYAAFXLSXQWKXLEASAICRYDLAEIQAVFAGPYMEYQDGSRRWGRYEGGVPEPRPGSCIXDSLRSQGYNSSQDLPSLVLDFVKLHPLMARPVVPXRGRPLLLKRNIRYXHLXGXPVXXPAGPXYDLLFLGXADGWIHKAVVLGSGMHIIEEXQVFRESQSVENLVISLLQHSLYVGAPSGVIQLPLSSCSRYRSCYDCILARD

SEQ ID NO: 24898 - protein, 702 aa, Homo sapiens
  MOD_RES (14)..(14): Selenocysteine
  MOD_RES (16)..(16): Selenocysteine
  MOD_RES (33)..(33): Selenocysteine
  MOD_RES (37)..(37): Selenocysteine
  MOD_RES (46)..(46): Selenocysteine
  MOD_RES (58)..(58): Selenocysteine
  MOD_RES (113)..(113): Selenocysteine
  MOD_RES (128)..(128): Selenocysteine
  MOD_RES (135)..(135): Selenocysteine
  MOD_RES (151)..(151): Selenocysteine
  MOD_RES (154)..(154): Selenocysteine
  MOD_RES (172)..(172): Selenocysteine
  MOD_RES (182)..(182): Selenocysteine
  MOD_RES (184)..(184): Selenocysteine
  MOD_RES (205)..(205): Selenocysteine
  MOD_RES (208)..(208): Selenocysteine
  MOD_RES (243)..(243): Selenocysteine
  MOD_RES (247)..(247): Selenocysteine
  MOD_RES (255)..(255): Selenocysteine
  MOD_RES (285)..(285): Selenocysteine
  MOD_RES (301)..(301): Selenocysteine
  MOD_RES (312)..(312): Selenocysteine
  MOD_RES (316)..(316): Selenocysteine
  MOD_RES (323)..(323): Selenocysteine
  MOD_RES (326)..(326): Selenocysteine
  MOD_RES (330)..(330): Selenocysteine
  MOD_RES (379)..(379): Selenocysteine
  MOD_RES (414)..(414): Selenocysteine
  MOD_RES (428)..(428): Selenocysteine
  MOD_RES (431)..(431): Selenocysteine
  MOD_RES (433)..(433): Selenocysteine
  MOD_RES (436)..(437): Selenocysteine
  MOD_RES (442)..(442): Selenocysteine
  MOD_RES (450)..(450): Selenocysteine
  MOD_RES (471)..(471): Selenocysteine
  MOD_RES (531)..(531): Selenocysteine
  MOD_RES (538)..(539): Selenocysteine
  MOD_RES (549)..(549): Selenocysteine
  MOD_RES (568)..(568): Selenocysteine
  MOD_RES (594)..(594): Selenocysteine
  MOD_RES (668)..(668): Selenocysteine
MWGRLWPLLLSILXAXAVPGPSLRRPSRELDAXPRMXIPYEELSGXRHFKGQAQNYSXLLLEEASARLLVGARGALFSLSANDIGDGAHKEIHWEASPEMQSKCHQKGKNNQXECFNHVRFLQRLNSXHLYACGXHAFQPLCAAIDAEAFXLPXSFEEGKEKCPYDPARGFXGLIIDGGLYXAXRYEFRSIPDIRRSRHPHSLRXEEXPMHWLNDAEFVFSVLVRESKASAVGDDDKVYYFFXERAXEEGSGSFXQSRSSHRVARVARVCKGDLGGKKILQKKWXSFLKARLICHIPLYEXLRGVCSLDAEXSSRXHFYAAFXLSXQWKXLEASAICRYDLAEIQAVFAGPYMEYQDGSRRWGRYEGGVPEPRPGSCIXDSLRSQGYNSSQDLPSLVLDFVKLHPLMARPVVPXRGRPLLLKRNIRYXHLXGXPVXXPAGPXYDLLFLGXADGWIHKAVVLGSGMHIIEEXQVFRESQSVENLVISLLQHSLYVGAPSGVIQLPLSSCSRYRSCYDCILARDPYCGWDPGXHACAAAXXIANRSQGSRXALIQDIERGNRGCESSRDXGRALQVHMGSMSPPSAWPCVLDGPEXRQDLCQPPKPCVHSHAHMEECLSAGLQCPHPHLLLVHSCFIPASGLGVPSQLPHPIWSSSPAPCGDLFVKSLGXGQPGEVRLHHSPPLPSCVALVNQPPHSPWSFSRV

SEQ ID NO: 24899 - protein, 838 aa, Homo sapiens
  MOD_RES (14)..(14): Selenocysteine
  MOD_RES (16)..(16): Selenocysteine
  MOD_RES (33)..(33): Selenocysteine
  MOD_RES (37)..(37): Selenocysteine
  MOD_RES (46)..(46): Selenocysteine
  MOD_RES (58)..(58): Selenocysteine
  MOD_RES (113)..(113): Selenocysteine
  MOD_RES (128)..(128): Selenocysteine
  MOD_RES (135)..(135): Selenocysteine
  MOD_RES (151)..(151): Selenocysteine
  MOD_RES (154)..(154): Selenocysteine
  MOD_RES (172)..(172): Selenocysteine
  MOD_RES (182)..(182): Selenocysteine
  MOD_RES (184)..(184): Selenocysteine
  MOD_RES (205)..(205): Selenocysteine
  MOD_RES (208)..(208): Selenocysteine
  MOD_RES (243)..(243): Selenocysteine
  MOD_RES (247)..(247): Selenocysteine
  MOD_RES (255)..(255): Selenocysteine
  MOD_RES (285)..(285): Selenocysteine
  MOD_RES (301)..(301): Selenocysteine
  MOD_RES (312)..(312): Selenocysteine
  MOD_RES (316)..(316): Selenocysteine
  MOD_RES (323)..(323): Selenocysteine
  MOD_RES (326)..(326): Selenocysteine
  MOD_RES (330)..(330): Selenocysteine
  MOD_RES (379)..(379): Selenocysteine
  MOD_RES (414)..(414): Selenocysteine
  MOD_RES (428)..(428): Selenocysteine
  MOD_RES (431)..(431): Selenocysteine
  MOD_RES (433)..(433): Selenocysteine
  MOD_RES (436)..(437): Selenocysteine
  MOD_RES (442)..(442): Selenocysteine
  MOD_RES (450)..(450): Selenocysteine
  MOD_RES (471)..(471): Selenocysteine
  MOD_RES (531)..(531): Selenocysteine
  MOD_RES (538)..(539): Selenocysteine
  MOD_RES (544)..(544): Selenocysteine
  MOD_RES (563)..(563): Selenocysteine
  MOD_RES (571)..(571): Selenocysteine
  MOD_RES (620)..(620): Selenocysteine
  MOD_RES (641)..(641): Selenocysteine
  MOD_RES (649)..(649): Selenocysteine
  MOD_RES (654)..(654): Selenocysteine
  MOD_RES (664)..(664): Selenocysteine
  MOD_RES (729)..(729): Selenocysteine
  MOD_RES (778)..(778): Selenocysteine
  MOD_RES (827)..(827): Selenocysteine
MWGRLWPLLLSILXAXAVPGPSLRRPSRELDAXPRMXIPYEELSGXRHFKGQAQNYSXLLLEEASARLLVGARGALFSLSANDIGDGAHKEIHWEASPEMQSKCHQKGKNNQXECFNHVRFLQRLNSXHLYACGXHAFQPLCAAIDAEAFXLPXSFEEGKEKCPYDPARGFXGLIIDGGLYXAXRYEFRSIPDIRRSRHPHSLRXEEXPMHWLNDAEFVFSVLVRESKASAVGDDDKVYYFFXERAXEEGSGSFXQSRSSHRVARVARVCKGDLGGKKILQKKWXSFLKARLICHIPLYEXLRGVCSLDAEXSSRXHFYAAFXLSXQWKXLEASAICRYDLAEIQAVFAGPYMEYQDGSRRWGRYEGGVPEPRPGSCIXDSLRSQGYNSSQDLPSLVLDFVKLHPLMARPVVPXRGRPLLLKRNIRYXHLXGXPVXXPAGPXYDLLFLGXADGWIHKAVVLGSGMHIIEEXQVFRESQSVENLVISLLQHSLYVGAPSGVIQLPLSSCSRYRSCYDCILARDPYCGWDPGXHACAAAXXIANRXALIQDIERGNRGCESSRDXGPPPPLKXRSVLRGDDVLLPCDQPSNLARALWLLNGSMGLSDGQGGYRVGVDGLLVXDAQPEHSGNYGCYAEENGLRXLLASYSLXVRPAXPAPAPKAPAXPGAQLAPDVRLLYVLAIAALGGLCLILASSLLYVACLREGRRGRRRKYSLGRASRAGGSAVQLQXVSGQCPGEEDEGDDEGAGGLEGSCLQIIPGEGAPAPPPPPPPPPPAELXNGLVALPSRLRRMNGNSYVLLRQSNNGVPAGPCSFAEELSRILEKRKHXQLVEQLDESSV

SEQ ID NO: 24900 - protein, 843 aa, Homo sapiens
  MOD_RES (14)..(14): Selenocysteine
  MOD_RES (16)..(16): Selenocysteine
  MOD_RES (33)..(33): Selenocysteine
  MOD_RES (37)..(37): Selenocysteine
  MOD_RES (46)..(46): Selenocysteine
  MOD_RES (58)..(58): Selenocysteine
  MOD_RES (113)..(113): Selenocysteine
  MOD_RES (128)..(128): Selenocysteine
  MOD_RES (135)..(135): Selenocysteine
  MOD_RES (151)..(151): Selenocysteine
  MOD_RES (154)..(154): Selenocysteine
  MOD_RES (172)..(172): Selenocysteine
  MOD_RES (182)..(182): Selenocysteine
  MOD_RES (184)..(184): Selenocysteine
  MOD_RES (205)..(205): Selenocysteine
  MOD_RES (208)..(208): Selenocysteine
  MOD_RES (243)..(243): Selenocysteine
  MOD_RES (247)..(247): Selenocysteine
  MOD_RES (255)..(255): Selenocysteine
  MOD_RES (285)..(285): Selenocysteine
  MOD_RES (301)..(301): Selenocysteine
  MOD_RES (312)..(312): Selenocysteine
  MOD_RES (316)..(316): Selenocysteine
  MOD_RES (323)..(323): Selenocysteine
  MOD_RES (326)..(326): Selenocysteine
  MOD_RES (330)..(330): Selenocysteine
  MOD_RES (379)..(379): Selenocysteine
  MOD_RES (414)..(414): Selenocysteine
  MOD_RES (428)..(428): Selenocysteine
  MOD_RES (431)..(431): Selenocysteine
  MOD_RES (433)..(433): Selenocysteine
  MOD_RES (436)..(437): Selenocysteine
  MOD_RES (442)..(442): Selenocysteine
  MOD_RES (450)..(450): Selenocysteine
  MOD_RES (471)..(471): Selenocysteine
  MOD_RES (531)..(531): Selenocysteine
  MOD_RES (538)..(539): Selenocysteine
  MOD_RES (549)..(549): Selenocysteine
  MOD_RES (568)..(568): Selenocysteine
  MOD_RES (576)..(576): Selenocysteine
  MOD_RES (625)..(625): Selenocysteine
  MOD_RES (646)..(646): Selenocysteine
  MOD_RES (654)..(654): Selenocysteine
  MOD_RES (659)..(659): Selenocysteine
  MOD_RES (669)..(669): Selenocysteine
  MOD_RES (734)..(734): Selenocysteine
  MOD_RES (783)..(783): Selenocysteine
  MOD_RES (832)..(832): Selenocysteine
MWGRLWPLLLSILXAXAVPGPSLRRPSRELDAXPRMXIPYEELSGXRHFKGQAQNYSXLLLEEASARLLVGARGALFSLSANDIGDGAHKEIHWEASPEMQSKCHQKGKNNQXECFNHVRFLQRLNSXHLYACGXHAFQPLCAAIDAEAFXLPXSFEEGKEKCPYDPARGFXGLIIDGGLYXAXRYEFRSIPDIRRSRHPHSLRXEEXPMHWLNDAEFVFSVLVRESKASAVGDDDKVYYFFXERAXEEGSGSFXQSRSSHRVARVARVCKGDLGGKKILQKKWXSFLKARLICHIPLYEXLRGVCSLDAEXSSRXHFYAAFXLSXQWKXLEASAICRYDLAEIQAVFAGPYMEYQDGSRRWGRYEGGVPEPRPGSCIXDSLRSQGYNSSQDLPSLVLDFVKLHPLMARPVVPXRGRPLLLKRNIRYXHLXGXPVXXPAGPXYDLLFLGXADGWIHKAVVLGSGMHIIEEXQVFRESQSVENLVISLLQHSLYVGAPSGVIQLPLSSCSRYRSCYDCILARDPYCGWDPGXHACAAAXXIANRSQGSRXALIQDIERGNRGCESSRDXGPPPPLKXRSVLRGDDVLLPCDQPSNLARALWLLNGSMGLSDGQGGYRVGVDGLLVXDAQPEHSGNYGCYAEENGLRXLLASYSLXVRPAXPAPAPKAPAXPGAQLAPDVRLLYVLAIAALGGLCLILASSLLYVACLREGRRGRRRKYSLGRASRAGGSAVQLQXVSGQCPGEEDEGDDEGAGGLEGSCLQIIPGEGAPAPPPPPPPPPPAELXNGLVALPSRLRRMNGNSYVLLRQSNNGVPAGPCSFAEELSRILEKRKHXQLVEQLDESSV

SEQ ID NO: 24901 - protein, 132 aa, Homo sapiens
  MOD_RES (1)..(1): Any amino acid
  MOD_RES (29)..(29): Selenocysteine
  MOD_RES (57)..(57): Selenocysteine
  MOD_RES (131)..(131): Selenocysteine
XREGRRGRRRKYSLGRASRAGGSAVQLQXVSGRALQVHMGSMSPPSAWPCVLDGPEXRQDLCQPPKPCVHSHAHMEECLSAGLQCPHPHLLLVHSCFIPASGLGVPSQLPHPIWSSSPAPCGDLFVKSLGXG

SEQ ID NO: 24902 - protein, 254 aa, Homo sapiens
  MOD_RES (4)..(4): Selenocysteine
  MOD_RES (27)..(28): Selenocysteine
  MOD_RES (33)..(33): Selenocysteine
  MOD_RES (62)..(62): Selenocysteine
  MOD_RES (100)..(100): Selenocysteine
  MOD_RES (130)..(130): Selenocysteine
  MOD_RES (133)..(133): Selenocysteine
  MOD_RES (137)..(137): Selenocysteine
  MOD_RES (141)..(141): Selenocysteine
  MOD_RES (149)..(149): Selenocysteine
  MOD_RES (170)..(170): Selenocysteine
  MOD_RES (174)..(174): Selenocysteine
  MOD_RES (183)..(183): Selenocysteine
  MOD_RES (206)..(206): Selenocysteine
  MOD_RES (229)..(229): Selenocysteine
  MOD_RES (245)..(245): Selenocysteine
MKGXCVIAWLFSSLGLWRLAHPEAQGXXQCQRXEHPVISYKEIGPWLREFRAKNAVDFSQLXFDPGQKELVVGARNYLFRLQLEDLSLIQAVEWECDEAXKKACYSKGKSKEECQNYIRVLLVGGDRLFXCGXNAFXPVCXNRSLSNLXEIHDQISGMARCPYSPQHNSXALLXAGGELYAAXAMDFPGRDPAIYRSLGILPPLRXAQYNSKWLNEPNFVSSYDIGNFXYFFFRENAVEHDCGKXVFSRAARVC

SEQ ID NO: 24903 - protein, 1074 aa, Homo sapiens
  MOD_RES (4)..(4): Selenocysteine
  MOD_RES (27)..(28): Selenocysteine
  MOD_RES (33)..(33): Selenocysteine
  MOD_RES (62)..(62): Selenocysteine
  MOD_RES (100)..(100): Selenocysteine
  MOD_RES (130)..(130): Selenocysteine
  MOD_RES (133)..(133): Selenocysteine
  MOD_RES (137)..(137): Selenocysteine
  MOD_RES (141)..(141): Selenocysteine
  MOD_RES (149)..(149): Selenocysteine
  MOD_RES (170)..(170): Selenocysteine
  MOD_RES (174)..(174): Selenocysteine
  MOD_RES (183)..(183): Selenocysteine
  MOD_RES (206)..(206): Selenocysteine
  MOD_RES (229)..(229): Selenocysteine
  MOD_RES (245)..(245): Selenocysteine
  MOD_RES (267)..(267): Selenocysteine
  MOD_RES (269)..(270): Selenocysteine
  MOD_RES (294)..(294): Selenocysteine
  MOD_RES (308)..(309): Selenocysteine
  MOD_RES (359)..(359): Selenocysteine
  MOD_RES (369)..(369): Selenocysteine
  MOD_RES (390)..(391): Selenocysteine
  MOD_RES (424)..(424): Selenocysteine
  MOD_RES (428)..(428): Selenocysteine
  MOD_RES (439)..(439): Selenocysteine
  MOD_RES (492)..(492): Selenocysteine
  MOD_RES (495)..(495): Selenocysteine
  MOD_RES (514)..(514): Selenocysteine
  MOD_RES (523)..(523): Selenocysteine
  MOD_RES (534)..(534): Selenocysteine
  MOD_RES (538)..(538): Selenocysteine
  MOD_RES (550)..(550): Selenocysteine
  MOD_RES (553)..(553): Selenocysteine
  MOD_RES (555)..(555): Selenocysteine
  MOD_RES (567)..(567): Selenocysteine
  MOD_RES (599)..(599): Selenocysteine
  MOD_RES (602)..(602): Selenocysteine
  MOD_RES (609)..(610): Selenocysteine
  MOD_RES (626)..(626): Selenocysteine
  MOD_RES (657)..(657): Selenocysteine
  MOD_RES (666)..(666): Selenocysteine
  MOD_RES (698)..(698): Selenocysteine
  MOD_RES (707)..(708): Selenocysteine
  MOD_RES (711)..(711): Selenocysteine
  MOD_RES (714)..(714): Selenocysteine
  MOD_RES (732)..(732): Selenocysteine
  MOD_RES (760)..(760): Selenocysteine
  MOD_RES (765)..(765): Selenocysteine
  MOD_RES (782)..(782): Selenocysteine
  MOD_RES (791)..(791): Selenocysteine
  MOD_RES (851)..(851): Selenocysteine
  MOD_RES (856)..(856): Selenocysteine
  MOD_RES (865)..(865): Selenocysteine
  MOD_RES (885)..(885): Selenocysteine
  MOD_RES (892)..(892): Selenocysteine
  MOD_RES (934)..(935): Selenocysteine
  MOD_RES (986)..(986): Selenocysteine
  MOD_RES (991)..(991): Selenocysteine
  MOD_RES (1004)..(1004): Selenocysteine
  MOD_RES (1016)..(1016): Selenocysteine
  MOD_RES (1019)..(1019): Selenocysteine
  MOD_RES (1056)..(1056): Selenocysteine
  MOD_RES (1059)..(1059): Selenocysteine
  MOD_RES (1066)..(1066): Selenocysteine
MKGXCVIAWLFSSLGLWRLAHPEAQGXXQCQRXEHPVISYKEIGPWLREFRAKNAVDFSQLXFDPGQKELVVGARNYLFRLQLEDLSLIQAVEWECDEAXKKACYSKGKSKEECQNYIRVLLVGGDRLFXCGXNAFXPVCXNRSLSNLXEIHDQISGMARCPYSPQHNSXALLXAGGELYAAXAMDFPGRDPAIYRSLGILPPLRXAQYNSKWLNEPNFVSSYDIGNFXYFFFRENAVEHDCGKXVFSRAARVCKNDIGGRFLLEDXWXXFMKARLNCSRPGEVPFYYNELQSXFFLPELDLIYGIFXXNVNSIAASAVCVFNLSAIAQAFSGPFKYQENSRSAWLPYPNPNPHFQCGXVDQGLYVNLXERNLQDAQKFILMHEVVQPVXXVPSFMEDNSRFSHVAVDVVQGREALVHIIYLAXDYGXIKKVRVPLNQXSSSCLLEEIELFPERRREPIRSLQILHSQSVLFVGLREHVVKIPLKRCQFYRXRSXCIGAQDPYCGWDVVMKKCXSLEESLSMXQWEQSISACPXRNLXVDGHFGVWSPWXPCXHXDGSAVGSCLCRXRSCDSPAPQCGGWQCEGPGMEIANCSRNGGWXPWXSWSPCSXXCGIGFQVRQRSCSNPXPRHGGRVCVGQNREERYCNEHLLCPPHMFWXGWGPWERCXAQCGGGIQARRRICENGPDCAGCNVEYQSCNXNPCPELKKXXPWXPWXPVNISDNGGHYEQRFRYXCKARLADPNLLEVGRQRIEMRYCSSDGXSGCSXDGLSGDFLRAGRYSAHXVNGAWSAWXSWSQCSRDCSRGIRNRKRVCNNPEPKYGGMPCLGPSLEYQECNILPCPVDGVWSCWSPWXKCSAXCGGGHYMRXRSCSNPAPAYGGDICLGLHXEEALCNXQPCPESWSEWSDWSECEASGVQVRARQCILLFPMGSQCSGNXXESRPCVFDSNFIPEVSVARSSSVEEKRCGEFNMFHMIAVGLSSSILGCLLXLLVYXYCQRYQQQSHDAXVIHPVSPAPLNXSIXNHINKLDKYDSVEAIKAFNKNNLILEERNKYFNPHLXGKXYSNAYFXDLNNYDEY

SEQ ID NO: 24904 - protein, 1205 aa, Homo sapiens
  MOD_RES (31)..(31): Selenocysteine
  MOD_RES (33)..(33): Selenocysteine
  MOD_RES (75)..(75): Selenocysteine
  MOD_RES (85)..(85): Selenocysteine
  MOD_RES (107)..(107): Selenocysteine
  MOD_RES (129)..(129): Selenocysteine
  MOD_RES (159)..(159): Selenocysteine
  MOD_RES (173)..(173): Selenocysteine
  MOD_RES (214)..(214): Selenocysteine
  MOD_RES (222)..(222): Selenocysteine
  MOD_RES (232)..(232): Selenocysteine
  MOD_RES (255)..(255): Selenocysteine
  MOD_RES (263)..(263): Selenocysteine
  MOD_RES (273)..(273): Selenocysteine
  MOD_RES (292)..(292): Selenocysteine
  MOD_RES (305)..(305): Selenocysteine
  MOD_RES (328)..(328): Selenocysteine
  MOD_RES (367)..(367): Selenocysteine
  MOD_RES (389)..(389): Selenocysteine
  MOD_RES (391)..(392): Selenocysteine
  MOD_RES (430)..(431): Selenocysteine
  MOD_RES (481)..(481): Selenocysteine
  MOD_RES (485)..(485): Selenocysteine
  MOD_RES (492)..(492): Selenocysteine
  MOD_RES (513)..(513): Selenocysteine
  MOD_RES (519)..(519): Selenocysteine
  MOD_RES (538)..(538): Selenocysteine
  MOD_RES (547)..(547): Selenocysteine
  MOD_RES (551)..(551): Selenocysteine
  MOD_RES (558)..(558): Selenocysteine
  MOD_RES (638)..(638): Selenocysteine
  MOD_RES (649)..(649): Selenocysteine
  MOD_RES (653)..(653): Selenocysteine
  MOD_RES (661)..(661): Selenocysteine
  MOD_RES (722)..(722): Selenocysteine
  MOD_RES (732)..(732): Selenocysteine
  MOD_RES (771)..(771): Selenocysteine
  MOD_RES (818)..(818): Selenocysteine
  MOD_RES (831)..(831): Selenocysteine
  MOD_RES (834)..(834): Selenocysteine
  MOD_RES (842)..(842): Selenocysteine
  MOD_RES (855)..(855): Selenocysteine
  MOD_RES (873)..(873): Selenocysteine
  MOD_RES (875)..(875): Selenocysteine
  MOD_RES (877)..(877): Selenocysteine
  MOD_RES (888)..(888): Selenocysteine
  MOD_RES (901)..(901): Selenocysteine
  MOD_RES (905)..(905): Selenocysteine
  MOD_RES (933)..(933): Selenocysteine
  MOD_RES (935)..(935): Selenocysteine
  MOD_RES (971)..(971): Selenocysteine
  MOD_RES (988)..(988): Selenocysteine
  MOD_RES (992)..(992): Selenocysteine
  MOD_RES (1008)..(1008): Selenocysteine
  MOD_RES (1015)..(1015): Selenocysteine
  MOD_RES (1032)..(1032): Selenocysteine
  MOD_RES (1081)..(1081): Selenocysteine
  MOD_RES (1094)..(1094): Selenocysteine
  MOD_RES (1106)..(1106): Selenocysteine
  MOD_RES (1124)..(1124): Selenocysteine
  MOD_RES (1130)..(1130): Selenocysteine
  MOD_RES (1141)..(1141): Selenocysteine
  MOD_RES (1148)..(1148): Selenocysteine
  MOD_RES (1154)..(1154): Selenocysteine
  MOD_RES (1174)..(1174): Selenocysteine
  MOD_RES (1178)..(1180): Selenocysteine
MLHLSAEEAIGCVRVRRSFIDELAFGRGHSXGXGKQKRRDRVSGSSWCLACVSWMPCGFSPSPVAHHLVPGPPDXPAQQLRCGWXVGGWLLSLVRGLLPCLPPGARXAEGPIMVLAGPLAVSLLLPSLXLLVSHLSSSQDVSSEPSSEQQLCALSKHPXVAFEDLQPWVSNFXYPGARDFSQLALDPSGNQLIVGARNYLFRLSLANVSLLQAXEWASSEDXRRSCQSKGKXEEECQNYVRVLIVAGRKVFMCGXNAFSPMCXSRQVGNLSRXIEKINGVARCPYDPRHNSXAVISSQGELYAAXVIDFSGRDPAIYRSLGSGPPLRXAQYNSKWLNEPNFVAAYDIGLFAYFFLRENAVEHDCGRXVYSRVARVCKNDVGGRFLLEDXWXXFMKARLNCSRPGEVPFYYNELQSAFHLPEQDLIYGVFXXNVNSIAASAVCAFNLSAISQAFNGPFRYQENPRAAWLPIANPIPNFQCGXLPEXGPNENLXERSLQDAQRLFLMSEAVQPVXPEPCVXQDSVRFSHLVVDLVQAKDXLYHVLYIGXESGXILKALSXASRSLHGCYLEELHVLPPGRREPLRSLRILHSARALFVGLRDGVLRVPLERCAAYRSQGACLGARDPYCGWDGKQQRCSXLEDSSNMSLWXQNIXACPVRNVXRDGGFGPWSPWQPCEHLDGDNSGSCLCRARSCDSPRPRCGGLDCLGPAIHIANCSRNGAWXPWSSWALCSXSCGIGFQVRQRSCSNPAPRHGGRICVGKSREERFCNENXPCPVPIFWASWGSWSKCSSNCGGGMQSRRRACENGNSCLGCGVEFKXCNPEGCPEVRRNXPWXPWLPVNVXQGGARQEQRFRFXCRAPLADPHGLQFGRRRXEXRXCPADGSGSCDXDALVEVLLRSGSXSPHXVSGGWAAWGPWSSCSRDCELGFRVRKRXCXNPEPRNGGLPCVGDAAEYQDCNPQACPVRGAWSCWXSWSPCSASCGGGHYQRXRSCXSPAPSPGEDICLGLHXEEALCAXQACPEGWSPWSEWSKCXDDGAQSRSRHCEELLPGSSACAGNSSQSRPCPYSEIPVILPASSMEEAXDCAGFNLIHLVAXGISCFLGSGLLXLAVYLSCQHCQRQSQESXLVHPAXPNHLHYKGGGXPKNEKYXPMEFKXLNKNNLIPDDRANFYPLQQXNVYXXXYYPSPLNKHSFRPEASPGQRCFPNS

SEQ ID NO: 24905 - protein, 84 aa, Homo sapiens
  MOD_RES (21)..(21): Selenocysteine
  MOD_RES (31)..(31): Selenocysteine
  MOD_RES (53)..(53): Selenocysteine
  MOD_RES (75)..(75): Selenocysteine
MPCGFSPSPVAHHLVPGPPDXPAQQLRCGWXVGGWLLSLVRGLLPCLPPGARXAEGPIMVLAGPLAVSLLLPSLXLLVSHLSSS

SEQ ID NO: 24906 - protein, 142 aa, Homo sapiens
  MOD_RES (21)..(21): Selenocysteine
  MOD_RES (31)..(31): Selenocysteine
  MOD_RES (53)..(53): Selenocysteine
  MOD_RES (75)..(75): Selenocysteine
  MOD_RES (105)..(105): Selenocysteine
  MOD_RES (119)..(119): Selenocysteine
MPCGFSPSPVAHHLVPGPPDXPAQQLRCGWXVGGWLLSLVRGLLPCLPPGARXAEGPIMVLAGPLAVSLLLPSLXLLVSHLSSSQDVSSEPSSEQQLCALSKHPXVAFEDLQPWVSNFXYPGARDFSQLALDPSGNQLIVGA

SEQ ID NO: 24907 - protein, 1088 aa, Homo sapiens
  MOD_RES (21)..(21): Selenocysteine
  MOD_RES (31)..(31): Selenocysteine
  MOD_RES (53)..(53): Selenocysteine
  MOD_RES (75)..(75): Selenocysteine
  MOD_RES (105)..(105): Selenocysteine
  MOD_RES (119)..(119): Selenocysteine
  MOD_RES (160)..(160): Selenocysteine
  MOD_RES (168)..(168): Selenocysteine
  MOD_RES (178)..(178): Selenocysteine
  MOD_RES (201)..(201): Selenocysteine
  MOD_RES (209)..(209): Selenocysteine
  MOD_RES (219)..(219): Selenocysteine
  MOD_RES (238)..(238): Selenocysteine
  MOD_RES (251)..(251): Selenocysteine
  MOD_RES (274)..(274): Selenocysteine
  MOD_RES (313)..(313): Selenocysteine
  MOD_RES (335)..(335): Selenocysteine
  MOD_RES (337)..(338): Selenocysteine
  MOD_RES (376)..(377): Selenocysteine
  MOD_RES (427)..(427): Selenocysteine
  MOD_RES (431)..(431): Selenocysteine
  MOD_RES (438)..(438): Selenocysteine
  MOD_RES (459)..(459): Selenocysteine
  MOD_RES (465)..(465): Selenocysteine
  MOD_RES (484)..(484): Selenocysteine
  MOD_RES (493)..(493): Selenocysteine
  MOD_RES (497)..(497): Selenocysteine
  MOD_RES (504)..(504): Selenocysteine
  MOD_RES (584)..(584): Selenocysteine
  MOD_RES (595)..(595): Selenocysteine
  MOD_RES (599)..(599): Selenocysteine
  MOD_RES (607)..(607): Selenocysteine
  MOD_RES (668)..(668): Selenocysteine
  MOD_RES (678)..(678): Selenocysteine
  MOD_RES (717)..(717): Selenocysteine
  MOD_RES (764)..(764): Selenocysteine
  MOD_RES (777)..(777): Selenocysteine
  MOD_RES (780)..(780): Selenocysteine
  MOD_RES (788)..(788): Selenocysteine
  MOD_RES (801)..(801): Selenocysteine
  MOD_RES (819)..(819): Selenocysteine
  MOD_RES (821)..(821): Selenocysteine
  MOD_RES (823)..(823): Selenocysteine
  MOD_RES (834)..(834): Selenocysteine
  MOD_RES (847)..(847): Selenocysteine
  MOD_RES (851)..(851): Selenocysteine
  MOD_RES (879)..(879): Selenocysteine
  MOD_RES (881)..(881): Selenocysteine
  MOD_RES (917)..(917): Selenocysteine
  MOD_RES (934)..(934): Selenocysteine
  MOD_RES (938)..(938): Selenocysteine
  MOD_RES (954)..(954): Selenocysteine
  MOD_RES (961)..(961): Selenocysteine
  MOD_RES (978)..(978): Selenocysteine
  MOD_RES (1027)..(1027): Selenocysteine
  MOD_RES (1040)..(1040): Selenocysteine
  MOD_RES (1052)..(1052): Selenocysteine
  MOD_RES (1070)..(1070): Selenocysteine
  MOD_RES (1076)..(1076): Selenocysteine
  MOD_RES (1087)..(1087): Selenocysteine
MPCGFSPSPVAHHLVPGPPDXPAQQLRCGWXVGGWLLSLVRGLLPCLPPGARXAEGPIMVLAGPLAVSLLLPSLXLLVSHLSSSQDVSSEPSSEQQLCALSKHPXVAFEDLQPWVSNFXYPGARDFSQLALDPSGNQLIVGARNYLFRLSLANVSLLQAXEWASSEDXRRSCQSKGKXEEECQNYVRVLIVAGRKVFMCGXNAFSPMCXSRQVGNLSRXIEKINGVARCPYDPRHNSXAVISSQGELYAAXVIDFSGRDPAIYRSLGSGPPLRXAQYNSKWLNEPNFVAAYDIGLFAYFFLRENAVEHDCGRXVYSRVARVCKNDVGGRFLLEDXWXXFMKARLNCSRPGEVPFYYNELQSAFHLPEQDLIYGVFXXNVNSIAASAVCAFNLSAISQAFNGPFRYQENPRAAWLPIANPIPNFQCGXLPEXGPNENLXERSLQDAQRLFLMSEAVQPVXPEPCVXQDSVRFSHLVVDLVQAKDXLYHVLYIGXESGXILKALSXASRSLHGCYLEELHVLPPGRREPLRSLRILHSARALFVGLRDGVLRVPLERCAAYRSQGACLGARDPYCGWDGKQQRCSXLEDSSNMSLWXQNIXACPVRNVXRDGGFGPWSPWQPCEHLDGDNSGSCLCRARSCDSPRPRCGGLDCLGPAIHIANCSRNGAWXPWSSWALCSXSCGIGFQVRQRSCSNPAPRHGGRICVGKSREERFCNENXPCPVPIFWASWGSWSKCSSNCGGGMQSRRRACENGNSCLGCGVEFKXCNPEGCPEVRRNXPWXPWLPVNVXQGGARQEQRFRFXCRAPLADPHGLQFGRRRXEXRXCPADGSGSCDXDALVEVLLRSGSXSPHXVSGGWAAWGPWSSCSRDCELGFRVRKRXCXNPEPRNGGLPCVGDAAEYQDCNPQACPVRGAWSCWXSWSPCSASCGGGHYQRXRSCXSPAPSPGEDICLGLHXEEALCAXQACPEGWSPWSEWSKCXDDGAQSRSRHCEELLPGSSACAGNSSQSRPCPYSEIPVILPASSMEEAXDCAGFNLIHLVAXGISCFLGSGLLXLAVYLSCQHCQRQSQESXLVHPAXPNHLHYKGGGXP

SEQ ID NO: 24908 - protein, 1094 aa, Homo sapiens
  MOD_RES (21)..(21): Selenocysteine
  MOD_RES (31)..(31): Selenocysteine
  MOD_RES (53)..(53): Selenocysteine
  MOD_RES (75)..(75): Selenocysteine
  MOD_RES (105)..(105): Selenocysteine
  MOD_RES (119)..(119): Selenocysteine
  MOD_RES (160)..(160): Selenocysteine
  MOD_RES (168)..(168): Selenocysteine
  MOD_RES (178)..(178): Selenocysteine
  MOD_RES (201)..(201): Selenocysteine
  MOD_RES (209)..(209): Selenocysteine
  MOD_RES (219)..(219): Selenocysteine
  MOD_RES (238)..(238): Selenocysteine
  MOD_RES (251)..(251): Selenocysteine
  MOD_RES (274)..(274): Selenocysteine
  MOD_RES (313)..(313): Selenocysteine
  MOD_RES (335)..(335): Selenocysteine
  MOD_RES (337)..(338): Selenocysteine
  MOD_RES (376)..(377): Selenocysteine
  MOD_RES (427)..(427): Selenocysteine
  MOD_RES (431)..(431): Selenocysteine
  MOD_RES (438)..(438): Selenocysteine
  MOD_RES (459)..(459): Selenocysteine
  MOD_RES (465)..(465): Selenocysteine
  MOD_RES (484)..(484): Selenocysteine
  MOD_RES (493)..(493): Selenocysteine
  MOD_RES (497)..(497): Selenocysteine
  MOD_RES (504)..(504): Selenocysteine
  MOD_RES (584)..(584): Selenocysteine
  MOD_RES (595)..(595): Selenocysteine
  MOD_RES (599)..(599): Selenocysteine
  MOD_RES (607)..(607): Selenocysteine
  MOD_RES (668)..(668): Selenocysteine
  MOD_RES (678)..(678): Selenocysteine
  MOD_RES (717)..(717): Selenocysteine
  MOD_RES (764)..(764): Selenocysteine
  MOD_RES (777)..(777): Selenocysteine
  MOD_RES (780)..(780): Selenocysteine
  MOD_RES (788)..(788): Selenocysteine
  MOD_RES (801)..(801): Selenocysteine
  MOD_RES (819)..(819): Selenocysteine
  MOD_RES (821)..(821): Selenocysteine
  MOD_RES (823)..(823): Selenocysteine
  MOD_RES (834)..(834): Selenocysteine
  MOD_RES (847)..(847): Selenocysteine
  MOD_RES (851)..(851): Selenocysteine
  MOD_RES (879)..(879): Selenocysteine
  MOD_RES (881)..(881): Selenocysteine
  MOD_RES (917)..(917): Selenocysteine
  MOD_RES (934)..(934): Selenocysteine
  MOD_RES (938)..(938): Selenocysteine
  MOD_RES (954)..(954): Selenocysteine
  MOD_RES (961)..(961): Selenocysteine
  MOD_RES (978)..(978): Selenocysteine
  MOD_RES (1027)..(1027): Selenocysteine
  MOD_RES (1036)..(1036): Selenocysteine
  MOD_RES (1048)..(1048): Selenocysteine
  MOD_RES (1062)..(1062): Selenocysteine
  MOD_RES (1080)..(1080): Selenocysteine
MPCGFSPSPVAHHLVPGPPDXPAQQLRCGWXVGGWLLSLVRGLLPCLPPGARXAEGPIMVLAGPLAVSLLLPSLXLLVSHLSSSQDVSSEPSSEQQLCALSKHPXVAFEDLQPWVSNFXYPGARDFSQLALDPSGNQLIVGARNYLFRLSLANVSLLQAXEWASSEDXRRSCQSKGKXEEECQNYVRVLIVAGRKVFMCGXNAFSPMCXSRQVGNLSRXIEKINGVARCPYDPRHNSXAVISSQGELYAAXVIDFSGRDPAIYRSLGSGPPLRXAQYNSKWLNEPNFVAAYDIGLFAYFFLRENAVEHDCGRXVYSRVARVCKNDVGGRFLLEDXWXXFMKARLNCSRPGEVPFYYNELQSAFHLPEQDLIYGVFXXNVNSIAASAVCAFNLSAISQAFNGPFRYQENPRAAWLPIANPIPNFQCGXLPEXGPNENLXERSLQDAQRLFLMSEAVQPVXPEPCVXQDSVRFSHLVVDLVQAKDXLYHVLYIGXESGXILKALSXASRSLHGCYLEELHVLPPGRREPLRSLRILHSARALFVGLRDGVLRVPLERCAAYRSQGACLGARDPYCGWDGKQQRCSXLEDSSNMSLWXQNIXACPVRNVXRDGGFGPWSPWQPCEHLDGDNSGSCLCRARSCDSPRPRCGGLDCLGPAIHIANCSRNGAWXPWSSWALCSXSCGIGFQVRQRSCSNPAPRHGGRICVGKSREERFCNENXPCPVPIFWASWGSWSKCSSNCGGGMQSRRRACENGNSCLGCGVEFKXCNPEGCPEVRRNXPWXPWLPVNVXQGGARQEQRFRFXCRAPLADPHGLQFGRRRXEXRXCPADGSGSCDXDALVEVLLRSGSXSPHXVSGGWAAWGPWSSCSRDCELGFRVRKRXCXNPEPRNGGLPCVGDAAEYQDCNPQACPVRGAWSCWXSWSPCSASCGGGHYQRXRSCXSPAPSPGEDICLGLHXEEALCAXQACPEGWSPWSEWSKCXDDGAQSRSRHCEELLPGSSACAGNSSQSRPCPYSEIPVILPASSMEEAXDCAGKRNRXYLMLRSSQPSGXPLQSLDSFHILLQXAKLCWGPHCFEMGSISSXWWPRASPASWALGS

SEQ ID NO: 24909 - protein, 1151 aa, Homo sapiens
  MOD_RES (21)..(21): Selenocysteine
  MOD_RES (31)..(31): Selenocysteine
  MOD_RES (53)..(53): Selenocysteine
  MOD_RES (75)..(75): Selenocysteine
  MOD_RES (105)..(105): Selenocysteine
  MOD_RES (119)..(119): Selenocysteine
  MOD_RES (160)..(160): Selenocysteine
  MOD_RES (168)..(168): Selenocysteine
  MOD_RES (178)..(178): Selenocysteine
  MOD_RES (201)..(201): Selenocysteine
  MOD_RES (209)..(209): Selenocysteine
  MOD_RES (219)..(219): Selenocysteine
  MOD_RES (238)..(238): Selenocysteine
  MOD_RES (251)..(251): Selenocysteine
  MOD_RES (274)..(274): Selenocysteine
  MOD_RES (313)..(313): Selenocysteine
  MOD_RES (335)..(335): Selenocysteine
  MOD_RES (337)..(338): Selenocysteine
  MOD_RES (376)..(377): Selenocysteine
  MOD_RES (427)..(427): Selenocysteine
  MOD_RES (431)..(431): Selenocysteine
  MOD_RES (438)..(438): Selenocysteine
  MOD_RES (459)..(459): Selenocysteine
  MOD_RES (465)..(465): Selenocysteine
  MOD_RES (484)..(484): Selenocysteine
  MOD_RES (493)..(493): Selenocysteine
  MOD_RES (497)..(497): Selenocysteine
  MOD_RES (504)..(504): Selenocysteine
  MOD_RES (584)..(584): Selenocysteine
  MOD_RES (595)..(595): Selenocysteine
  MOD_RES (599)..(599): Selenocysteine
  MOD_RES (607)..(607): Selenocysteine
  MOD_RES (668)..(668): Selenocysteine
  MOD_RES (678)..(678): Selenocysteine
  MOD_RES (717)..(717): Selenocysteine
  MOD_RES (764)..(764): Selenocysteine
  MOD_RES (777)..(777): Selenocysteine
  MOD_RES (780)..(780): Selenocysteine
  MOD_RES (788)..(788): Selenocysteine
  MOD_RES (801)..(801): Selenocysteine
  MOD_RES (819)..(819): Selenocysteine
  MOD_RES (821)..(821): Selenocysteine
  MOD_RES (823)..(823): Selenocysteine
  MOD_RES (834)..(834): Selenocysteine
  MOD_RES (847)..(847): Selenocysteine
  MOD_RES (851)..(851): Selenocysteine
  MOD_RES (879)..(879): Selenocysteine
  MOD_RES (881)..(881): Selenocysteine
  MOD_RES (917)..(917): Selenocysteine
  MOD_RES (934)..(934): Selenocysteine
  MOD_RES (938)..(938): Selenocysteine
  MOD_RES (954)..(954): Selenocysteine
  MOD_RES (961)..(961): Selenocysteine
  MOD_RES (978)..(978): Selenocysteine
  MOD_RES (1027)..(1027): Selenocysteine
  MOD_RES (1040)..(1040): Selenocysteine
  MOD_RES (1052)..(1052): Selenocysteine
  MOD_RES (1070)..(1070): Selenocysteine
  MOD_RES (1076)..(1076): Selenocysteine
  MOD_RES (1087)..(1087): Selenocysteine
  MOD_RES (1094)..(1094): Selenocysteine
  MOD_RES (1100)..(1100): Selenocysteine
  MOD_RES (1120)..(1120): Selenocysteine
  MOD_RES (1124)..(1126): Selenocysteine
MPCGFSPSPVAHHLVPGPPDXPAQQLRCGWXVGGWLLSLVRGLLPCLPPGARXAEGPIMVLAGPLAVSLLLPSLXLLVSHLSSSQDVSSEPSSEQQLCALSKHPXVAFEDLQPWVSNFXYPGARDFSQLALDPSGNQLIVGARNYLFRLSLANVSLLQAXEWASSEDXRRSCQSKGKXEEECQNYVRVLIVAGRKVFMCGXNAFSPMCXSRQVGNLSRXIEKINGVARCPYDPRHNSXAVISSQGELYAAXVIDFSGRDPAIYRSLGSGPPLRXAQYNSKWLNEPNFVAAYDIGLFAYFFLRENAVEHDCGRXVYSRVARVCKNDVGGRFLLEDXWXXFMKARLNCSRPGEVPFYYNELQSAFHLPEQDLIYGVFXXNVNSIAASAVCAFNLSAISQAFNGPFRYQENPRAAWLPIANPIPNFQCGXLPEXGPNENLXERSLQDAQRLFLMSEAVQPVXPEPCVXQDSVRFSHLVVDLVQAKDXLYHVLYIGXESGXILKALSXASRSLHGCYLEELHVLPPGRREPLRSLRILHSARALFVGLRDGVLRVPLERCAAYRSQGACLGARDPYCGWDGKQQRCSXLEDSSNMSLWXQNIXACPVRNVXRDGGFGPWSPWQPCEHLDGDNSGSCLCRARSCDSPRPRCGGLDCLGPAIHIANCSRNGAWXPWSSWALCSXSCGIGFQVRQRSCSNPAPRHGGRICVGKSREERFCNENXPCPVPIFWASWGSWSKCSSNCGGGMQSRRRACENGNSCLGCGVEFKXCNPEGCPEVRRNXPWXPWLPVNVXQGGARQEQRFRFXCRAPLADPHGLQFGRRRXEXRXCPADGSGSCDXDALVEVLLRSGSXSPHXVSGGWAAWGPWSSCSRDCELGFRVRKRXCXNPEPRNGGLPCVGDAAEYQDCNPQACPVRGAWSCWXSWSPCSASCGGGHYQRXRSCXSPAPSPGEDICLGLHXEEALCAXQACPEGWSPWSEWSKCXDDGAQSRSRHCEELLPGSSACAGNSSQSRPCPYSEIPVILPASSMEEAXDCAGFNLIHLVAXGISCFLGSGLLXLAVYLSCQHCQRQSQESXLVHPAXPNHLHYKGGGXPKNEKYXPMEFKXLNKNNLIPDDRANFYPLQQXNVYXXXYYPSPLNKHSFRPEASPGQRCFPNS

SEQ ID NO: 24910 - protein, 1057 aa, Homo sapiens
  MOD_RES (17)..(17): Selenocysteine
  MOD_RES (47)..(47): Selenocysteine
  MOD_RES (61)..(61): Selenocysteine
  MOD_RES (102)..(102): Selenocysteine
  MOD_RES (110)..(110): Selenocysteine
  MOD_RES (120)..(120): Selenocysteine
  MOD_RES (143)..(143): Selenocysteine
  MOD_RES (151)..(151): Selenocysteine
  MOD_RES (161)..(161): Selenocysteine
  MOD_RES (180)..(180): Selenocysteine
  MOD_RES (193)..(193): Selenocysteine
  MOD_RES (216)..(216): Selenocysteine
  MOD_RES (255)..(255): Selenocysteine
  MOD_RES (277)..(277): Selenocysteine
  MOD_RES (279)..(280): Selenocysteine
  MOD_RES (318)..(319): Selenocysteine
  MOD_RES (369)..(369): Selenocysteine
  MOD_RES (373)..(373): Selenocysteine
  MOD_RES (380)..(380): Selenocysteine
  MOD_RES (401)..(401): Selenocysteine
  MOD_RES (407)..(407): Selenocysteine
  MOD_RES (426)..(426): Selenocysteine
  MOD_RES (435)..(435): Selenocysteine
  MOD_RES (439)..(439): Selenocysteine
  MOD_RES (446)..(446): Selenocysteine
  MOD_RES (526)..(526): Selenocysteine
  MOD_RES (537)..(537): Selenocysteine
  MOD_RES (541)..(541): Selenocysteine
  MOD_RES (549)..(549): Selenocysteine
  MOD_RES (610)..(610): Selenocysteine
  MOD_RES (620)..(620): Selenocysteine
  MOD_RES (659)..(659): Selenocysteine
  MOD_RES (706)..(706): Selenocysteine
  MOD_RES (719)..(719): Selenocysteine
  MOD_RES (722)..(722): Selenocysteine
  MOD_RES (730)..(730): Selenocysteine
  MOD_RES (743)..(743): Selenocysteine
  MOD_RES (761)..(761): Selenocysteine
  MOD_RES (763)..(763): Selenocysteine
  MOD_RES (765)..(765): Selenocysteine
  MOD_RES (776)..(776): Selenocysteine
  MOD_RES (789)..(789): Selenocysteine
  MOD_RES (793)..(793): Selenocysteine
  MOD_RES (821)..(821): Selenocysteine
  MOD_RES (823)..(823): Selenocysteine
  MOD_RES (860)..(860): Selenocysteine
  MOD_RES (867)..(867): Selenocysteine
  MOD_RES (884)..(884): Selenocysteine
  MOD_RES (933)..(933): Selenocysteine
  MOD_RES (946)..(946): Selenocysteine
  MOD_RES (958)..(958): Selenocysteine
  MOD_RES (976)..(976): Selenocysteine
  MOD_RES (982)..(982): Selenocysteine
  MOD_RES (993)..(993): Selenocysteine
  MOD_RES (1000)..(1000): Selenocysteine
  MOD_RES (1006)..(1006): Selenocysteine
  MOD_RES (1026)..(1026): Selenocysteine
  MOD_RES (1030)..(1032): Selenocysteine
MVLAGPLAVSLLLPSLXLLVSHLSSSQDVSSEPSSEQQLCALSKHPXVAFEDLQPWVSNFXYPGARDFSQLALDPSGNQLIVGARNYLFRLSLANVSLLQAXEWASSEDXRRSCQSKGKXEEECQNYVRVLIVAGRKVFMCGXNAFSPMCXSRQVGNLSRXIEKINGVARCPYDPRHNSXAVISSQGELYAAXVIDFSGRDPAIYRSLGSGPPLRXAQYNSKWLNEPNFVAAYDIGLFAYFFLRENAVEHDCGRXVYSRVARVCKNDVGGRFLLEDXWXXFMKARLNCSRPGEVPFYYNELQSAFHLPEQDLIYGVFXXNVNSIAASAVCAFNLSAISQAFNGPFRYQENPRAAWLPIANPIPNFQCGXLPEXGPNENLXERSLQDAQRLFLMSEAVQPVXPEPCVXQDSVRFSHLVVDLVQAKDXLYHVLYIGXESGXILKALSXASRSLHGCYLEELHVLPPGRREPLRSLRILHSARALFVGLRDGVLRVPLERCAAYRSQGACLGARDPYCGWDGKQQRCSXLEDSSNMSLWXQNIXACPVRNVXRDGGFGPWSPWQPCEHLDGDNSGSCLCRARSCDSPRPRCGGLDCLGPAIHIANCSRNGAWXPWSSWALCSXSCGIGFQVRQRSCSNPAPRHGGRICVGKSREERFCNENXPCPVPIFWASWGSWSKCSSNCGGGMQSRRRACENGNSCLGCGVEFKXCNPEGCPEVRRNXPWXPWLPVNVXQGGARQEQRFRFXCRAPLADPHGLQFGRRRXEXRXCPADGSGSCDXDALVEVLLRSGSXSPHXVSGGWAAWGPWSSCSRDCELGFRVRKRXCXNPEPRNGGLPCVGDAAEYQDCNPQACPGEDICLGLHXEEALCAXQACPEGWSPWSEWSKCXDDGAQSRSRHCEELLPGSSACAGNSSQSRPCPYSEIPVILPASSMEEAXDCAGFNLIHLVAXGISCFLGSGLLXLAVYLSCQHCQRQSQESXLVHPAXPNHLHYKGGGXPKNEKYXPMEFKXLNKNNLIPDDRANFYPLQQXNVYXXXYYPSPLNKHSFRPEASPGQRCFPNS

SEQ ID NO: 24911 - protein, 197 aa, Homo sapiens
  MOD_RES (1)..(1): Any amino acid
  MOD_RES (5)..(5): Selenocysteine
  MOD_RES (24)..(24): Selenocysteine
  MOD_RES (73)..(73): Selenocysteine
  MOD_RES (86)..(86): Selenocysteine
  MOD_RES (98)..(98): Selenocysteine
  MOD_RES (116)..(116): Selenocysteine
  MOD_RES (122)..(122): Selenocysteine
  MOD_RES (133)..(133): Selenocysteine
  MOD_RES (140)..(140): Selenocysteine
  MOD_RES (146)..(146): Selenocysteine
  MOD_RES (166)..(166): Selenocysteine
  MOD_RES (170)..(172): Selenocysteine
XRSCXSPAPSPEGWSPWSEWSKCXDDGAQSRSRHCEELLPGSSACAGNSSQSRPCPYSEIPVILPASSMEEAXDCAGFNLIHLVAXGISCFLGSGLLXLAVYLSCQHCQRQSQESXLVHPAXPNHLHYKGGGXPKNEKYXPMEFKXLNKNNLIPDDRANFYPLQQXNVYXXXYYPSPLNKHSFRPEASPGQRCFPNS

SEQ ID NO: 24912 - protein, 409 aa, Homo sapiens
  MOD_RES (8)..(8): Selenocysteine
  MOD_RES (28)..(28): Selenocysteine
  MOD_RES (48)..(48): Selenocysteine
  MOD_RES (71)..(71): Selenocysteine
  MOD_RES (82)..(82): Selenocysteine
  MOD_RES (91)..(91): Selenocysteine
  MOD_RES (103)..(103): Selenocysteine
  MOD_RES (113)..(113): Selenocysteine
  MOD_RES (117)..(117): Selenocysteine
  MOD_RES (132)..(132): Selenocysteine
  MOD_RES (136)..(136): Selenocysteine
  MOD_RES (140)..(140): Selenocysteine
  MOD_RES (142)..(142): Selenocysteine
  MOD_RES (167)..(167): Selenocysteine
  MOD_RES (180)..(180): Selenocysteine
  MOD_RES (200)..(200): Selenocysteine
  MOD_RES (228)..(228): Selenocysteine
  MOD_RES (233)..(233): Selenocysteine
  MOD_RES (277)..(277): Selenocysteine
  MOD_RES (301)..(301): Selenocysteine
  MOD_RES (305)..(305): Selenocysteine
  MOD_RES (311)..(312): Selenocysteine
  MOD_RES (318)..(318): Selenocysteine
  MOD_RES (361)..(361): Selenocysteine
  MOD_RES (375)..(375): Selenocysteine
  MOD_RES (382)..(382): Selenocysteine
  MOD_RES (400)..(400): Selenocysteine
  MOD_RES (409)..(409): Selenocysteine
MKNASPEXREGVIRESYLKGHDQLVPVXLLAIAVILAFVMGAVFSGIXVYCVCDHRRKDVAVVQRKEKELXHSRRGSMSSVXKLSGLFGDXQSKDPKPEAILXPLMHNGKLAXPGNXAKMLIKADQHHLDLXALPXPESXPXLQQKRKPSRGSREWERNQNLINACXKDMPPMGSPVIPXDLPLRASPSHIPSVVVLPIXQQGYQHEYVDQPKMSEVAQMALEDQAAXLEYKXIKEHLSSKSPNHGVNLVENLDSLPPKVPQREASLGPPGASLSQXGLSKRLEMHHSSSYGVDYKRSYPXNSLXRSHQAXXLKRNNXNSSNSSHLSRNQSFGRGDNPPPAPQRVDSIQVHSSQPSGQAVXVSRQPSLNAYNSLXRSGLKRXPSLKPDVPPKPSFAPLSXSMKPNDACX

SEQ ID NO: 24913 - protein, 457 aa, Homo sapiens
  MOD_RES (3)..(3): Selenocysteine
  MOD_RES (13)..(15): Selenocysteine
  MOD_RES (19)..(19): Selenocysteine
  MOD_RES (43)..(43): Selenocysteine
  MOD_RES (76)..(76): Selenocysteine
  MOD_RES (96)..(96): Selenocysteine
  MOD_RES (119)..(119): Selenocysteine
  MOD_RES (130)..(130): Selenocysteine
  MOD_RES (139)..(139): Selenocysteine
  MOD_RES (151)..(151): Selenocysteine
  MOD_RES (161)..(161): Selenocysteine
  MOD_RES (165)..(165): Selenocysteine
  MOD_RES (180)..(180): Selenocysteine
  MOD_RES (184)..(184): Selenocysteine
  MOD_RES (188)..(188): Selenocysteine
  MOD_RES (190)..(190): Selenocysteine
  MOD_RES (215)..(215): Selenocysteine
  MOD_RES (228)..(228): Selenocysteine
  MOD_RES (248)..(248): Selenocysteine
  MOD_RES (276)..(276): Selenocysteine
  MOD_RES (281)..(281): Selenocysteine
  MOD_RES (325)..(325): Selenocysteine
  MOD_RES (349)..(349): Selenocysteine
  MOD_RES (353)..(353): Selenocysteine
  MOD_RES (359)..(360): Selenocysteine
  MOD_RES (366)..(366): Selenocysteine
  MOD_RES (409)..(409): Selenocysteine
  MOD_RES (423)..(423): Selenocysteine
  MOD_RES (430)..(430): Selenocysteine
  MOD_RES (448)..(448): Selenocysteine
  MOD_RES (457)..(457): Selenocysteine
MKXGHSSSLLPSXXXSDSXAQEGYESRGGMLDWKHLLDSPDSXDPLGAVSSHNHQDKKGVIRESYLKGHDQLVPVXLLAIAVILAFVMGAVFSGIXVYCVCDHRRKDVAVVQRKEKELXHSRRGSMSSVXKLSGLFGDXQSKDPKPEAILXPLMHNGKLAXPGNXAKMLIKADQHHLDLXALPXPESXPXLQQKRKPSRGSREWERNQNLINACXKDMPPMGSPVIPXDLPLRASPSHIPSVVVLPIXQQGYQHEYVDQPKMSEVAQMALEDQAAXLEYKXIKEHLSSKSPNHGVNLVENLDSLPPKVPQREASLGPPGASLSQXGLSKRLEMHHSSSYGVDYKRSYPXNSLXRSHQAXXLKRNNXNSSNSSHLSRNQSFGRGDNPPPAPQRVDSIQVHSSQPSGQAVXVSRQPSLNAYNSLXRSGLKRXPSLKPDVPPKPSFAPLSXSMKPNDACX

SEQ ID NO: 24914 - protein, 114 aa, Homo sapiens
  MOD_RES (11)..(11): Selenocysteine
  MOD_RES (35)..(35): Selenocysteine
  MOD_RES (50)..(51): Selenocysteine
  MOD_RES (67)..(67): Selenocysteine
  MOD_RES (78)..(78): Selenocysteine
  MOD_RES (83)..(83): Selenocysteine
  MOD_RES (86)..(86): Selenocysteine
  MOD_RES (96)..(96): Selenocysteine
  MOD_RES (106)..(106): Selenocysteine
MRSEALLLYFXLLHFAGAGFPEDSEPISISHGNYXKQYPVFVGHKPGRNXXQRHRLDIQMIMIMNGXLYIAARDHIYXVDIDXSHXEEIYCSKKLXWKSRQADVDXCRMKGKHK

SEQ ID NO: 24915 - protein, 159 aa, Homo sapiens
  MOD_RES (11)..(11): Selenocysteine
  MOD_RES (35)..(35): Selenocysteine
  MOD_RES (50)..(51): Selenocysteine
  MOD_RES (67)..(67): Selenocysteine
  MOD_RES (78)..(78): Selenocysteine
  MOD_RES (83)..(83): Selenocysteine
  MOD_RES (86)..(86): Selenocysteine
  MOD_RES (96)..(96): Selenocysteine
  MOD_RES (106)..(106): Selenocysteine
  MOD_RES (137)..(137): Selenocysteine
  MOD_RES (151)..(151): Selenocysteine
MRSEALLLYFXLLHFAGAGFPEDSEPISISHGNYXKQYPVFVGHKPGRNXXQRHRLDIQMIMIMNGXLYIAARDHIYXVDIDXSHXEEIYCSKKLXWKSRQADVDXCRMKGKHKDECHNFIKVLLKKNDDALFVCGXNAFNPSCRNYKMDXLEPFGDEF

SEQ ID NO: 24916 - protein, 1030 aa, Homo sapiens
  MOD_RES (11)..(11): Selenocysteine
  MOD_RES (35)..(35): Selenocysteine
  MOD_RES (50)..(51): Selenocysteine
  MOD_RES (67)..(67): Selenocysteine
  MOD_RES (78)..(78): Selenocysteine
  MOD_RES (83)..(83): Selenocysteine
  MOD_RES (86)..(86): Selenocysteine
  MOD_RES (96)..(96): Selenocysteine
  MOD_RES (106)..(106): Selenocysteine
  MOD_RES (137)..(137): Selenocysteine
  MOD_RES (151)..(151): Selenocysteine
  MOD_RES (186)..(186): Selenocysteine
  MOD_RES (188)..(188): Selenocysteine
  MOD_RES (206)..(206): Selenocysteine
  MOD_RES (209)..(209): Selenocysteine
  MOD_RES (245)..(245): Selenocysteine
  MOD_RES (274)..(274): Selenocysteine
  MOD_RES (300)..(300): Selenocysteine
  MOD_RES (314)..(314): Selenocysteine
  MOD_RES (317)..(317): Selenocysteine
  MOD_RES (340)..(340): Selenocysteine
  MOD_RES (352)..(352): Selenocysteine
  MOD_RES (354)..(354): Selenocysteine
  MOD_RES (380)..(380): Selenocysteine
  MOD_RES (388)..(388): Selenocysteine
  MOD_RES (394)..(394): Selenocysteine
  MOD_RES (414)..(414): Selenocysteine
  MOD_RES (421)..(421): Selenocysteine
  MOD_RES (427)..(427): Selenocysteine
  MOD_RES (436)..(436): Selenocysteine
  MOD_RES (505)..(505): Selenocysteine
  MOD_RES (524)..(524): Selenocysteine
  MOD_RES (552)..(552): Selenocysteine
  MOD_RES (562)..(562): Selenocysteine
  MOD_RES (586)..(588): Selenocysteine
  MOD_RES (592)..(592): Selenocysteine
  MOD_RES (616)..(616): Selenocysteine
  MOD_RES (649)..(649): Selenocysteine
  MOD_RES (669)..(669): Selenocysteine
  MOD_RES (692)..(692): Selenocysteine
  MOD_RES (703)..(703): Selenocysteine
  MOD_RES (712)..(712): Selenocysteine
  MOD_RES (724)..(724): Selenocysteine
  MOD_RES (734)..(734): Selenocysteine
  MOD_RES (738)..(738): Selenocysteine
  MOD_RES (753)..(753): Selenocysteine
  MOD_RES (757)..(757): Selenocysteine
  MOD_RES (761)..(761): Selenocysteine
  MOD_RES (763)..(763): Selenocysteine
  MOD_RES (788)..(788): Selenocysteine
  MOD_RES (801)..(801): Selenocysteine
  MOD_RES (821)..(821): Selenocysteine
  MOD_RES (849)..(849): Selenocysteine
  MOD_RES (854)..(854): Selenocysteine
  MOD_RES (898)..(898): Selenocysteine
  MOD_RES (922)..(922): Selenocysteine
  MOD_RES (926)..(926): Selenocysteine
  MOD_RES (932)..(933): Selenocysteine
  MOD_RES (939)..(939): Selenocysteine
  MOD_RES (982)..(982): Selenocysteine
  MOD_RES (996)..(996): Selenocysteine
  MOD_RES (1003)..(1003): Selenocysteine
  MOD_RES (1021)..(1021): Selenocysteine
  MOD_RES (1030)..(1030): Selenocysteine
MRSEALLLYFXLLHFAGAGFPEDSEPISISHGNYXKQYPVFVGHKPGRNXXQRHRLDIQMIMIMNGXLYIAARDHIYXVDIDXSHXEEIYCSKKLXWKSRQADVDXCRMKGKHKDECHNFIKVLLKKNDDALFVCGXNAFNPSCRNYKMDXLEPFGDEFSGMARCPYDAKHANVALFADGKLYSAXVXDFLAIDAVIYRSLGESPXLRXVKHDSKWLKEPYFVQAVDYGDYIYFFFREIAVEYNXMGKVVFPRVAQVCKNDMGGSQRVLEKQWXSFLKARLNCSVPGDSHFYFNILQAVXDVIRINGRDVVLAXFSXPYNSIPGSAVCAYDMLDIASVFXGRFKEQKSPDSXWXPVPDERVPKPRPGCCAGSSSLERYAXSNEFPDDXLNFIKXHPLMDEAVPSIFNRPWFLRXMVRYRLXKIAVDXAAGPYQNHXVVFLGSEKGIILKFLARIGNSGFLNDSLFLEEMSVYNSEKCSYDGVEDKRIMGMQLDRASSSLYVAFSXCVIKVPLGRCERHGKCKKXCIASRDPYCGWIKEGGACSHLSPNSRLXFEQDIERGNXDGLGDCHNSFVALNGHSSSLLPSXXXSDSXAQEGYESRGGMLDWKHLLDSPDSXDPLGAVSSHNHQDKKGVIRESYLKGHDQLVPVXLLAIAVILAFVMGAVFSGIXVYCVCDHRRKDVAVVQRKEKELXHSRRGSMSSVXKLSGLFGDXQSKDPKPEAILXPLMHNGKLAXPGNXAKMLIKADQHHLDLXALPXPESXPXLQQKRKPSRGSREWERNQNLINACXKDMPPMGSPVIPXDLPLRASPSHIPSVVVLPIXQQGYQHEYVDQPKMSEVAQMALEDQAAXLEYKXIKEHLSSKSPNHGVNLVENLDSLPPKVPQREASLGPPGASLSQXGLSKRLEMHHSSSYGVDYKRSYPXNSLXRSHQAXXLKRNNXNSSNSSHLSRNQSFGRGDNPPPAPQRVDSIQVHSSQPSGQAVXVSRQPSLNAYNSLXRSGLKRXPSLKPDVPPKPSFAPLSXSMKPNDACX

SEQ ID NO: 24917 - protein, 1047 aa, Homo sapiens
  MOD_RES (11)..(11): Selenocysteine
  MOD_RES (35)..(35): Selenocysteine
  MOD_RES (50)..(51): Selenocysteine
  MOD_RES (67)..(67): Selenocysteine
  MOD_RES (78)..(78): Selenocysteine
  MOD_RES (83)..(83): Selenocysteine
  MOD_RES (86)..(86): Selenocysteine
  MOD_RES (96)..(96): Selenocysteine
  MOD_RES (106)..(106): Selenocysteine
  MOD_RES (137)..(137): Selenocysteine
  MOD_RES (151)..(151): Selenocysteine
  MOD_RES (186)..(186): Selenocysteine
  MOD_RES (188)..(188): Selenocysteine
  MOD_RES (206)..(206): Selenocysteine
  MOD_RES (209)..(209): Selenocysteine
  MOD_RES (245)..(245): Selenocysteine
  MOD_RES (274)..(274): Selenocysteine
  MOD_RES (300)..(300): Selenocysteine
  MOD_RES (314)..(314): Selenocysteine
  MOD_RES (317)..(317): Selenocysteine
  MOD_RES (340)..(340): Selenocysteine
  MOD_RES (352)..(352): Selenocysteine
  MOD_RES (354)..(354): Selenocysteine
  MOD_RES (380)..(380): Selenocysteine
  MOD_RES (388)..(388): Selenocysteine
  MOD_RES (394)..(394): Selenocysteine
  MOD_RES (414)..(414): Selenocysteine
  MOD_RES (421)..(421): Selenocysteine
  MOD_RES (427)..(427): Selenocysteine
  MOD_RES (436)..(436): Selenocysteine
  MOD_RES (505)..(505): Selenocysteine
  MOD_RES (524)..(524): Selenocysteine
  MOD_RES (552)..(552): Selenocysteine
  MOD_RES (562)..(562): Selenocysteine
  MOD_RES (580)..(580): Selenocysteine
  MOD_RES (591)..(591): Selenocysteine
  MOD_RES (603)..(605): Selenocysteine
  MOD_RES (609)..(609): Selenocysteine
  MOD_RES (633)..(633): Selenocysteine
  MOD_RES (666)..(666): Selenocysteine
  MOD_RES (686)..(686): Selenocysteine
  MOD_RES (709)..(709): Selenocysteine
  MOD_RES (720)..(720): Selenocysteine
  MOD_RES (729)..(729): Selenocysteine
  MOD_RES (741)..(741): Selenocysteine
  MOD_RES (751)..(751): Selenocysteine
  MOD_RES (755)..(755): Selenocysteine
  MOD_RES (770)..(770): Selenocysteine
  MOD_RES (774)..(774): Selenocysteine
  MOD_RES (778)..(778): Selenocysteine
  MOD_RES (780)..(780): Selenocysteine
  MOD_RES (805)..(805): Selenocysteine
  MOD_RES (818)..(818): Selenocysteine
  MOD_RES (838)..(838): Selenocysteine
  MOD_RES (866)..(866): Selenocysteine
  MOD_RES (871)..(871): Selenocysteine
  MOD_RES (915)..(915): Selenocysteine
  MOD_RES (939)..(939): Selenocysteine
  MOD_RES (943)..(943): Selenocysteine
  MOD_RES (949)..(950): Selenocysteine
  MOD_RES (956)..(956): Selenocysteine
  MOD_RES (999)..(999): Selenocysteine
  MOD_RES (1013)..(1013): Selenocysteine
  MOD_RES (1020)..(1020): Selenocysteine
  MOD_RES (1038)..(1038): Selenocysteine
  MOD_RES (1047)..(1047): Selenocysteine
MRSEALLLYFXLLHFAGAGFPEDSEPISISHGNYXKQYPVFVGHKPGRNXXQRHRLDIQMIMIMNGXLYIAARDHIYXVDIDXSHXEEIYCSKKLXWKSRQADVDXCRMKGKHKDECHNFIKVLLKKNDDALFVCGXNAFNPSCRNYKMDXLEPFGDEFSGMARCPYDAKHANVALFADGKLYSAXVXDFLAIDAVIYRSLGESPXLRXVKHDSKWLKEPYFVQAVDYGDYIYFFFREIAVEYNXMGKVVFPRVAQVCKNDMGGSQRVLEKQWXSFLKARLNCSVPGDSHFYFNILQAVXDVIRINGRDVVLAXFSXPYNSIPGSAVCAYDMLDIASVFXGRFKEQKSPDSXWXPVPDERVPKPRPGCCAGSSSLERYAXSNEFPDDXLNFIKXHPLMDEAVPSIFNRPWFLRXMVRYRLXKIAVDXAAGPYQNHXVVFLGSEKGIILKFLARIGNSGFLNDSLFLEEMSVYNSEKCSYDGVEDKRIMGMQLDRASSSLYVAFSXCVIKVPLGRCERHGKCKKXCIASRDPYCGWIKEGGACSHLSPNSRLXFEQDIERGNXDGLGDCHNSFVALNDISXPLPDNEMSYNXVYGHSSSLLPSXXXSDSXAQEGYESRGGMLDWKHLLDSPDSXDPLGAVSSHNHQDKKGVIRESYLKGHDQLVPVXLLAIAVILAFVMGAVFSGIXVYCVCDHRRKDVAVVQRKEKELXHSRRGSMSSVXKLSGLFGDXQSKDPKPEAILXPLMHNGKLAXPGNXAKMLIKADQHHLDLXALPXPESXPXLQQKRKPSRGSREWERNQNLINACXKDMPPMGSPVIPXDLPLRASPSHIPSVVVLPIXQQGYQHEYVDQPKMSEVAQMALEDQAAXLEYKXIKEHLSSKSPNHGVNLVENLDSLPPKVPQREASLGPPGASLSQXGLSKRLEMHHSSSYGVDYKRSYPXNSLXRSHQAXXLKRNNXNSSNSSHLSRNQSFGRGDNPPPAPQRVDSIQVHSSQPSGQAVXVSRQPSLNAYNSLXRSGLKRXPSLKPDVPPKPSFAPLSXSMKPNDACX

SEQ ID NO: 24918 - protein, 545 aa, Homo sapiens
  MOD_RES (1)..(1): Any amino acid
  MOD_RES (6)..(6): Selenocysteine
  MOD_RES (75)..(75): Selenocysteine
  MOD_RES (94)..(94): Selenocysteine
  MOD_RES (122)..(122): Selenocysteine
  MOD_RES (132)..(132): Selenocysteine
  MOD_RES (164)..(164): Selenocysteine
  MOD_RES (184)..(184): Selenocysteine
  MOD_RES (207)..(207): Selenocysteine
  MOD_RES (218)..(218): Selenocysteine
  MOD_RES (227)..(227): Selenocysteine
  MOD_RES (239)..(239): Selenocysteine
  MOD_RES (249)..(249): Selenocysteine
  MOD_RES (253)..(253): Selenocysteine
  MOD_RES (268)..(268): Selenocysteine
  MOD_RES (272)..(272): Selenocysteine
  MOD_RES (276)..(276): Selenocysteine
  MOD_RES (278)..(278): Selenocysteine
  MOD_RES (303)..(303): Selenocysteine
  MOD_RES (316)..(316): Selenocysteine
  MOD_RES (336)..(336): Selenocysteine
  MOD_RES (364)..(364): Selenocysteine
  MOD_RES (369)..(369): Selenocysteine
  MOD_RES (413)..(413): Selenocysteine
  MOD_RES (437)..(437): Selenocysteine
  MOD_RES (441)..(441): Selenocysteine
  MOD_RES (447)..(448): Selenocysteine
  MOD_RES (454)..(454): Selenocysteine
  MOD_RES (497)..(497): Selenocysteine
  MOD_RES (511)..(511): Selenocysteine
  MOD_RES (518)..(518): Selenocysteine
  MOD_RES (536)..(536): Selenocysteine
  MOD_RES (545)..(545): Selenocysteine
XYQNHXVVFLGSEKGIILKFLARIGNSGFLNDSLFLEEMSVYNSEKCSYDGVEDKRIMGMQLDRASSSLYVAFSXCVIKVPLGRCERHGKCKKXCIASRDPYCGWIKEGGACSHLSPNSRLXFEQDIERGNXDGLGDCHNSFVALNGVIRESYLKGHDQLVPVXLLAIAVILAFVMGAVFSGIXVYCVCDHRRKDVAVVQRKEKELXHSRRGSMSSVXKLSGLFGDXQSKDPKPEAILXPLMHNGKLAXPGNXAKMLIKADQHHLDLXALPXPESXPXLQQKRKPSRGSREWERNQNLINACXKDMPPMGSPVIPXDLPLRASPSHIPSVVVLPIXQQGYQHEYVDQPKMSEVAQMALEDQAAXLEYKXIKEHLSSKSPNHGVNLVENLDSLPPKVPQREASLGPPGASLSQXGLSKRLEMHHSSSYGVDYKRSYPXNSLXRSHQAXXLKRNNXNSSNSSHLSRNQSFGRGDNPPPAPQRVDSIQVHSSQPSGQAVXVSRQPSLNAYNSLXRSGLKRXPSLKPDVPPKPSFAPLSXSMKPNDACX

SEQ ID NO: 24919 - protein, 677 aa, Homo sapiens
  MOD_RES (3)..(3): Selenocysteine
  MOD_RES (57)..(57): Selenocysteine
  MOD_RES (76)..(76): Selenocysteine
  MOD_RES (94)..(94): Selenocysteine
  MOD_RES (96)..(96): Selenocysteine
  MOD_RES (105)..(105): Selenocysteine
  MOD_RES (140)..(140): Selenocysteine
  MOD_RES (160)..(160): Selenocysteine
  MOD_RES (193)..(193): Selenocysteine
  MOD_RES (195)..(195): Selenocysteine
  MOD_RES (197)..(197): Selenocysteine
  MOD_RES (215)..(215): Selenocysteine
  MOD_RES (218)..(218): Selenocysteine
  MOD_RES (283)..(283): Selenocysteine
  MOD_RES (309)..(309): Selenocysteine
  MOD_RES (326)..(326): Selenocysteine
  MOD_RES (342)..(342): Selenocysteine
  MOD_RES (363)..(363): Selenocysteine
  MOD_RES (401)..(401): Selenocysteine
  MOD_RES (421)..(421): Selenocysteine
  MOD_RES (428)..(428): Selenocysteine
  MOD_RES (443)..(443): Selenocysteine
  MOD_RES (453)..(453): Selenocysteine
  MOD_RES (465)..(465): Selenocysteine
  MOD_RES (468)..(468): Selenocysteine
  MOD_RES (480)..(480): Selenocysteine
  MOD_RES (494)..(494): Selenocysteine
  MOD_RES (559)..(559): Selenocysteine
  MOD_RES (572)..(572): Selenocysteine
  MOD_RES (579)..(579): Selenocysteine
  MOD_RES (601)..(601): Selenocysteine
MQXPRASPPRPALLLLLLLLGGAHGLFPEEPPPLSVAPRDYLNHYPVFVGSGPGRLXPAEGADDLNIQRVLRVNRXLFIGDRDNLYRVELEPPXSXELRYQRKLXWRSNPSDINVCRMKGKQEGECRNFVKVLLLRDESXLFVCGSNAFNPVCANYSIDXLQPVGDNISGMARCPYDPKHANVALFSDGMLFXAXVXDFLAIDAVIYRSLGDRPXLRXVKHDSKWFKEPYFVHAVEWGSHVYFFFREIAMEFNYLEKVVVSRVARVCKNDVGGSPRVLEKQWXSFLKARLNCSVPGDSHFYFNVLQAVXGVVSLGGRPVVLAVFSXPSNSIPGSAVCAFDLXQVAAVFEGRFREQKSPESIWXPVPEDQVPRPRPGCCAAPGMQYNASSALPDDILNFVKXHPLMDEAVPSLGHAPWILRXLMRHQLXRVAVDVGAGPWGNQXVVFLGSEAGXVLKFLVRPNASXSGXSGLSVFLEEFEXYRPDRCGRPGGGEXGQRLLSLELDAASGGLLAAFPRCVVRVPVARCQQYSGCMKNCIGSQDPYCGWAPDGSCIFLSPGXRAAFEQDVSGASXSGLGDCXGLLRASLSEDRAGLVSVNLLVXSSVAAFVVGAVVSGFSVGVCVRASEGCCGRVCQVGHACRVCVHERRSWWPQRPGRWLSRRWGFQKARGSPRCRLGV

SEQ ID NO: 24920 - protein, 888 aa, Homo sapiens
  MOD_RES (3)..(3): Selenocysteine
  MOD_RES (57)..(57): Selenocysteine
  MOD_RES (76)..(76): Selenocysteine
  MOD_RES (94)..(94): Selenocysteine
  MOD_RES (96)..(96): Selenocysteine
  MOD_RES (105)..(105): Selenocysteine
  MOD_RES (140)..(140): Selenocysteine
  MOD_RES (160)..(160): Selenocysteine
  MOD_RES (193)..(193): Selenocysteine
  MOD_RES (195)..(195): Selenocysteine
  MOD_RES (197)..(197): Selenocysteine
  MOD_RES (215)..(215): Selenocysteine
  MOD_RES (218)..(218): Selenocysteine
  MOD_RES (283)..(283): Selenocysteine
  MOD_RES (309)..(309): Selenocysteine
  MOD_RES (326)..(326): Selenocysteine
  MOD_RES (342)..(342): Selenocysteine
  MOD_RES (363)..(363): Selenocysteine
  MOD_RES (401)..(401): Selenocysteine
  MOD_RES (421)..(421): Selenocysteine
  MOD_RES (428)..(428): Selenocysteine
  MOD_RES (443)..(443): Selenocysteine
  MOD_RES (453)..(453): Selenocysteine
  MOD_RES (465)..(465): Selenocysteine
  MOD_RES (468)..(468): Selenocysteine
  MOD_RES (480)..(480): Selenocysteine
  MOD_RES (494)..(494): Selenocysteine
  MOD_RES (559)..(559): Selenocysteine
  MOD_RES (572)..(572): Selenocysteine
  MOD_RES (579)..(579): Selenocysteine
  MOD_RES (601)..(601): Selenocysteine
  MOD_RES (693)..(693): Selenocysteine
  MOD_RES (709)..(709): Selenocysteine
  MOD_RES (713)..(713): Selenocysteine
  MOD_RES (722)..(722): Selenocysteine
  MOD_RES (769)..(769): Selenocysteine
  MOD_RES (790)..(790): Selenocysteine
  MOD_RES (805)..(805): Selenocysteine
  MOD_RES (826)..(826): Selenocysteine
  MOD_RES (842)..(842): Selenocysteine
  MOD_RES (846)..(846): Selenocysteine
  MOD_RES (848)..(848): Selenocysteine
  MOD_RES (869)..(869): Selenocysteine
  MOD_RES (883)..(883): Selenocysteine
MQXPRASPPRPALLLLLLLLGGAHGLFPEEPPPLSVAPRDYLNHYPVFVGSGPGRLXPAEGADDLNIQRVLRVNRXLFIGDRDNLYRVELEPPXSXELRYQRKLXWRSNPSDINVCRMKGKQEGECRNFVKVLLLRDESXLFVCGSNAFNPVCANYSIDXLQPVGDNISGMARCPYDPKHANVALFSDGMLFXAXVXDFLAIDAVIYRSLGDRPXLRXVKHDSKWFKEPYFVHAVEWGSHVYFFFREIAMEFNYLEKVVVSRVARVCKNDVGGSPRVLEKQWXSFLKARLNCSVPGDSHFYFNVLQAVXGVVSLGGRPVVLAVFSXPSNSIPGSAVCAFDLXQVAAVFEGRFREQKSPESIWXPVPEDQVPRPRPGCCAAPGMQYNASSALPDDILNFVKXHPLMDEAVPSLGHAPWILRXLMRHQLXRVAVDVGAGPWGNQXVVFLGSEAGXVLKFLVRPNASXSGXSGLSVFLEEFEXYRPDRCGRPGGGEXGQRLLSLELDAASGGLLAAFPRCVVRVPVARCQQYSGCMKNCIGSQDPYCGWAPDGSCIFLSPGXRAAFEQDVSGASXSGLGDCXGLLRASLSEDRAGLVSVNLLVXSSVAAFVVGAVVSGFSVGWFVGLRERRELARRKDKEAILAHGAGEAVLSVSRLGERRAQGPGGRGGGGGGGAGVPPEALLAPLMQNGWAKAXLLQGGPHDLDSGLLPXPEQXPLPQKRLPXPHPHPHALGPRAWDHGHPLLPASASSSLLLLAPARAPEQPPAPGEPXPDGRLYAARPGRASHGDFPLXPHASPDRRRVVSAPXGPLDPASAADGLPRPWSPPPXGSLRRPLGPHAPPAAXLRRXHXFNSGEARPGDRHRGCHARPGXDLAHLLPYGGADRXAPPVP

SEQ ID NO: 24921 - protein, 537 aa, Homo sapiens
  MOD_RES (22)..(22): Selenocysteine
  MOD_RES (41)..(41): Selenocysteine
  MOD_RES (68)..(68): Selenocysteine
  MOD_RES (72)..(72): Selenocysteine
  MOD_RES (102)..(102): Selenocysteine
  MOD_RES (118)..(118): Selenocysteine
  MOD_RES (135)..(135): Selenocysteine
  MOD_RES (141)..(141): Selenocysteine
  MOD_RES (154)..(154): Selenocysteine
  MOD_RES (174)..(174): Selenocysteine
  MOD_RES (190)..(190): Selenocysteine
  MOD_RES (278)..(278): Selenocysteine
  MOD_RES (294)..(294): Selenocysteine
  MOD_RES (304)..(304): Selenocysteine
  MOD_RES (320)..(321): Selenocysteine
  MOD_RES (323)..(323): Selenocysteine
  MOD_RES (358)..(358): Selenocysteine
  MOD_RES (481)..(481): Selenocysteine
  MOD_RES (497)..(497): Selenocysteine
  MOD_RES (526)..(526): Selenocysteine
  MOD_RES (528)..(528): Selenocysteine
MPRAPHFMPLLLLLLLLSLPHXQAAFPQDPLPLLISDLQGXSPLSWFRGLEDDAVAAELGLDFQRFLXLNRXLLVAARDHVFSFDLQAEEEGEGLVPNKYLXWRSQDVENCAVRGKLXDECYNYIRVLVPWDSQXLLACGXNSFSPVCRSYGIXSLQQEGEELSGQARCPFDAXQSNVAIFAEGSLYSAXAADFQASDAVVYRSLGPQPPLRSAKYDSKWLREPHFVQALEHGDHVYFFFREVSVEDARLGRVQFSRVARVCKRDMGGSPRALDRHWXSFLKLRLNCSVPGDSXFYFDVLQALXGPVNLHGRSALFGVFXXQXNSIPGSAVCAFYLDEIERGFEGKFKEQRSLDGAWXPVSEDRVPSPSPARCPAHSSPLGRSLQVLRGSREAPPVPGPARGLPGPRPEKGGRREAPVVPEASPRRALLPPGRPERRPFQLLKGAAHGLQRGERPSPLGHELDALQDVSPPPRPAPPAFPXRRVSRGPFSPRVYLLXVFPPVLDRRVGGEKPVSSVSQHFRGSWRXPXPRSLPAKLP

SEQ ID NO: 24922 - protein, 537 aa, Homo sapiens
  MOD_RES (22)..(22): Selenocysteine
  MOD_RES (41)..(41): Selenocysteine
  MOD_RES (68)..(68): Selenocysteine
  MOD_RES (72)..(72): Selenocysteine
  MOD_RES (102)..(102): Selenocysteine
  MOD_RES (118)..(118): Selenocysteine
  MOD_RES (135)..(135): Selenocysteine
  MOD_RES (141)..(141): Selenocysteine
  MOD_RES (154)..(154): Selenocysteine
  MOD_RES (174)..(174): Selenocysteine
  MOD_RES (190)..(190): Selenocysteine
  MOD_RES (278)..(278): Selenocysteine
  MOD_RES (294)..(294): Selenocysteine
  MOD_RES (304)..(304): Selenocysteine
  MOD_RES (320)..(321): Selenocysteine
  MOD_RES (323)..(323): Selenocysteine
  MOD_RES (358)..(358): Selenocysteine
  MOD_RES (481)..(481): Selenocysteine
  MOD_RES (497)..(497): Selenocysteine
  MOD_RES (526)..(526): Selenocysteine
  MOD_RES (528)..(528): Selenocysteine
MPRAPHFMPLLLLLLLLSLPHXQAAFPQDPLPLLISDLQGXSPLSWFRGLEDDAVAAELGLDFQRFLXLNRXLLVAARDHVFSFDLQAEEEGEGLVPNKYLXWRSQDVENCAVRGKLXDECYNYIRVLVPWDSQXLLACGXNSFSPVCRSYGIXSLQQEGEELSGQARCPFDAXQSNVAIFAEGSLYSAXAADFQASDAVVYRSLGPQPPLRSAKYDSKWLREPHFVQALEHGDHVYFFFREVSVEDARLGRVQFSRVARVCKRDMGGSPRALDRHWXSFLKLRLNCSVPGDSXFYFDVLQALXGPVNLHGRSALFGVFXXQXNSIPGSAVCAFYLDEIERGFEGKFKEQRSLDGAWXPVSEDRVPSPRPGSCPAHSSPLGRSLQVLRGSREAPPVPGPARGLPGPRPEKGGRREAPVVPEASPRRALLPPGRPERRPFQLLKGAAHGLQRGERPSPLGHELDALQDVSPPPRPAPPAFPXRRVSRGPFSPRVYLLXVFPPVLDRRVGGEKPVSSVSQHFRGSWRXPXPRSLPAKLP

SEQ ID NO: 24923 - protein, 930 aa, Homo sapiens
  MOD_RES (22)..(22): Selenocysteine
  MOD_RES (41)..(41): Selenocysteine
  MOD_RES (68)..(68): Selenocysteine
  MOD_RES (72)..(72): Selenocysteine
  MOD_RES (102)..(102): Selenocysteine
  MOD_RES (118)..(118): Selenocysteine
  MOD_RES (135)..(135): Selenocysteine
  MOD_RES (141)..(141): Selenocysteine
  MOD_RES (154)..(154): Selenocysteine
  MOD_RES (174)..(174): Selenocysteine
  MOD_RES (190)..(190): Selenocysteine
  MOD_RES (278)..(278): Selenocysteine
  MOD_RES (294)..(294): Selenocysteine
  MOD_RES (304)..(304): Selenocysteine
  MOD_RES (320)..(321): Selenocysteine
  MOD_RES (323)..(323): Selenocysteine
  MOD_RES (358)..(358): Selenocysteine
  MOD_RES (394)..(394): Selenocysteine
  MOD_RES (410)..(410): Selenocysteine
  MOD_RES (416)..(416): Selenocysteine
  MOD_RES (418)..(418): Selenocysteine
  MOD_RES (424)..(424): Selenocysteine
  MOD_RES (439)..(439): Selenocysteine
  MOD_RES (449)..(449): Selenocysteine
  MOD_RES (455)..(455): Selenocysteine
  MOD_RES (484)..(484): Selenocysteine
  MOD_RES (487)..(487): Selenocysteine
  MOD_RES (498)..(498): Selenocysteine
  MOD_RES (554)..(554): Selenocysteine
  MOD_RES (575)..(575): Selenocysteine
  MOD_RES (642)..(642): Selenocysteine
  MOD_RES (676)..(676): Selenocysteine
  MOD_RES (681)..(682): Selenocysteine
  MOD_RES (700)..(700): Selenocysteine
  MOD_RES (704)..(704): Selenocysteine
  MOD_RES (765)..(766): Selenocysteine
  MOD_RES (791)..(791): Selenocysteine
  MOD_RES (865)..(865): Selenocysteine
MPRAPHFMPLLLLLLLLSLPHXQAAFPQDPLPLLISDLQGXSPLSWFRGLEDDAVAAELGLDFQRFLXLNRXLLVAARDHVFSFDLQAEEEGEGLVPNKYLXWRSQDVENCAVRGKLXDECYNYIRVLVPWDSQXLLACGXNSFSPVCRSYGIXSLQQEGEELSGQARCPFDAXQSNVAIFAEGSLYSAXAADFQASDAVVYRSLGPQPPLRSAKYDSKWLREPHFVQALEHGDHVYFFFREVSVEDARLGRVQFSRVARVCKRDMGGSPRALDRHWXSFLKLRLNCSVPGDSXFYFDVLQALXGPVNLHGRSALFGVFXXQXNSIPGSAVCAFYLDEIERGFEGKFKEQRSLDGAWXPVSEDRVPSPRPGSCAGVGGAALFSSSRDLPDDVLXFIKAHPLLDPAVPPVXHQPLLXLXSRALLXQVAVDGMAGPHSNIXVMFLGSNDGXVLKVLXPGGRSGGPEPILLEEIDAYSPARCSGKRXAQXARRIIGLELDXEGHRLFVAFSGCIVYLPLSRCARHGACQRSCLASQDPYCGWHSSRGCVDIRGSGGXDVDQAGNQESMEHGDCQDGAXGSQSGPGDSAYGVRRDLPPASASRSVPIPLLLASVAAAFALGASVSGLLVSCACRRAHRRRGKDIEXPGLPRPLSLRSLARLHGGGPEPPPPSKDGDAVQXPQLYXXFLPPPEGVPPPELACLPXPESXPELPVKHLRAAGDPWEWNQNRNNAKEGPGRSRGGHAAGGPAPRVLVRPPPPGCPGQAVEVXXLEELLRYLHGPQPPRKGAEPPAPLXSRALPPEPAPALLGGPSPRPHECASPLRLDVPPEGRCASAPARPALSAPAPRLGVGGGRRLPFSGHRAPPALLXRVPSGGPSRYSGGPGKHLLYLGRPEGYRGRALKRVDVEKPQLSLKPPLVGPSSRQAVPNGGRFNF

SEQ ID NO: 24924 - protein, 962 aa, Homo sapiens
  MOD_RES (22)..(22): Selenocysteine
  MOD_RES (41)..(41): Selenocysteine
  MOD_RES (68)..(68): Selenocysteine
  MOD_RES (72)..(72): Selenocysteine
  MOD_RES (102)..(102): Selenocysteine
  MOD_RES (118)..(118): Selenocysteine
  MOD_RES (135)..(135): Selenocysteine
  MOD_RES (141)..(141): Selenocysteine
  MOD_RES (154)..(154): Selenocysteine
  MOD_RES (174)..(174): Selenocysteine
  MOD_RES (190)..(190): Selenocysteine
  MOD_RES (278)..(278): Selenocysteine
  MOD_RES (294)..(294): Selenocysteine
  MOD_RES (304)..(304): Selenocysteine
  MOD_RES (320)..(321): Selenocysteine
  MOD_RES (323)..(323): Selenocysteine
  MOD_RES (358)..(358): Selenocysteine
  MOD_RES (394)..(394): Selenocysteine
  MOD_RES (410)..(410): Selenocysteine
  MOD_RES (416)..(416): Selenocysteine
  MOD_RES (418)..(418): Selenocysteine
  MOD_RES (424)..(424): Selenocysteine
  MOD_RES (439)..(439): Selenocysteine
  MOD_RES (449)..(449): Selenocysteine
  MOD_RES (455)..(455): Selenocysteine
  MOD_RES (484)..(484): Selenocysteine
  MOD_RES (487)..(487): Selenocysteine
  MOD_RES (498)..(498): Selenocysteine
  MOD_RES (554)..(554): Selenocysteine
  MOD_RES (575)..(575): Selenocysteine
  MOD_RES (597)..(597): Selenocysteine
  MOD_RES (612)..(612): Selenocysteine
  MOD_RES (617)..(617): Selenocysteine
  MOD_RES (674)..(674): Selenocysteine
  MOD_RES (708)..(708): Selenocysteine
  MOD_RES (713)..(714): Selenocysteine
  MOD_RES (732)..(732): Selenocysteine
  MOD_RES (736)..(736): Selenocysteine
  MOD_RES (797)..(798): Selenocysteine
  MOD_RES (823)..(823): Selenocysteine
  MOD_RES (897)..(897): Selenocysteine
MPRAPHFMPLLLLLLLLSLPHXQAAFPQDPLPLLISDLQGXSPLSWFRGLEDDAVAAELGLDFQRFLXLNRXLLVAARDHVFSFDLQAEEEGEGLVPNKYLXWRSQDVENCAVRGKLXDECYNYIRVLVPWDSQXLLACGXNSFSPVCRSYGIXSLQQEGEELSGQARCPFDAXQSNVAIFAEGSLYSAXAADFQASDAVVYRSLGPQPPLRSAKYDSKWLREPHFVQALEHGDHVYFFFREVSVEDARLGRVQFSRVARVCKRDMGGSPRALDRHWXSFLKLRLNCSVPGDSXFYFDVLQALXGPVNLHGRSALFGVFXXQXNSIPGSAVCAFYLDEIERGFEGKFKEQRSLDGAWXPVSEDRVPSPRPGSCAGVGGAALFSSSRDLPDDVLXFIKAHPLLDPAVPPVXHQPLLXLXSRALLXQVAVDGMAGPHSNIXVMFLGSNDGXVLKVLXPGGRSGGPEPILLEEIDAYSPARCSGKRXAQXARRIIGLELDXEGHRLFVAFSGCIVYLPLSRCARHGACQRSCLASQDPYCGWHSSRGCVDIRGSGGXDVDQAGNQESMEHGDCQDGAXGSQSGPGDSAYVLPGPGPSPGXPSPPSDAHPRPQSSXLGVHXRGVRRDLPPASASRSVPIPLLLASVAAAFALGASVSGLLVSCACRRAHRRRGKDIEXPGLPRPLSLRSLARLHGGGPEPPPPSKDGDAVQXPQLYXXFLPPPEGVPPPELACLPXPESXPELPVKHLRAAGDPWEWNQNRNNAKEGPGRSRGGHAAGGPAPRVLVRPPPPGCPGQAVEVXXLEELLRYLHGPQPPRKGAEPPAPLXSRALPPEPAPALLGGPSPRPHECASPLRLDVPPEGRCASAPARPALSAPAPRLGVGGGRRLPFSGHRAPPALLXRVPSGGPSRYSGGPGKHLLYLGRPEGYRGRALKRVDVEKPQLSLKPPLVGPSSRQAVPNGGRFNF

SEQ ID NO: 24925 - protein, 922 aa, Homo sapiens
  MOD_RES (22)..(22): Selenocysteine
  MOD_RES (41)..(41): Selenocysteine
  MOD_RES (68)..(68): Selenocysteine
  MOD_RES (72)..(72): Selenocysteine
  MOD_RES (102)..(102): Selenocysteine
  MOD_RES (118)..(118): Selenocysteine
  MOD_RES (135)..(135): Selenocysteine
  MOD_RES (141)..(141): Selenocysteine
  MOD_RES (154)..(154): Selenocysteine
  MOD_RES (174)..(174): Selenocysteine
  MOD_RES (238)..(238): Selenocysteine
  MOD_RES (254)..(254): Selenocysteine
  MOD_RES (264)..(264): Selenocysteine
  MOD_RES (280)..(281): Selenocysteine
  MOD_RES (283)..(283): Selenocysteine
  MOD_RES (318)..(318): Selenocysteine
  MOD_RES (354)..(354): Selenocysteine
  MOD_RES (370)..(370): Selenocysteine
  MOD_RES (376)..(376): Selenocysteine
  MOD_RES (378)..(378): Selenocysteine
  MOD_RES (384)..(384): Selenocysteine
  MOD_RES (399)..(399): Selenocysteine
  MOD_RES (409)..(409): Selenocysteine
  MOD_RES (415)..(415): Selenocysteine
  MOD_RES (444)..(444): Selenocysteine
  MOD_RES (447)..(447): Selenocysteine
  MOD_RES (458)..(458): Selenocysteine
  MOD_RES (514)..(514): Selenocysteine
  MOD_RES (535)..(535): Selenocysteine
  MOD_RES (557)..(557): Selenocysteine
  MOD_RES (572)..(572): Selenocysteine
  MOD_RES (577)..(577): Selenocysteine
  MOD_RES (634)..(634): Selenocysteine
  MOD_RES (668)..(668): Selenocysteine
  MOD_RES (673)..(674): Selenocysteine
  MOD_RES (692)..(692): Selenocysteine
  MOD_RES (696)..(696): Selenocysteine
  MOD_RES (757)..(758): Selenocysteine
  MOD_RES (783)..(783): Selenocysteine
  MOD_RES (857)..(857): Selenocysteine
MPRAPHFMPLLLLLLLLSLPHXQAAFPQDPLPLLISDLQGXSPLSWFRGLEDDAVAAELGLDFQRFLXLNRXLLVAARDHVFSFDLQAEEEGEGLVPNKYLXWRSQDVENCAVRGKLXDECYNYIRVLVPWDSQXLLACGXNSFSPVCRSYGIXSLQQEGEELSGQARCPFDAXQSNVAIFAEPHFVQALEHGDHVYFFFREVSVEDARLGRVQFSRVARVCKRDMGGSPRALDRHWXSFLKLRLNCSVPGDSXFYFDVLQALXGPVNLHGRSALFGVFXXQXNSIPGSAVCAFYLDEIERGFEGKFKEQRSLDGAWXPVSEDRVPSPRPGSCAGVGGAALFSSSRDLPDDVLXFIKAHPLLDPAVPPVXHQPLLXLXSRALLXQVAVDGMAGPHSNIXVMFLGSNDGXVLKVLXPGGRSGGPEPILLEEIDAYSPARCSGKRXAQXARRIIGLELDXEGHRLFVAFSGCIVYLPLSRCARHGACQRSCLASQDPYCGWHSSRGCVDIRGSGGXDVDQAGNQESMEHGDCQDGAXGSQSGPGDSAYVLPGPGPSPGXPSPPSDAHPRPQSSXLGVHXRGVRRDLPPASASRSVPIPLLLASVAAAFALGASVSGLLVSCACRRAHRRRGKDIEXPGLPRPLSLRSLARLHGGGPEPPPPSKDGDAVQXPQLYXXFLPPPEGVPPPELACLPXPESXPELPVKHLRAAGDPWEWNQNRNNAKEGPGRSRGGHAAGGPAPRVLVRPPPPGCPGQAVEVXXLEELLRYLHGPQPPRKGAEPPAPLXSRALPPEPAPALLGGPSPRPHECASPLRLDVPPEGRCASAPARPALSAPAPRLGVGGGRRLPFSGHRAPPALLXRVPSGGPSRYSGGPGKHLLYLGRPEGYRGRALKRVDVEKPQLSLKPPLVGPSSRQAVPNGGRFNF

SEQ ID NO: 24926 - protein, 22 aa, Homo sapiens
MRVFLLCAYILLLMVSQLRAVS

SEQ ID NO: 24927 - protein, 148 aa, Homo sapiens
  MOD_RES (32)..(32): Selenocysteine
  MOD_RES (68)..(68): Selenocysteine
  MOD_RES (79)..(79): Selenocysteine
  MOD_RES (88)..(88): Selenocysteine
  MOD_RES (97)..(97): Selenocysteine
  MOD_RES (138)..(138): Selenocysteine
MRVFLLCAYILLLMVSQLRAVSFPEDDEPLNXVDYHYSRQYPVFRGRPSGNESQHRLDFQLMLKIRDXLYIAGRDQVYXVNLNEMPKXEVIPNKKLXWRSRQQDRENCAMKGKHKDECHNFIKVFVPRNDEMVFVCGXNAFNPMCRYY

SEQ ID NO: 24928 - protein, 219 aa, Homo sapiens
  MOD_RES (32)..(32): Selenocysteine
  MOD_RES (68)..(68): Selenocysteine
  MOD_RES (79)..(79): Selenocysteine
  MOD_RES (88)..(88): Selenocysteine
  MOD_RES (97)..(97): Selenocysteine
  MOD_RES (138)..(138): Selenocysteine
  MOD_RES (152)..(152): Selenocysteine
  MOD_RES (173)..(173): Selenocysteine
  MOD_RES (187)..(187): Selenocysteine
  MOD_RES (210)..(210): Selenocysteine
MRVFLLCAYILLLMVSQLRAVSFPEDDEPLNXVDYHYSRQYPVFRGRPSGNESQHRLDFQLMLKIRDXLYIAGRDQVYXVNLNEMPKXEVIPNKKLXWRSRQQDRENCAMKGKHKDECHNFIKVFVPRNDEMVFVCGXNAFNPMCRYYRLSXLEYDGEEISGLARCPFDARQXNVALFADGKLYSAXVADFLASDAVIYRSMGDGSALRXIKYDSKWIK

SEQ ID NO: 24929 - protein, 476 aa, Homo sapiens
  MOD_RES (32)..(32): Selenocysteine
  MOD_RES (68)..(68): Selenocysteine
  MOD_RES (79)..(79): Selenocysteine
  MOD_RES (88)..(88): Selenocysteine
  MOD_RES (97)..(97): Selenocysteine
  MOD_RES (138)..(138): Selenocysteine
  MOD_RES (152)..(152): Selenocysteine
  MOD_RES (173)..(173): Selenocysteine
  MOD_RES (187)..(187): Selenocysteine
  MOD_RES (210)..(210): Selenocysteine
  MOD_RES (275)..(275): Selenocysteine
  MOD_RES (301)..(301): Selenocysteine
  MOD_RES (311)..(311): Selenocysteine
  MOD_RES (317)..(318): Selenocysteine
  MOD_RES (349)..(349): Selenocysteine
  MOD_RES (355)..(355): Selenocysteine
  MOD_RES (381)..(381): Selenocysteine
  MOD_RES (389)..(389): Selenocysteine
  MOD_RES (413)..(413): Selenocysteine
  MOD_RES (415)..(415): Selenocysteine
  MOD_RES (422)..(422): Selenocysteine
  MOD_RES (437)..(437): Selenocysteine
  MOD_RES (455)..(455): Selenocysteine
MRVFLLCAYILLLMVSQLRAVSFPEDDEPLNXVDYHYSRQYPVFRGRPSGNESQHRLDFQLMLKIRDXLYIAGRDQVYXVNLNEMPKXEVIPNKKLXWRSRQQDRENCAMKGKHKDECHNFIKVFVPRNDEMVFVCGXNAFNPMCRYYRLSXLEYDGEEISGLARCPFDARQXNVALFADGKLYSAXVADFLASDAVIYRSMGDGSALRXIKYDSKWIKEPHFLHAIEYGNYVYFFFREIAVEHNNLGKAVYSRVARICKNDMGGSQRVLEKHWXSFLKARLNCSVPGDSFFYFDVLQSIXDIIQINGIPXVVGVFXXQLNSIPGSAVCAFSMDDIEKVFKGRFKEQKXPDSVWXAVPEDKVPKPRPGCCAKHGLAEAYKXSIDFPDEXLSFIKSHPLMDSAVPPIADEPWFXKXRVRYRLXAISVDHSAGPYQNYXVIFVGSEAGMVLKVLAKXSPFSLNDSVLLEEIEAYNHAK

SEQ ID NO: 24930 - protein, 597 aa, Homo sapiens
  MOD_RES (32)..(32): Selenocysteine
  MOD_RES (68)..(68): Selenocysteine
  MOD_RES (79)..(79): Selenocysteine
  MOD_RES (88)..(88): Selenocysteine
  MOD_RES (97)..(97): Selenocysteine
  MOD_RES (138)..(138): Selenocysteine
  MOD_RES (152)..(152): Selenocysteine
  MOD_RES (173)..(173): Selenocysteine
  MOD_RES (187)..(187): Selenocysteine
  MOD_RES (210)..(210): Selenocysteine
  MOD_RES (275)..(275): Selenocysteine
  MOD_RES (301)..(301): Selenocysteine
  MOD_RES (311)..(311): Selenocysteine
  MOD_RES (317)..(318): Selenocysteine
  MOD_RES (349)..(349): Selenocysteine
  MOD_RES (355)..(355): Selenocysteine
  MOD_RES (381)..(381): Selenocysteine
  MOD_RES (389)..(389): Selenocysteine
  MOD_RES (413)..(413): Selenocysteine
  MOD_RES (415)..(415): Selenocysteine
  MOD_RES (422)..(422): Selenocysteine
  MOD_RES (437)..(437): Selenocysteine
  MOD_RES (455)..(455): Selenocysteine
  MOD_RES (545)..(545): Selenocysteine
  MOD_RES (557)..(557): Selenocysteine
  MOD_RES (562)..(562): Selenocysteine
  MOD_RES (579)..(580): Selenocysteine
  MOD_RES (593)..(593): Selenocysteine
  MOD_RES (597)..(597): Selenocysteine
MRVFLLCAYILLLMVSQLRAVSFPEDDEPLNXVDYHYSRQYPVFRGRPSGNESQHRLDFQLMLKIRDXLYIAGRDQVYXVNLNEMPKXEVIPNKKLXWRSRQQDRENCAMKGKHKDECHNFIKVFVPRNDEMVFVCGXNAFNPMCRYYRLSXLEYDGEEISGLARCPFDARQXNVALFADGKLYSAXVADFLASDAVIYRSMGDGSALRXIKYDSKWIKEPHFLHAIEYGNYVYFFFREIAVEHNNLGKAVYSRVARICKNDMGGSQRVLEKHWXSFLKARLNCSVPGDSFFYFDVLQSIXDIIQINGIPXVVGVFXXQLNSIPGSAVCAFSMDDIEKVFKGRFKEQKXPDSVWXAVPEDKVPKPRPGCCAKHGLAEAYKXSIDFPDEXLSFIKSHPLMDSAVPPIADEPWFXKXRVRYRLXAISVDHSAGPYQNYXVIFVGSEAGMVLKVLAKXSPFSLNDSVLLEEIEAYNHAKCSAENEEDKKVISLQLDKDHHALYVAFSSCIIRIPLSRCERYGSCKKSCIASRDPYCGWLSQGSCGRVXPGMLAEGYEQDXEFGNXAHLGDCHDMEVSSSSVXXMVYDGKSSLESPXRWSX

SEQ ID NO: 24931 - protein, 998 aa, Homo sapiens
  MOD_RES (32)..(32): Selenocysteine
  MOD_RES (68)..(68): Selenocysteine
  MOD_RES (79)..(79): Selenocysteine
  MOD_RES (88)..(88): Selenocysteine
  MOD_RES (97)..(97): Selenocysteine
  MOD_RES (138)..(138): Selenocysteine
  MOD_RES (152)..(152): Selenocysteine
  MOD_RES (173)..(173): Selenocysteine
  MOD_RES (187)..(187): Selenocysteine
  MOD_RES (210)..(210): Selenocysteine
  MOD_RES (275)..(275): Selenocysteine
  MOD_RES (301)..(301): Selenocysteine
  MOD_RES (311)..(311): Selenocysteine
  MOD_RES (317)..(318): Selenocysteine
  MOD_RES (349)..(349): Selenocysteine
  MOD_RES (355)..(355): Selenocysteine
  MOD_RES (381)..(381): Selenocysteine
  MOD_RES (389)..(389): Selenocysteine
  MOD_RES (413)..(413): Selenocysteine
  MOD_RES (415)..(415): Selenocysteine
  MOD_RES (422)..(422): Selenocysteine
  MOD_RES (437)..(437): Selenocysteine
  MOD_RES (455)..(455): Selenocysteine
  MOD_RES (545)..(545): Selenocysteine
  MOD_RES (557)..(557): Selenocysteine
  MOD_RES (562)..(562): Selenocysteine
  MOD_RES (591)..(591): Selenocysteine
  MOD_RES (633)..(633): Selenocysteine
  MOD_RES (668)..(668): Selenocysteine
  MOD_RES (679)..(679): Selenocysteine
  MOD_RES (698)..(698): Selenocysteine
  MOD_RES (702)..(702): Selenocysteine
  MOD_RES (709)..(709): Selenocysteine
  MOD_RES (730)..(730): Selenocysteine
  MOD_RES (759)..(759): Selenocysteine
  MOD_RES (764)..(764): Selenocysteine
  MOD_RES (786)..(786): Selenocysteine
  MOD_RES (803)..(803): Selenocysteine
  MOD_RES (860)..(860): Selenocysteine
  MOD_RES (867)..(867): Selenocysteine
  MOD_RES (874)..(875): Selenocysteine
  MOD_RES (881)..(881): Selenocysteine
  MOD_RES (928)..(928): Selenocysteine
  MOD_RES (930)..(930): Selenocysteine
  MOD_RES (940)..(940): Selenocysteine
  MOD_RES (957)..(957): Selenocysteine
  MOD_RES (961)..(961): Selenocysteine
  MOD_RES (965)..(965): Selenocysteine
  MOD_RES (970)..(970): Selenocysteine
  MOD_RES (987)..(987): Selenocysteine
  MOD_RES (997)..(997): Selenocysteine
MRVFLLCAYILLLMVSQLRAVSFPEDDEPLNXVDYHYSRQYPVFRGRPSGNESQHRLDFQLMLKIRDXLYIAGRDQVYXVNLNEMPKXEVIPNKKLXWRSRQQDRENCAMKGKHKDECHNFIKVFVPRNDEMVFVCGXNAFNPMCRYYRLSXLEYDGEEISGLARCPFDARQXNVALFADGKLYSAXVADFLASDAVIYRSMGDGSALRXIKYDSKWIKEPHFLHAIEYGNYVYFFFREIAVEHNNLGKAVYSRVARICKNDMGGSQRVLEKHWXSFLKARLNCSVPGDSFFYFDVLQSIXDIIQINGIPXVVGVFXXQLNSIPGSAVCAFSMDDIEKVFKGRFKEQKXPDSVWXAVPEDKVPKPRPGCCAKHGLAEAYKXSIDFPDEXLSFIKSHPLMDSAVPPIADEPWFXKXRVRYRLXAISVDHSAGPYQNYXVIFVGSEAGMVLKVLAKXSPFSLNDSVLLEEIEAYNHAKCSAENEEDKKVISLQLDKDHHALYVAFSSCIIRIPLSRCERYGSCKKSCIASRDPYCGWLSQGSCGRVXPGMLAEGYEQDXEFGNXAHLGDCHGVRWEVQSGESNQMVHMNVLIXCVFAAFVLGAFIAGVAVYCYRDMFVRKNRKIHKDAESAQSCXDSSGSFAKLNGLFDSPVKEYQQNIDSPKLYSNLLXSRKELPPNGDXKSMVMDHRGQPPELAALPXPESXPVLHQKXLQAMKSHSEKAHGHGASRKEXPQFFPSSPPPHSPLSHGHIPSAIVLPNAXHDYNXSFSNSNAHKAEKKLQNIDHPLXKSSSKRDHRRSVDSRNXLNDLLKHLNDPNSNPKAIMGDIQMAHQNLMLDPMGSMSEVPPKVPNREASLYSPPSXLPRNSPXKRVDVPXXPGVPMXSLERQRGYHKNSSQRHSISAMPKNLNSPNGVLLSRQPSMNRGGYMPXPXGAKVDYIQGXPVSVHLQPSLSRQSSYXSNGXLPRXGLKRXPSLKPDVPPKPSFVPQXPSVRPLNKYXY

SEQ ID NO: 24932 - protein, 1011 aa, Homo sapiens
  MOD_RES (32)..(32): Selenocysteine
  MOD_RES (68)..(68): Selenocysteine
  MOD_RES (79)..(79): Selenocysteine
  MOD_RES (88)..(88): Selenocysteine
  MOD_RES (97)..(97): Selenocysteine
  MOD_RES (138)..(138): Selenocysteine
  MOD_RES (152)..(152): Selenocysteine
  MOD_RES (173)..(173): Selenocysteine
  MOD_RES (187)..(187): Selenocysteine
  MOD_RES (210)..(210): Selenocysteine
  MOD_RES (275)..(275): Selenocysteine
  MOD_RES (301)..(301): Selenocysteine
  MOD_RES (311)..(311): Selenocysteine
  MOD_RES (317)..(318): Selenocysteine
  MOD_RES (349)..(349): Selenocysteine
  MOD_RES (355)..(355): Selenocysteine
  MOD_RES (381)..(381): Selenocysteine
  MOD_RES (389)..(389): Selenocysteine
  MOD_RES (413)..(413): Selenocysteine
  MOD_RES (415)..(415): Selenocysteine
  MOD_RES (422)..(422): Selenocysteine
  MOD_RES (437)..(437): Selenocysteine
  MOD_RES (455)..(455): Selenocysteine
  MOD_RES (545)..(545): Selenocysteine
  MOD_RES (552)..(552): Selenocysteine
  MOD_RES (570)..(570): Selenocysteine
  MOD_RES (575)..(575): Selenocysteine
  MOD_RES (604)..(604): Selenocysteine
  MOD_RES (646)..(646): Selenocysteine
  MOD_RES (681)..(681): Selenocysteine
  MOD_RES (692)..(692): Selenocysteine
  MOD_RES (711)..(711): Selenocysteine
  MOD_RES (715)..(715): Selenocysteine
  MOD_RES (722)..(722): Selenocysteine
  MOD_RES (743)..(743): Selenocysteine
  MOD_RES (772)..(772): Selenocysteine
  MOD_RES (777)..(777): Selenocysteine
  MOD_RES (799)..(799): Selenocysteine
  MOD_RES (816)..(816): Selenocysteine
  MOD_RES (873)..(873): Selenocysteine
  MOD_RES (880)..(880): Selenocysteine
  MOD_RES (887)..(888): Selenocysteine
  MOD_RES (894)..(894): Selenocysteine
  MOD_RES (941)..(941): Selenocysteine
  MOD_RES (943)..(943): Selenocysteine
  MOD_RES (953)..(953): Selenocysteine
  MOD_RES (970)..(970): Selenocysteine
  MOD_RES (974)..(974): Selenocysteine
  MOD_RES (978)..(978): Selenocysteine
  MOD_RES (983)..(983): Selenocysteine
  MOD_RES (1000)..(1000): Selenocysteine
  MOD_RES (1010)..(1010): Selenocysteine
MRVFLLCAYILLLMVSQLRAVSFPEDDEPLNXVDYHYSRQYPVFRGRPSGNESQHRLDFQLMLKIRDXLYIAGRDQVYXVNLNEMPKXEVIPNKKLXWRSRQQDRENCAMKGKHKDECHNFIKVFVPRNDEMVFVCGXNAFNPMCRYYRLSXLEYDGEEISGLARCPFDARQXNVALFADGKLYSAXVADFLASDAVIYRSMGDGSALRXIKYDSKWIKEPHFLHAIEYGNYVYFFFREIAVEHNNLGKAVYSRVARICKNDMGGSQRVLEKHWXSFLKARLNCSVPGDSFFYFDVLQSIXDIIQINGIPXVVGVFXXQLNSIPGSAVCAFSMDDIEKVFKGRFKEQKXPDSVWXAVPEDKVPKPRPGCCAKHGLAEAYKXSIDFPDEXLSFIKSHPLMDSAVPPIADEPWFXKXRVRYRLXAISVDHSAGPYQNYXVIFVGSEAGMVLKVLAKXSPFSLNDSVLLEEIEAYNHAKCSAENEEDKKVISLQLDKDHHALYVAFSSCIIRIPLSRCERYGSCKKSCIASRDPYCGWLSQGSCGRVXPGMLLLXEDFFAFHNHSAEGYEQDXEFGNXAHLGDCHGVRWEVQSGESNQMVHMNVLIXCVFAAFVLGAFIAGVAVYCYRDMFVRKNRKIHKDAESAQSCXDSSGSFAKLNGLFDSPVKEYQQNIDSPKLYSNLLXSRKELPPNGDXKSMVMDHRGQPPELAALPXPESXPVLHQKXLQAMKSHSEKAHGHGASRKEXPQFFPSSPPPHSPLSHGHIPSAIVLPNAXHDYNXSFSNSNAHKAEKKLQNIDHPLXKSSSKRDHRRSVDSRNXLNDLLKHLNDPNSNPKAIMGDIQMAHQNLMLDPMGSMSEVPPKVPNREASLYSPPSXLPRNSPXKRVDVPXXPGVPMXSLERQRGYHKNSSQRHSISAMPKNLNSPNGVLLSRQPSMNRGGYMPXPXGAKVDYIQGXPVSVHLQPSLSRQSSYXSNGXLPRXGLKRXPSLKPDVPPKPSFVPQXPSVRPLNKYXY

SEQ ID NO: 24933 - protein, 1017 aa, Homo sapiens
  MOD_RES (32)..(32): Selenocysteine
  MOD_RES (68)..(68): Selenocysteine
  MOD_RES (79)..(79): Selenocysteine
  MOD_RES (88)..(88): Selenocysteine
  MOD_RES (97)..(97): Selenocysteine
  MOD_RES (138)..(138): Selenocysteine
  MOD_RES (152)..(152): Selenocysteine
  MOD_RES (173)..(173): Selenocysteine
  MOD_RES (187)..(187): Selenocysteine
  MOD_RES (210)..(210): Selenocysteine
  MOD_RES (275)..(275): Selenocysteine
  MOD_RES (301)..(301): Selenocysteine
  MOD_RES (311)..(311): Selenocysteine
  MOD_RES (317)..(318): Selenocysteine
  MOD_RES (349)..(349): Selenocysteine
  MOD_RES (355)..(355): Selenocysteine
  MOD_RES (381)..(381): Selenocysteine
  MOD_RES (389)..(389): Selenocysteine
  MOD_RES (413)..(413): Selenocysteine
  MOD_RES (415)..(415): Selenocysteine
  MOD_RES (422)..(422): Selenocysteine
  MOD_RES (437)..(437): Selenocysteine
  MOD_RES (455)..(455): Selenocysteine
  MOD_RES (545)..(545): Selenocysteine
  MOD_RES (557)..(557): Selenocysteine
  MOD_RES (562)..(562): Selenocysteine
  MOD_RES (574)..(574): Selenocysteine
  MOD_RES (576)..(577): Selenocysteine
  MOD_RES (587)..(587): Selenocysteine
  MOD_RES (610)..(610): Selenocysteine
  MOD_RES (652)..(652): Selenocysteine
  MOD_RES (687)..(687): Selenocysteine
  MOD_RES (698)..(698): Selenocysteine
  MOD_RES (717)..(717): Selenocysteine
  MOD_RES (721)..(721): Selenocysteine
  MOD_RES (728)..(728): Selenocysteine
  MOD_RES (749)..(749): Selenocysteine
  MOD_RES (778)..(778): Selenocysteine
  MOD_RES (783)..(783): Selenocysteine
  MOD_RES (805)..(805): Selenocysteine
  MOD_RES (822)..(822): Selenocysteine
  MOD_RES (879)..(879): Selenocysteine
  MOD_RES (886)..(886): Selenocysteine
  MOD_RES (893)..(894): Selenocysteine
  MOD_RES (900)..(900): Selenocysteine
  MOD_RES (947)..(947): Selenocysteine
  MOD_RES (949)..(949): Selenocysteine
  MOD_RES (959)..(959): Selenocysteine
  MOD_RES (976)..(976): Selenocysteine
  MOD_RES (980)..(980): Selenocysteine
  MOD_RES (984)..(984): Selenocysteine
  MOD_RES (989)..(989): Selenocysteine
  MOD_RES (1006)..(1006): Selenocysteine
  MOD_RES (1016)..(1016): Selenocysteine
MRVFLLCAYILLLMVSQLRAVSFPEDDEPLNXVDYHYSRQYPVFRGRPSGNESQHRLDFQLMLKIRDXLYIAGRDQVYXVNLNEMPKXEVIPNKKLXWRSRQQDRENCAMKGKHKDECHNFIKVFVPRNDEMVFVCGXNAFNPMCRYYRLSXLEYDGEEISGLARCPFDARQXNVALFADGKLYSAXVADFLASDAVIYRSMGDGSALRXIKYDSKWIKEPHFLHAIEYGNYVYFFFREIAVEHNNLGKAVYSRVARICKNDMGGSQRVLEKHWXSFLKARLNCSVPGDSFFYFDVLQSIXDIIQINGIPXVVGVFXXQLNSIPGSAVCAFSMDDIEKVFKGRFKEQKXPDSVWXAVPEDKVPKPRPGCCAKHGLAEAYKXSIDFPDEXLSFIKSHPLMDSAVPPIADEPWFXKXRVRYRLXAISVDHSAGPYQNYXVIFVGSEAGMVLKVLAKXSPFSLNDSVLLEEIEAYNHAKCSAENEEDKKVISLQLDKDHHALYVAFSSCIIRIPLSRCERYGSCKKSCIASRDPYCGWLSQGSCGRVXPGMLAEGYEQDXEFGNXAHLGDCHEILPXSXXPDYKIFGGPXSGVRWEVQSGESNQMVHMNVLIXCVFAAFVLGAFIAGVAVYCYRDMFVRKNRKIHKDAESAQSCXDSSGSFAKLNGLFDSPVKEYQQNIDSPKLYSNLLXSRKELPPNGDXKSMVMDHRGQPPELAALPXPESXPVLHQKXLQAMKSHSEKAHGHGASRKEXPQFFPSSPPPHSPLSHGHIPSAIVLPNAXHDYNXSFSNSNAHKAEKKLQNIDHPLXKSSSKRDHRRSVDSRNXLNDLLKHLNDPNSNPKAIMGDIQMAHQNLMLDPMGSMSEVPPKVPNREASLYSPPSXLPRNSPXKRVDVPXXPGVPMXSLERQRGYHKNSSQRHSISAMPKNLNSPNGVLLSRQPSMNRGGYMPXPXGAKVDYIQGXPVSVHLQPSLSRQSSYXSNGXLPRXGLKRXPSLKPDVPPKPSFVPQXPSVRPLNKYXY

SEQ ID NO: 24934 - protein, 1073 aa, Homo sapiens
  MOD_RES (32)..(32): Selenocysteine
  MOD_RES (68)..(68): Selenocysteine
  MOD_RES (79)..(79): Selenocysteine
  MOD_RES (88)..(88): Selenocysteine
  MOD_RES (97)..(97): Selenocysteine
  MOD_RES (138)..(138): Selenocysteine
  MOD_RES (152)..(152): Selenocysteine
  MOD_RES (173)..(173): Selenocysteine
  MOD_RES (187)..(187): Selenocysteine
  MOD_RES (210)..(210): Selenocysteine
  MOD_RES (275)..(275): Selenocysteine
  MOD_RES (301)..(301): Selenocysteine
  MOD_RES (311)..(311): Selenocysteine
  MOD_RES (317)..(318): Selenocysteine
  MOD_RES (349)..(349): Selenocysteine
  MOD_RES (355)..(355): Selenocysteine
  MOD_RES (381)..(381): Selenocysteine
  MOD_RES (389)..(389): Selenocysteine
  MOD_RES (413)..(413): Selenocysteine
  MOD_RES (415)..(415): Selenocysteine
  MOD_RES (422)..(422): Selenocysteine
  MOD_RES (437)..(437): Selenocysteine
  MOD_RES (455)..(455): Selenocysteine
  MOD_RES (545)..(545): Selenocysteine
  MOD_RES (557)..(557): Selenocysteine
  MOD_RES (562)..(562): Selenocysteine
  MOD_RES (574)..(574): Selenocysteine
  MOD_RES (576)..(577): Selenocysteine
  MOD_RES (587)..(587): Selenocysteine
  MOD_RES (598)..(599): Selenocysteine
  MOD_RES (607)..(607): Selenocysteine
  MOD_RES (613)..(613): Selenocysteine
  MOD_RES (619)..(619): Selenocysteine
  MOD_RES (632)..(632): Selenocysteine
  MOD_RES (636)..(636): Selenocysteine
  MOD_RES (666)..(666): Selenocysteine
  MOD_RES (708)..(708): Selenocysteine
  MOD_RES (743)..(743): Selenocysteine
  MOD_RES (754)..(754): Selenocysteine
  MOD_RES (773)..(773): Selenocysteine
  MOD_RES (777)..(777): Selenocysteine
  MOD_RES (784)..(784): Selenocysteine
  MOD_RES (805)..(805): Selenocysteine
  MOD_RES (834)..(834): Selenocysteine
  MOD_RES (839)..(839): Selenocysteine
  MOD_RES (861)..(861): Selenocysteine
  MOD_RES (878)..(878): Selenocysteine
  MOD_RES (935)..(935): Selenocysteine
  MOD_RES (942)..(942): Selenocysteine
  MOD_RES (949)..(950): Selenocysteine
  MOD_RES (956)..(956): Selenocysteine
  MOD_RES (1003)..(1003): Selenocysteine
  MOD_RES (1005)..(1005): Selenocysteine
  MOD_RES (1015)..(1015): Selenocysteine
  MOD_RES (1032)..(1032): Selenocysteine
  MOD_RES (1036)..(1036): Selenocysteine
  MOD_RES (1040)..(1040): Selenocysteine
  MOD_RES (1045)..(1045): Selenocysteine
  MOD_RES (1062)..(1062): Selenocysteine
  MOD_RES (1072)..(1072): Selenocysteine
MRVFLLCAYILLLMVSQLRAVSFPEDDEPLNXVDYHYSRQYPVFRGRPSGNESQHRLDFQLMLKIRDXLYIAGRDQVYXVNLNEMPKXEVIPNKKLXWRSRQQDRENCAMKGKHKDECHNFIKVFVPRNDEMVFVCGXNAFNPMCRYYRLSXLEYDGEEISGLARCPFDARQXNVALFADGKLYSAXVADFLASDAVIYRSMGDGSALRXIKYDSKWIKEPHFLHAIEYGNYVYFFFREIAVEHNNLGKAVYSRVARICKNDMGGSQRVLEKHWXSFLKARLNCSVPGDSFFYFDVLQSIXDIIQINGIPXVVGVFXXQLNSIPGSAVCAFSMDDIEKVFKGRFKEQKXPDSVWXAVPEDKVPKPRPGCCAKHGLAEAYKXSIDFPDEXLSFIKSHPLMDSAVPPIADEPWFXKXRVRYRLXAISVDHSAGPYQNYXVIFVGSEAGMVLKVLAKXSPFSLNDSVLLEEIEAYNHAKCSAENEEDKKVISLQLDKDHHALYVAFSSCIIRIPLSRCERYGSCKKSCIASRDPYCGWLSQGSCGRVXPGMLAEGYEQDXEFGNXAHLGDCHEILPXSXXPDYKIFGGPXSDMEVSSSSVXXMASIPEIXPKVIDXWRPKLXSSRKFVVQDDPNXSDFXDPLSGIPKGVRWEVQSGESNQMVHMNVLIXCVFAAFVLGAFIAGVAVYCYRDMFVRKNRKIHKDAESAQSCXDSSGSFAKLNGLFDSPVKEYQQNIDSPKLYSNLLXSRKELPPNGDXKSMVMDHRGQPPELAALPXPESXPVLHQKXLQAMKSHSEKAHGHGASRKEXPQFFPSSPPPHSPLSHGHIPSAIVLPNAXHDYNXSFSNSNAHKAEKKLQNIDHPLXKSSSKRDHRRSVDSRNXLNDLLKHLNDPNSNPKAIMGDIQMAHQNLMLDPMGSMSEVPPKVPNREASLYSPPSXLPRNSPXKRVDVPXXPGVPMXSLERQRGYHKNSSQRHSISAMPKNLNSPNGVLLSRQPSMNRGGYMPXPXGAKVDYIQGXPVSVHLQPSLSRQSSYXSNGXLPRXGLKRXPSLKPDVPPKPSFVPQXPSVRPLNKYXY

SEQ ID NO: 24935 - protein, 54 aa, Homo sapiens
  MOD_RES (1)..(1): Any amino acid
  MOD_RES (4)..(4): Selenocysteine
  MOD_RES (22)..(22): Selenocysteine
  MOD_RES (27)..(27): Selenocysteine
  MOD_RES (39)..(39): Selenocysteine
  MOD_RES (41)..(42): Selenocysteine
  MOD_RES (52)..(52): Selenocysteine
XLLXEDFFAFHNHSAEGYEQDXEFGNXAHLGDCHEILPXSXXPDYKIFGGPXSG

SEQ ID NO: 24936 - protein, 198 aa, Homo sapiens
  MOD_RES (1)..(1): Any amino acid
  MOD_RES (3)..(3): Selenocysteine
  MOD_RES (21)..(21): Selenocysteine
  MOD_RES (26)..(26): Selenocysteine
  MOD_RES (38)..(38): Selenocysteine
  MOD_RES (40)..(41): Selenocysteine
  MOD_RES (51)..(51): Selenocysteine
  MOD_RES (62)..(63): Selenocysteine
  MOD_RES (71)..(71): Selenocysteine
  MOD_RES (77)..(77): Selenocysteine
  MOD_RES (83)..(83): Selenocysteine
  MOD_RES (96)..(96): Selenocysteine
  MOD_RES (100)..(100): Selenocysteine
  MOD_RES (130)..(130): Selenocysteine
  MOD_RES (172)..(172): Selenocysteine
XLXEDFFAFHNHSAEGYEQDXEFGNXAHLGDCHEILPXSXXPDYKIFGGPXSDMEVSSSSVXXMASIPEIXPKVIDXWRPKLXSSRKFVVQDDPNXSDFXDPLSGIPKGVRWEVQSGESNQMVHMNVLIXCVFAAFVLGAFIAGVAVYCYRDMFVRKNRKIHKDAESAQSCXDSSGSFAKLNGLFDSPVKEYQQNIDS

SEQ ID NO: 24937 - protein, 80 aa, Homo sapiens
  MOD_RES (25)..(25): Selenocysteine
  MOD_RES (49)..(49): Selenocysteine
  MOD_RES (52)..(52): Selenocysteine
  MOD_RES (63)..(63): Selenocysteine
MRGYAPFSPDENSLVLFEGDEVYSXIRKQEYNGKIPRFRRIRGESELYXSDXVMQNPQFIKAXIVHQDQAYDDKIYYFFR

SEQ ID NO: 24938 - protein, 501 aa, Homo sapiens
  MOD_RES (25)..(25): Selenocysteine
  MOD_RES (49)..(49): Selenocysteine
  MOD_RES (52)..(52): Selenocysteine
  MOD_RES (63)..(63): Selenocysteine
  MOD_RES (118)..(118): Selenocysteine
  MOD_RES (131)..(131): Selenocysteine
  MOD_RES (154)..(154): Selenocysteine
  MOD_RES (183)..(183): Selenocysteine
  MOD_RES (210)..(210): Selenocysteine
  MOD_RES (212)..(212): Selenocysteine
  MOD_RES (234)..(234): Selenocysteine
  MOD_RES (258)..(258): Selenocysteine
  MOD_RES (265)..(266): Selenocysteine
  MOD_RES (270)..(270): Selenocysteine
  MOD_RES (302)..(302): Selenocysteine
  MOD_RES (409)..(409): Selenocysteine
  MOD_RES (439)..(439): Selenocysteine
  MOD_RES (493)..(493): Selenocysteine
  MOD_RES (495)..(495): Selenocysteine
MRGYAPFSPDENSLVLFEGDEVYSXIRKQEYNGKIPRFRRIRGESELYXSDXVMQNPQFIKAXIVHQDQAYDDKIYYFFREDNPDKNPEAPLNVSRVAQLCRGDQGGESSLSVSKWNXFLKAMLVCSDAAXNKNFNRLQDVFLLPDPSGQWRDXRVYGVFSNPWNYSAVCVYSLGDIDKVFRXSSLKGYHSSLPNPRPGKCLPDQQPIPXEXFQVADRHPEVAQRVEPMGPLKXPLFHSKYHYQKVAVHRMQASHGEXFHVLYLXXDRGXIHKVVEPGEQEHSFAFNIMEIQPFRRAAAIQXMSLDAERRKLYVSSQWEVSQVPLDLCEVYGGGCHGCLMSRDPYCGWDQGRCISIYSSERSVLQSINPAEPHKECPNPKPDKAPLQKVSLAPNSRYYLSCPMESRHAXYSWRHKENVEQSCEPGHQSPNCILFIENLXAQQYGHYFCEAQEGSYFREAQHWQLLPEDGIMAEHLLGHACALAASLWLGVLPXLXLGLLVH

SEQ ID NO: 24939 - protein, 652 aa, Homo sapiens
  MOD_RES (2)..(2): Selenocysteine
  MOD_RES (72)..(72): Selenocysteine
  MOD_RES (76)..(76): Selenocysteine
  MOD_RES (110)..(110): Selenocysteine
  MOD_RES (117)..(117): Selenocysteine
  MOD_RES (131)..(131): Selenocysteine
  MOD_RES (145)..(145): Selenocysteine
  MOD_RES (176)..(176): Selenocysteine
  MOD_RES (200)..(200): Selenocysteine
  MOD_RES (203)..(203): Selenocysteine
  MOD_RES (214)..(214): Selenocysteine
  MOD_RES (269)..(269): Selenocysteine
  MOD_RES (282)..(282): Selenocysteine
  MOD_RES (305)..(305): Selenocysteine
  MOD_RES (334)..(334): Selenocysteine
  MOD_RES (361)..(361): Selenocysteine
  MOD_RES (363)..(363): Selenocysteine
  MOD_RES (385)..(385): Selenocysteine
  MOD_RES (409)..(409): Selenocysteine
  MOD_RES (416)..(417): Selenocysteine
  MOD_RES (421)..(421): Selenocysteine
  MOD_RES (453)..(453): Selenocysteine
  MOD_RES (560)..(560): Selenocysteine
  MOD_RES (590)..(590): Selenocysteine
  MOD_RES (644)..(644): Selenocysteine
  MOD_RES (646)..(646): Selenocysteine
MXPPPPGRAAPSAPRARVPGPPARLGLPLRLRLLLLLWAAAASAQGHLRSGPRIFAVWKGHVGQDRVDFGQXEPHXVLFHEPGSSSVWVGGRGKVYLFDFPEGKNASVRXDCENYIXLLERRSEGLLACGXNARHPSCWNLVNGXVVPLGEMRGYAPFSPDENSLVLFEGDEVYSXIRKQEYNGKIPRFRRIRGESELYXSDXVMQNPQFIKAXIVHQDQAYDDKIYYFFREDNPDKNPEAPLNVSRVAQLCRGDQGGESSLSVSKWNXFLKAMLVCSDAAXNKNFNRLQDVFLLPDPSGQWRDXRVYGVFSNPWNYSAVCVYSLGDIDKVFRXSSLKGYHSSLPNPRPGKCLPDQQPIPXEXFQVADRHPEVAQRVEPMGPLKXPLFHSKYHYQKVAVHRMQASHGEXFHVLYLXXDRGXIHKVVEPGEQEHSFAFNIMEIQPFRRAAAIQXMSLDAERRKLYVSSQWEVSQVPLDLCEVYGGGCHGCLMSRDPYCGWDQGRCISIYSSERSVLQSINPAEPHKECPNPKPDKAPLQKVSLAPNSRYYLSCPMESRHAXYSWRHKENVEQSCEPGHQSPNCILFIENLXAQQYGHYFCEAQEGSYFREAQHWQLLPEDGIMAEHLLGHACALAASLWLGVLPXLXLGLLVH

SEQ ID NO: 24940 - protein, 666 aa, Homo sapiens
  MOD_RES (2)..(2): Selenocysteine
  MOD_RES (72)..(72): Selenocysteine
  MOD_RES (76)..(76): Selenocysteine
  MOD_RES (110)..(110): Selenocysteine
  MOD_RES (116)..(116): Selenocysteine
  MOD_RES (131)..(131): Selenocysteine
  MOD_RES (145)..(145): Selenocysteine
  MOD_RES (159)..(159): Selenocysteine
  MOD_RES (190)..(190): Selenocysteine
  MOD_RES (214)..(214): Selenocysteine
  MOD_RES (217)..(217): Selenocysteine
  MOD_RES (228)..(228): Selenocysteine
  MOD_RES (283)..(283): Selenocysteine
  MOD_RES (296)..(296): Selenocysteine
  MOD_RES (319)..(319): Selenocysteine
  MOD_RES (348)..(348): Selenocysteine
  MOD_RES (375)..(375): Selenocysteine
  MOD_RES (377)..(377): Selenocysteine
  MOD_RES (399)..(399): Selenocysteine
  MOD_RES (423)..(423): Selenocysteine
  MOD_RES (430)..(431): Selenocysteine
  MOD_RES (435)..(435): Selenocysteine
  MOD_RES (467)..(467): Selenocysteine
  MOD_RES (574)..(574): Selenocysteine
  MOD_RES (604)..(604): Selenocysteine
  MOD_RES (658)..(658): Selenocysteine
  MOD_RES (660)..(660): Selenocysteine
MXPPPPGRAAPSAPRARVPGPPARLGLPLRLRLLLLLWAAAASAQGHLRSGPRIFAVWKGHVGQDRVDFGQXEPHXVLFHEPGSSSVWVGGRGKVYLFDFPEGKNASVRXVNIGSXKGSCLDKRDCENYIXLLERRSEGLLACGXNARHPSCWNLVNGXVVPLGEMRGYAPFSPDENSLVLFEGDEVYSXIRKQEYNGKIPRFRRIRGESELYXSDXVMQNPQFIKAXIVHQDQAYDDKIYYFFREDNPDKNPEAPLNVSRVAQLCRGDQGGESSLSVSKWNXFLKAMLVCSDAAXNKNFNRLQDVFLLPDPSGQWRDXRVYGVFSNPWNYSAVCVYSLGDIDKVFRXSSLKGYHSSLPNPRPGKCLPDQQPIPXEXFQVADRHPEVAQRVEPMGPLKXPLFHSKYHYQKVAVHRMQASHGEXFHVLYLXXDRGXIHKVVEPGEQEHSFAFNIMEIQPFRRAAAIQXMSLDAERRKLYVSSQWEVSQVPLDLCEVYGGGCHGCLMSRDPYCGWDQGRCISIYSSERSVLQSINPAEPHKECPNPKPDKAPLQKVSLAPNSRYYLSCPMESRHAXYSWRHKENVEQSCEPGHQSPNCILFIENLXAQQYGHYFCEAQEGSYFREAQHWQLLPEDGIMAEHLLGHACALAASLWLGVLPXLXLGLLVH

SEQ ID NO: 24941 - protein, 643 aa, Homo sapiens
  MOD_RES (16)..(16): Selenocysteine
  MOD_RES (26)..(26): Selenocysteine
  MOD_RES (32)..(32): Selenocysteine
  MOD_RES (59)..(59): Selenocysteine
  MOD_RES (62)..(62): Selenocysteine
  MOD_RES (89)..(89): Selenocysteine
  MOD_RES (102)..(102): Selenocysteine
  MOD_RES (122)..(122): Selenocysteine
  MOD_RES (125)..(125): Selenocysteine
  MOD_RES (174)..(174): Selenocysteine
  MOD_RES (181)..(181): Selenocysteine
  MOD_RES (185)..(185): Selenocysteine
  MOD_RES (202)..(202): Selenocysteine
  MOD_RES (207)..(207): Selenocysteine
  MOD_RES (212)..(213): Selenocysteine
  MOD_RES (229)..(229): Selenocysteine
  MOD_RES (250)..(250): Selenocysteine
  MOD_RES (260)..(260): Selenocysteine
  MOD_RES (276)..(276): Selenocysteine
  MOD_RES (288)..(288): Selenocysteine
  MOD_RES (310)..(310): Selenocysteine
  MOD_RES (328)..(328): Selenocysteine
  MOD_RES (330)..(330): Selenocysteine
  MOD_RES (334)..(334): Selenocysteine
  MOD_RES (346)..(346): Selenocysteine
  MOD_RES (401)..(401): Selenocysteine
  MOD_RES (406)..(406): Selenocysteine
  MOD_RES (414)..(414): Selenocysteine
  MOD_RES (424)..(424): Selenocysteine
  MOD_RES (451)..(451): Selenocysteine
  MOD_RES (453)..(453): Selenocysteine
  MOD_RES (459)..(459): Selenocysteine
  MOD_RES (495)..(495): Selenocysteine
  MOD_RES (499)..(499): Selenocysteine
  MOD_RES (503)..(503): Selenocysteine
  MOD_RES (513)..(513): Selenocysteine
  MOD_RES (547)..(547): Selenocysteine
  MOD_RES (581)..(581): Selenocysteine
  MOD_RES (614)..(614): Selenocysteine
  MOD_RES (622)..(622): Selenocysteine
MDDIADRMRMDAGEVXLVNHNSVFKXHLLPQXGFPEDQLSLSDQQILSSRQGHLDRSFXCSXRSAAYNPSYYSDNPSSDSFLGSGDLRXFGQSANGQWRNSXPSSSSSLQKSRNSRSLYLEXRKXSSGLSNSFAGKSNHHCHVSAYEKSFPIKPVPSPSWSGSCRRSLLSPKKXQRRHVSXAEEXVQEEEREIYRQLLQMVXGKQFXIAKPXXHFPLHLSRCLSSSKNXLKDSLFKNGNSCASQIIGSDXSSSGSASILXNQEQLSHSVYSLSSYXPDVAFGSKDSGXLHHPHHHHSVPHQPDNLAASNXQSEGSDSVILLKVKDSQXPXPSSXFFQAELWIKELXSVYDSRARERLRQIEEQKALALQLQNQRLQEREHSVHDSVELHLRVPLEKEIPVXVVQEXQKKGHKLXDSEDEFPEIXEEMEKEIKNVFRNGNQDEVLSEAFRLXIXRKDIQXLNHLNWLNDEIINFYMNMLMERSKEKGLPSVHAFNXFFFXKLKXAGYQAVKRWXKKVDVFSVDILLVPIHLGVHWCLAVVDFRKKNIXYYDSMGGINNEACRILLQYLKQESIDKKRKEFDXNGWQLFSKKSQIPQQMNGSDCGMFACKYADCIXKDRPINFXQQHMPYFRKRMVWEILHRKLL

SEQ ID NO: 24942 - protein, 644 aa, Homo sapiens
  MOD_RES (16)..(16): Selenocysteine
  MOD_RES (26)..(26): Selenocysteine
  MOD_RES (32)..(32): Selenocysteine
  MOD_RES (59)..(59): Selenocysteine
  MOD_RES (62)..(62): Selenocysteine
  MOD_RES (89)..(89): Selenocysteine
  MOD_RES (102)..(102): Selenocysteine
  MOD_RES (122)..(122): Selenocysteine
  MOD_RES (125)..(125): Selenocysteine
  MOD_RES (174)..(174): Selenocysteine
  MOD_RES (181)..(181): Selenocysteine
  MOD_RES (185)..(185): Selenocysteine
  MOD_RES (202)..(202): Selenocysteine
  MOD_RES (207)..(207): Selenocysteine
  MOD_RES (212)..(213): Selenocysteine
  MOD_RES (229)..(229): Selenocysteine
  MOD_RES (250)..(250): Selenocysteine
  MOD_RES (260)..(260): Selenocysteine
  MOD_RES (276)..(276): Selenocysteine
  MOD_RES (288)..(288): Selenocysteine
  MOD_RES (310)..(310): Selenocysteine
  MOD_RES (328)..(328): Selenocysteine
  MOD_RES (330)..(330): Selenocysteine
  MOD_RES (334)..(334): Selenocysteine
  MOD_RES (346)..(346): Selenocysteine
  MOD_RES (401)..(401): Selenocysteine
  MOD_RES (406)..(406): Selenocysteine
  MOD_RES (414)..(414): Selenocysteine
  MOD_RES (424)..(424): Selenocysteine
  MOD_RES (451)..(451): Selenocysteine
  MOD_RES (453)..(453): Selenocysteine
  MOD_RES (459)..(459): Selenocysteine
  MOD_RES (495)..(495): Selenocysteine
  MOD_RES (499)..(499): Selenocysteine
  MOD_RES (503)..(503): Selenocysteine
  MOD_RES (513)..(513): Selenocysteine
  MOD_RES (547)..(547): Selenocysteine
  MOD_RES (581)..(581): Selenocysteine
  MOD_RES (615)..(615): Selenocysteine
  MOD_RES (623)..(623): Selenocysteine
MDDIADRMRMDAGEVXLVNHNSVFKXHLLPQXGFPEDQLSLSDQQILSSRQGHLDRSFXCSXRSAAYNPSYYSDNPSSDSFLGSGDLRXFGQSANGQWRNSXPSSSSSLQKSRNSRSLYLEXRKXSSGLSNSFAGKSNHHCHVSAYEKSFPIKPVPSPSWSGSCRRSLLSPKKXQRRHVSXAEEXVQEEEREIYRQLLQMVXGKQFXIAKPXXHFPLHLSRCLSSSKNXLKDSLFKNGNSCASQIIGSDXSSSGSASILXNQEQLSHSVYSLSSYXPDVAFGSKDSGXLHHPHHHHSVPHQPDNLAASNXQSEGSDSVILLKVKDSQXPXPSSXFFQAELWIKELXSVYDSRARERLRQIEEQKALALQLQNQRLQEREHSVHDSVELHLRVPLEKEIPVXVVQEXQKKGHKLXDSEDEFPEIXEEMEKEIKNVFRNGNQDEVLSEAFRLXIXRKDIQXLNHLNWLNDEIINFYMNMLMERSKEKGLPSVHAFNXFFFXKLKXAGYQAVKRWXKKVDVFSVDILLVPIHLGVHWCLAVVDFRKKNIXYYDSMGGINNEACRILLQYLKQESIDKKRKEFDXNGWQLFSKKSQEIPQQMNGSDCGMFACKYADCIXKDRPINFXQQHMPYFRKRMVWEILHRKLL

SEQ ID NO: 24943 - protein, 130 aa, Homo sapiens
  MOD_RES (16)..(16): Selenocysteine
  MOD_RES (26)..(26): Selenocysteine
  MOD_RES (32)..(32): Selenocysteine
  MOD_RES (59)..(59): Selenocysteine
  MOD_RES (62)..(62): Selenocysteine
  MOD_RES (90)..(90): Selenocysteine
  MOD_RES (98)..(98): Selenocysteine
  MOD_RES (123)..(123): Selenocysteine
MDDIADRMRMDAGEVXLVNHNSVFKXHLLPQXGFPEDQLSLSDQQILSSRQGHLDRSFXCSXRSAAYNPSYYSGPGLGVLARYSWGKMLXFGGHHGVXLMQIRHMAVAGFSSFINFQIILPQXVFLAQAI

SEQ ID NO: 24944 - protein, 142 aa, Homo sapiens
  MOD_RES (9)..(9): Selenocysteine
  MOD_RES (19)..(19): Selenocysteine
  MOD_RES (25)..(25): Selenocysteine
  MOD_RES (52)..(52): Selenocysteine
  MOD_RES (55)..(55): Selenocysteine
  MOD_RES (82)..(82): Selenocysteine
  MOD_RES (95)..(95): Selenocysteine
  MOD_RES (115)..(115): Selenocysteine
  MOD_RES (118)..(118): Selenocysteine
MRMDAGEVXLVNHNSVFKXHLLPQXGFPEDQLSLSDQQILSSRQGHLDRSFXCSXRSAAYNPSYYSDNPSSDSFLGSGDLRXFGQSANGQWRNSXPSSSSSLQKSRNSRSLYLEXRKXSSGLSNSFAGKSNHHCHVSAYEKS

SEQ ID NO: 24945 - protein, 203 aa, Homo sapiens
  MOD_RES (4)..(4): Selenocysteine
  MOD_RES (6)..(6): Selenocysteine
  MOD_RES (8)..(8): Selenocysteine
  MOD_RES (55)..(55): Selenocysteine
  MOD_RES (69)..(69): Selenocysteine
  MOD_RES (76)..(76): Selenocysteine
  MOD_RES (103)..(103): Selenocysteine
  MOD_RES (121)..(121): Selenocysteine
  MOD_RES (181)..(181): Selenocysteine
  MOD_RES (193)..(193): Selenocysteine
GKIXDXEXMVGIRFENESRRGYQLEPDLSEEVSARLRLGSGSNGLLRRKVSIIEXKEKNCSGKERDRRXDDLLELXEVINFYMNLLVERNKKQGYPALHVFSXFFYPKLKSGGYQAVKRWXKGVNLFEQEIILVPIHRKVHWSLVVIDLRKKCLKYLDSMGQKGHRICEILLQYLQDESKXKRNSDLNLLEWXHHSMKPHEIP

SEQ ID NO: 24946 - protein, 273 aa, Homo sapiens
  MOD_RES (9)..(9): Selenocysteine
  MOD_RES (26)..(26): Selenocysteine
  MOD_RES (81)..(81): Selenocysteine
  MOD_RES (85)..(85): Selenocysteine
  MOD_RES (89)..(89): Selenocysteine
  MOD_RES (93)..(93): Selenocysteine
  MOD_RES (96)..(96): Selenocysteine
  MOD_RES (131)..(132): Selenocysteine
  MOD_RES (137)..(137): Selenocysteine
  MOD_RES (143)..(143): Selenocysteine
  MOD_RES (162)..(162): Selenocysteine
  MOD_RES (190)..(190): Selenocysteine
  MOD_RES (192)..(192): Selenocysteine
  MOD_RES (206)..(206): Selenocysteine
  MOD_RES (240)..(240): Selenocysteine
  MOD_RES (257)..(257): Selenocysteine
MRLCPSCSXRLQIIQAKGRNLNVLVXPYGLGILPWPSSKALLGPGKAVAVVGLGLRIIPLLGQWMDSHPCLYCGPQDSEGXNWQXSPSXLFSXVDXDEIPAKRPRLDCFIHQVKNSLYNAASLFGFPFQLXXKPMVXSACNGXRNVAPSGEVFSNSSSCELXGSGSWNNMLKLGNKSPNGISDYPKIRVXVXRDQPRRVLPSFGFXLNSEGCNRRPGGRRHSKGNPESSLMWKPQEQAVXEMISEESGKGLRRPHCXVEEGVQKEEREKYRKL

SEQ ID NO: 24947 - protein, 589 aa, Homo sapiens
  MOD_RES (11)..(11): Selenocysteine
  MOD_RES (35)..(35): Selenocysteine
  MOD_RES (39)..(39): Selenocysteine
  MOD_RES (42)..(42): Selenocysteine
  MOD_RES (77)..(78): Selenocysteine
  MOD_RES (83)..(83): Selenocysteine
  MOD_RES (89)..(89): Selenocysteine
  MOD_RES (108)..(108): Selenocysteine
  MOD_RES (136)..(136): Selenocysteine
  MOD_RES (138)..(138): Selenocysteine
  MOD_RES (152)..(152): Selenocysteine
  MOD_RES (186)..(186): Selenocysteine
  MOD_RES (203)..(203): Selenocysteine
  MOD_RES (236)..(236): Selenocysteine
  MOD_RES (249)..(249): Selenocysteine
  MOD_RES (252)..(252): Selenocysteine
  MOD_RES (265)..(266): Selenocysteine
  MOD_RES (278)..(278): Selenocysteine
  MOD_RES (297)..(297): Selenocysteine
  MOD_RES (299)..(299): Selenocysteine
  MOD_RES (301)..(301): Selenocysteine
  MOD_RES (348)..(348): Selenocysteine
  MOD_RES (362)..(362): Selenocysteine
  MOD_RES (369)..(369): Selenocysteine
  MOD_RES (398)..(398): Selenocysteine
  MOD_RES (404)..(404): Selenocysteine
  MOD_RES (440)..(440): Selenocysteine
  MOD_RES (458)..(458): Selenocysteine
  MOD_RES (518)..(518): Selenocysteine
  MOD_RES (530)..(530): Selenocysteine
  MOD_RES (552)..(552): Selenocysteine
  MOD_RES (566)..(566): Selenocysteine
  MOD_RES (568)..(568): Selenocysteine
MYRWLVRILGXIFRFCDRSVPPARALLKRRRSDSXLFSXVDXDEIPAKRPRLDCFIHQVKNSLYNAASLFGFPFQLXXKPMVXSACNGXRNVAPSGEVFSNSSSCELXGSGSWNNMLKLGNKSPNGISDYPKIRVXVXRDQPRRVLPSFGFXLNSEGCNRRPGGRRHSKGNPESSLMWKPQEQAVXEMISEESGKGLRRPHCXVEEGVQKEEREKYRKLLERLKESGHGNSVCPVXSNYHSSQRSQMDXLKXKGWGEEQNHGVKXXQFVPKQYRLVEXRGPLCSLRSEKRCSKGKIXDXEXMVGIRFENESRRGYQLEPDLSEEVSARLRLGSGSNGLLRRKVSIIEXKEKNCSGKERDRRXDDLLELXEDMEKEISNALGHGPQDEILSSAFKLRIXRGDIQXLKNYHWLNDEVINFYMNLLVERNKKQGYPALHVFSXFFYPKLKSGGYQAVKRWXKGVNLFEQEIILVPIHRKVHWSLVVIDLRKKCLKYLDSMGQKGHRICEILLQYLQDESKXKRNSDLNLLEWXHHSMKPHEIPQQLNGSDCGMFXCKYADYISRDKPIXFXQHQMPLFRKKMVWEILHQQLL

SEQ ID NO: 24948 - protein, 104 aa, Homo sapiens
  MOD_RES (11)..(11): Selenocysteine
  MOD_RES (35)..(35): Selenocysteine
  MOD_RES (39)..(39): Selenocysteine
  MOD_RES (42)..(42): Selenocysteine
  MOD_RES (77)..(78): Selenocysteine
  MOD_RES (83)..(83): Selenocysteine
  MOD_RES (89)..(89): Selenocysteine
MYRWLVRILGXIFRFCDRSVPPARALLKRRRSDSXLFSXVDXDEIPAKRPRLDCFIHQVKNSLYNAASLFGFPFQLXXKPMVXSACNGXRNVAPSGEVINLLME

SEQ ID NO: 24949 - protein, 105 aa, Homo sapiens
  MOD_RES (11)..(11): Selenocysteine
  MOD_RES (35)..(35): Selenocysteine
  MOD_RES (39)..(39): Selenocysteine
  MOD_RES (42)..(42): Selenocysteine
  MOD_RES (77)..(78): Selenocysteine
  MOD_RES (83)..(83): Selenocysteine
  MOD_RES (89)..(89): Selenocysteine
  MOD_RES (103)..(104): Selenocysteine
MYRWLVRILGXIFRFCDRSVPPARALLKRRRSDSXLFSXVDXDEIPAKRPRLDCFIHQVKNSLYNAASLFGFPFQLXXKPMVXSACNGXRNVAPSGEVLDPGXXC

SEQ ID NO: 24950 - protein, 60 aa, Homo sapiens
  MOD_RES (11)..(11): Selenocysteine
  MOD_RES (35)..(35): Selenocysteine
  MOD_RES (39)..(39): Selenocysteine
  MOD_RES (42)..(42): Selenocysteine
MYRWLVRILGXIFRFCDRSVPPARALLKRRRSDSXLFSXVDXDEIPAKRPRLGIFELFIL

SEQ ID NO: 24951 - protein, 54 aa, Homo sapiens
  MOD_RES (11)..(11): Selenocysteine
  MOD_RES (35)..(35): Selenocysteine
  MOD_RES (39)..(39): Selenocysteine
  MOD_RES (42)..(42): Selenocysteine
MYRWLVRILGXIFRFCDRSVPPARALLKRRRSDSXLFSXVDXDEIPAKRPRLVC

SEQ ID NO: 24952 - protein, 147 aa, Homo sapiens
  MOD_RES (18)..(18): Selenocysteine
  MOD_RES (25)..(25): Selenocysteine
  MOD_RES (50)..(50): Selenocysteine
  MOD_RES (63)..(63): Selenocysteine
  MOD_RES (71)..(71): Selenocysteine
  MOD_RES (89)..(89): Selenocysteine
  MOD_RES (96)..(96): Selenocysteine
  MOD_RES (109)..(109): Selenocysteine
  MOD_RES (113)..(113): Selenocysteine
  MOD_RES (128)..(128): Selenocysteine
MEFNSNVKSWSFSLQQPXQFINPEXPGYVGFANLPNQVHRKSVKKGFEFXLMVVGESGLGKSXLINSLFLXDLYPERVIPGAAEKIERXVQIEASXVEIEERGVKLRLXVVDXPGYGDAINCRDCFKXIISYIDEQFERYLHDESGL

SEQ ID NO: 24953 - protein, 396 aa, Homo sapiens
  MOD_RES (10)..(10): Selenocysteine
  MOD_RES (42)..(42): Selenocysteine
  MOD_RES (49)..(49): Selenocysteine
  MOD_RES (74)..(74): Selenocysteine
  MOD_RES (87)..(87): Selenocysteine
  MOD_RES (95)..(95): Selenocysteine
  MOD_RES (113)..(113): Selenocysteine
  MOD_RES (120)..(120): Selenocysteine
  MOD_RES (133)..(133): Selenocysteine
  MOD_RES (137)..(137): Selenocysteine
  MOD_RES (152)..(152): Selenocysteine
  MOD_RES (221)..(221): Selenocysteine
  MOD_RES (223)..(223): Selenocysteine
  MOD_RES (263)..(263): Selenocysteine
  MOD_RES (313)..(313): Selenocysteine
  MOD_RES (317)..(317): Selenocysteine
  MOD_RES (326)..(326): Selenocysteine
MPWISEGRAXRPCLRVPSARRGDEGLHQRDEASQKMSKQQPXQFINPEXPGYVGFANLPNQVHRKSVKKGFEFXLMVVGESGLGKSXLINSLFLXDLYPERVIPGAAEKIERXVQIEASXVEIEERGVKLRLXVVDXPGYGDAINCRDCFKXIISYIDEQFERYLHDESGLNRRHIIDNRVHCCFYFISPFGHGLKPLDVAFMKAIHNKVNIVPVIAKADXLXLKERERLKKRILDEIEEHNIKIYHLPDAESDEDEDFKEQXRLLKASIPFSVVGSNQLIEAKGKKVRGRLYPWGVVEVENPEHNDFLKLRXMLIXHMQDLQEVXQDLHYENFRSERLKRGGRKVENEDMNKDQILLEKEAELRRMQEMIARMQAQMQMQMQGGDGDGGALGHHV

SEQ ID NO: 24954 - protein, 23 aa, Homo sapiens
  MOD_RES (7)..(7): Selenocysteine
  MOD_RES (14)..(14): Selenocysteine
MSKQQPXQFINPEXPGYVGFANL

SEQ ID NO: 24955 - protein, 50 aa, Homo sapiens
  MOD_RES (7)..(7): Selenocysteine
  MOD_RES (14)..(14): Selenocysteine
  MOD_RES (39)..(39): Selenocysteine
MSKQQPXQFINPEXPGYVGFANLPNQVHRKSVKKGFEFXLMVVGESGLGK

SEQ ID NO: 24956 - protein, 52 aa, Homo sapiens
  MOD_RES (7)..(7): Selenocysteine
  MOD_RES (14)..(14): Selenocysteine
  MOD_RES (39)..(39): Selenocysteine
  MOD_RES (52)..(52): Selenocysteine
MSKQQPXQFINPEXPGYVGFANLPNQVHRKSVKKGFEFXLMVVGESGLGKSX

SEQ ID NO: 24957 - protein, 72 aa, Homo sapiens
  MOD_RES (7)..(7): Selenocysteine
  MOD_RES (14)..(14): Selenocysteine
  MOD_RES (39)..(39): Selenocysteine
  MOD_RES (52)..(52): Selenocysteine
  MOD_RES (60)..(60): Selenocysteine
MSKQQPXQFINPEXPGYVGFANLPNQVHRKSVKKGFEFXLMVVGESGLGKSXLINSLFLXDLYPERVIPGAA

SEQ ID NO: 24958 - protein, 371 aa, Homo sapiens
  MOD_RES (7)..(7): Selenocysteine
  MOD_RES (14)..(14): Selenocysteine
  MOD_RES (39)..(39): Selenocysteine
  MOD_RES (52)..(52): Selenocysteine
  MOD_RES (60)..(60): Selenocysteine
  MOD_RES (76)..(76): Selenocysteine
  MOD_RES (79)..(79): Selenocysteine
  MOD_RES (88)..(88): Selenocysteine
  MOD_RES (95)..(95): Selenocysteine
  MOD_RES (108)..(108): Selenocysteine
  MOD_RES (112)..(112): Selenocysteine
  MOD_RES (127)..(127): Selenocysteine
  MOD_RES (196)..(196): Selenocysteine
  MOD_RES (198)..(198): Selenocysteine
  MOD_RES (238)..(238): Selenocysteine
  MOD_RES (288)..(288): Selenocysteine
  MOD_RES (292)..(292): Selenocysteine
  MOD_RES (301)..(301): Selenocysteine
MSKQQPXQFINPEXPGYVGFANLPNQVHRKSVKKGFEFXLMVVGESGLGKSXLINSLFLXDLYPERVIPGAAALNXRKXLLWEKIERXVQIEASXVEIEERGVKLRLXVVDXPGYGDAINCRDCFKXIISYIDEQFERYLHDESGLNRRHIIDNRVHCCFYFISPFGHGLKPLDVAFMKAIHNKVNIVPVIAKADXLXLKERERLKKRILDEIEEHNIKIYHLPDAESDEDEDFKEQXRLLKASIPFSVVGSNQLIEAKGKKVRGRLYPWGVVEVENPEHNDFLKLRXMLIXHMQDLQEVXQDLHYENFRSERLKRGGRKVENEDMNKDQILLEKEAELRRMQEMIARMQAQMQMQMQGGDGDGGALGHHV

SEQ ID NO: 24959 - protein, 105 aa, Homo sapiens
  MOD_RES (7)..(7): Selenocysteine
  MOD_RES (14)..(14): Selenocysteine
  MOD_RES (39)..(39): Selenocysteine
  MOD_RES (52)..(52): Selenocysteine
  MOD_RES (60)..(60): Selenocysteine
  MOD_RES (78)..(78): Selenocysteine
  MOD_RES (85)..(85): Selenocysteine
  MOD_RES (98)..(98): Selenocysteine
  MOD_RES (102)..(102): Selenocysteine
MSKQQPXQFINPEXPGYVGFANLPNQVHRKSVKKGFEFXLMVVGESGLGKSXLINSLFLXDLYPERVIPGAAEKIERXVQIEASXVEIEERGVKLRLXVVDXPGY

SEQ ID NO: 24960 - protein, 131 aa, Homo sapiens
  MOD_RES (7)..(7): Selenocysteine
  MOD_RES (14)..(14): Selenocysteine
  MOD_RES (39)..(39): Selenocysteine
  MOD_RES (52)..(52): Selenocysteine
  MOD_RES (60)..(60): Selenocysteine
  MOD_RES (78)..(78): Selenocysteine
  MOD_RES (85)..(85): Selenocysteine
  MOD_RES (98)..(98): Selenocysteine
  MOD_RES (102)..(102): Selenocysteine
  MOD_RES (117)..(117): Selenocysteine
MSKQQPXQFINPEXPGYVGFANLPNQVHRKSVKKGFEFXLMVVGESGLGKSXLINSLFLXDLYPERVIPGAAEKIERXVQIEASXVEIEERGVKLRLXVVDXPGYGDAINCRDCFKXIISYIDEQFERYLH

SEQ ID NO: 24961 - protein, 148 aa, Homo sapiens
  MOD_RES (7)..(7): Selenocysteine
  MOD_RES (14)..(14): Selenocysteine
  MOD_RES (39)..(39): Selenocysteine
  MOD_RES (52)..(52): Selenocysteine
  MOD_RES (60)..(60): Selenocysteine
  MOD_RES (78)..(78): Selenocysteine
  MOD_RES (85)..(85): Selenocysteine
  MOD_RES (98)..(98): Selenocysteine
  MOD_RES (102)..(102): Selenocysteine
  MOD_RES (117)..(117): Selenocysteine
MSKQQPXQFINPEXPGYVGFANLPNQVHRKSVKKGFEFXLMVVGESGLGKSXLINSLFLXDLYPERVIPGAAEKIERXVQIEASXVEIEERGVKLRLXVVDXPGYGDAINCRDCFKXIISYIDEQFERYLHDESGLNRRHIIDNRVHC

SEQ ID NO: 24962 - protein, 173 aa, Homo sapiens
  MOD_RES (7)..(7): Selenocysteine
  MOD_RES (14)..(14): Selenocysteine
  MOD_RES (39)..(39): Selenocysteine
  MOD_RES (52)..(52): Selenocysteine
  MOD_RES (60)..(60): Selenocysteine
  MOD_RES (78)..(78): Selenocysteine
  MOD_RES (85)..(85): Selenocysteine
  MOD_RES (98)..(98): Selenocysteine
  MOD_RES (102)..(102): Selenocysteine
  MOD_RES (117)..(117): Selenocysteine
MSKQQPXQFINPEXPGYVGFANLPNQVHRKSVKKGFEFXLMVVGESGLGKSXLINSLFLXDLYPERVIPGAAEKIERXVQIEASXVEIEERGVKLRLXVVDXPGYGDAINCRDCFKXIISYIDEQFERYLHDESGLNRRHIIDNRVHCCFYFISPFGHGLKPLDVAFMKAIHN

SEQ ID NO: 24963 - protein, 361 aa, Homo sapiens
  MOD_RES (7)..(7): Selenocysteine
  MOD_RES (14)..(14): Selenocysteine
  MOD_RES (39)..(39): Selenocysteine
  MOD_RES (52)..(52): Selenocysteine
  MOD_RES (60)..(60): Selenocysteine
  MOD_RES (78)..(78): Selenocysteine
  MOD_RES (85)..(85): Selenocysteine
  MOD_RES (98)..(98): Selenocysteine
  MOD_RES (102)..(102): Selenocysteine
  MOD_RES (117)..(117): Selenocysteine
  MOD_RES (186)..(186): Selenocysteine
  MOD_RES (188)..(188): Selenocysteine
  MOD_RES (228)..(228): Selenocysteine
  MOD_RES (278)..(278): Selenocysteine
  MOD_RES (282)..(282): Selenocysteine
  MOD_RES (291)..(291): Selenocysteine
MSKQQPXQFINPEXPGYVGFANLPNQVHRKSVKKGFEFXLMVVGESGLGKSXLINSLFLXDLYPERVIPGAAEKIERXVQIEASXVEIEERGVKLRLXVVDXPGYGDAINCRDCFKXIISYIDEQFERYLHDESGLNRRHIIDNRVHCCFYFISPFGHGLKPLDVAFMKAIHNKVNIVPVIAKADXLXLKERERLKKRILDEIEEHNIKIYHLPDAESDEDEDFKEQXRLLKASIPFSVVGSNQLIEAKGKKVRGRLYPWGVVEVENPEHNDFLKLRXMLIXHMQDLQEVXQDLHYENFRSERLKRGGRKVENEDMNKDQILLEKEAELRRMQEMIARMQAQMQMQMQGGDGDGGALGHHV

SEQ ID NO: 24964 - protein, 80 aa, Homo sapiens
  MOD_RES (7)..(7): Selenocysteine
  MOD_RES (14)..(14): Selenocysteine
  MOD_RES (39)..(39): Selenocysteine
  MOD_RES (52)..(52): Selenocysteine
  MOD_RES (60)..(60): Selenocysteine
MSKQQPXQFINPEXPGYVGFANLPNQVHRKSVKKGFEFXLMVVGESGLGKSXLINSLFLXDLYPERVIPGAAVCFFSRKN

SEQ ID NO: 24965 - protein, 74 aa, Homo sapiens
  MOD_RES (4)..(4): Selenocysteine
  MOD_RES (28)..(28): Selenocysteine
  MOD_RES (73)..(73): Selenocysteine
MSKXGVLFCHQAGVQWHDLSSLQLLPPXFKRFPWLSLRSSWDCRHVPPRWLIFWILVNSGFHRVGQDGLDLLXS

SEQ ID NO: 24966 - protein, 121 aa, Homo sapiens
  MOD_RES (12)..(12): Selenocysteine
  MOD_RES (20)..(20): Selenocysteine
  MOD_RES (38)..(38): Selenocysteine
  MOD_RES (45)..(45): Selenocysteine
  MOD_RES (58)..(58): Selenocysteine
  MOD_RES (62)..(62): Selenocysteine
  MOD_RES (77)..(77): Selenocysteine
MVVGESGLGKSXLINSLFLXDLYPERVIPGAAEKIERXVQIEASXVEIEERGVKLRLXVVDXPGYGDAINCRDCFKXIISYIDEQFERYLHDESGLNRRHIIDNRVHCCFYFISPFGHGLK

SEQ ID NO: 24967 - protein, 184 aa, Homo sapiens
  MOD_RES (12)..(12): Selenocysteine
  MOD_RES (20)..(20): Selenocysteine
  MOD_RES (38)..(38): Selenocysteine
  MOD_RES (45)..(45): Selenocysteine
  MOD_RES (58)..(58): Selenocysteine
  MOD_RES (62)..(62): Selenocysteine
  MOD_RES (77)..(77): Selenocysteine
  MOD_RES (146)..(146): Selenocysteine
  MOD_RES (148)..(148): Selenocysteine
MVVGESGLGKSXLINSLFLXDLYPERVIPGAAEKIERXVQIEASXVEIEERGVKLRLXVVDXPGYGDAINCRDCFKXIISYIDEQFERYLHDESGLNRRHIIDNRVHCCFYFISPFGHGLKPLDVAFMKAIHNKVNIVPVIAKADXLXLKERERLKKRILDEIEEHNIKIYHLPDAESDEDEDF

SEQ ID NO: 24968 - protein, 321 aa, Homo sapiens
  MOD_RES (12)..(12): Selenocysteine
  MOD_RES (20)..(20): Selenocysteine
  MOD_RES (38)..(38): Selenocysteine
  MOD_RES (45)..(45): Selenocysteine
  MOD_RES (58)..(58): Selenocysteine
  MOD_RES (62)..(62): Selenocysteine
  MOD_RES (77)..(77): Selenocysteine
  MOD_RES (146)..(146): Selenocysteine
  MOD_RES (148)..(148): Selenocysteine
  MOD_RES (188)..(188): Selenocysteine
  MOD_RES (238)..(238): Selenocysteine
  MOD_RES (242)..(242): Selenocysteine
  MOD_RES (251)..(251): Selenocysteine
MVVGESGLGKSXLINSLFLXDLYPERVIPGAAEKIERXVQIEASXVEIEERGVKLRLXVVDXPGYGDAINCRDCFKXIISYIDEQFERYLHDESGLNRRHIIDNRVHCCFYFISPFGHGLKPLDVAFMKAIHNKVNIVPVIAKADXLXLKERERLKKRILDEIEEHNIKIYHLPDAESDEDEDFKEQXRLLKASIPFSVVGSNQLIEAKGKKVRGRLYPWGVVEVENPEHNDFLKLRXMLIXHMQDLQEVXQDLHYENFRSERLKRGGRKVENEDMNKDQILLEKEAELRRMQEMIARMQAQMQMQMQGGDGDGGALGHHV

SEQ ID NO: 24969 - protein, 94 aa, Homo sapiens
  MOD_RES (12)..(12): Selenocysteine
  MOD_RES (20)..(20): Selenocysteine
  MOD_RES (38)..(38): Selenocysteine
  MOD_RES (45)..(45): Selenocysteine
  MOD_RES (58)..(58): Selenocysteine
  MOD_RES (62)..(62): Selenocysteine
MVVGESGLGKSXLINSLFLXDLYPERVIPGAAEKIERXVQIEASXVEIEERGVKLRLXVVDXPGYGDAINCRDWYAPPCPGICICLLNILHKFI

SEQ ID NO: 24970 - protein, 188 aa, Homo sapiens
  MOD_RES (41)..(41): Selenocysteine
  MOD_RES (43)..(43): Selenocysteine
  MOD_RES (83)..(83): Selenocysteine
  MOD_RES (133)..(133): Selenocysteine
VHCCFYFISPFGHGLKPLDVAFMKAIHNKVNIVPVIAKADXLXLKERERLKKRILDEIEEHNIKIYHLPDAESDEDEDFKEQXRLLKASIPFSVVGSNQLIEAKGKKVRGRLYPWGVVEVENPEHNDFLKLRXMLMKVENEDMNKDQILLEKEAELRRMQEMIARMQAQMQMQMQGGDGDGGALGHHV

SEQ ID NO: 24971 - protein, 29 aa, Homo sapiens
  MOD_RES (1)..(1): Any amino acid
XEMIARMQAQMQMQMQGGDGDGGALGHHV

SEQ ID NO: 24972 - protein, 161 aa, Homo sapiens
  MOD_RES (1)..(1): Any amino acid
  MOD_RES (9)..(9): Selenocysteine
  MOD_RES (21)..(21): Selenocysteine
  MOD_RES (50)..(50): Selenocysteine
  MOD_RES (57)..(57): Selenocysteine
  MOD_RES (70)..(70): Selenocysteine
  MOD_RES (74)..(74): Selenocysteine
  MOD_RES (89)..(89): Selenocysteine
  MOD_RES (158)..(158): Selenocysteine
  MOD_RES (160)..(160): Selenocysteine
XSPWYLWRXYLCREAVDSEVXCRKNVSFPLHMLLIFPIKFVSFLEKIERXVQIEASXVEIEERGVKLRLXVVDXPGYGDAINCRDCFKXIISYIDEQFERYLHDESGLNRRHIIDNRVHCCFYFISPFGHGLKPLDVAFMKAIHNKVNIVPVIAKADXLXL

SEQ ID NO: 24973 - protein, 175 aa, Homo sapiens
  MOD_RES (11)..(11): Selenocysteine
  MOD_RES (28)..(28): Selenocysteine
  MOD_RES (41)..(41): Selenocysteine
  MOD_RES (49)..(49): Selenocysteine
  MOD_RES (67)..(67): Selenocysteine
  MOD_RES (71)..(71): Selenocysteine
  MOD_RES (87)..(87): Selenocysteine
  MOD_RES (91)..(91): Selenocysteine
  MOD_RES (101)..(101): Selenocysteine
  MOD_RES (165)..(165): Selenocysteine
MDDKEYVGFAXLPNQVHRKSVKKGFDFXLMVAGESGLGKSXLVNSLFLXDLYRDRKLLGAEERIMQXVEIXKHAVDIEEKGVRLRLXIVDXPGFGDAVNNXECWKPVAEYIDQQFEQYFRDESGLNRKNIQDNRVHCCLYFISPFGHGYGPSLRLLAPPGAVKGXGQEHQGQGCH

SEQ ID NO: 24974 - protein, 332 aa, Homo sapiens
  MOD_RES (17)..(17): Selenocysteine
  MOD_RES (30)..(30): Selenocysteine
  MOD_RES (47)..(47): Selenocysteine
  MOD_RES (60)..(60): Selenocysteine
  MOD_RES (68)..(68): Selenocysteine
  MOD_RES (86)..(86): Selenocysteine
  MOD_RES (90)..(90): Selenocysteine
  MOD_RES (106)..(106): Selenocysteine
  MOD_RES (110)..(110): Selenocysteine
  MOD_RES (120)..(120): Selenocysteine
  MOD_RES (194)..(194): Selenocysteine
  MOD_RES (196)..(196): Selenocysteine
  MOD_RES (252)..(252): Selenocysteine
  MOD_RES (286)..(286): Selenocysteine
  MOD_RES (291)..(291): Selenocysteine
  MOD_RES (300)..(300): Selenocysteine
  MOD_RES (303)..(303): Selenocysteine
  MOD_RES (317)..(317): Selenocysteine
MDRSLGWQGNSVPEDRXEAGDDKEYVGFAXLPNQVHRKSVKKGFDFXLMVAGESGLGKSXLVNSLFLXDLYRDRKLLGAEERIMQXVEIXKHAVDIEEKGVRLRLXIVDXPGFGDAVNNXECWKPVAEYIDQQFEQYFRDESGLNRKNIQDNRVHCCLYFISPFGHGLRPLDVEFMKALHQRVNIVPILAKADXLXPPEVDHKKRKIREEIEHFGIKIYQFPDCDSDEDEDFKLQDQALKESIPFAVIGSNXVVEARGRRVRGRLYPWGIVEVENPGHCDFVKLRXMLVRXHMQDLKDVXREXHYENYRAQCIQSMXRLVVKERNRKDRSRN

SEQ ID NO: 24975 - protein, 379 aa, Homo sapiens
  MOD_RES (17)..(17): Selenocysteine
  MOD_RES (30)..(30): Selenocysteine
  MOD_RES (47)..(47): Selenocysteine
  MOD_RES (60)..(60): Selenocysteine
  MOD_RES (68)..(68): Selenocysteine
  MOD_RES (86)..(86): Selenocysteine
  MOD_RES (90)..(90): Selenocysteine
  MOD_RES (106)..(106): Selenocysteine
  MOD_RES (110)..(110): Selenocysteine
  MOD_RES (120)..(120): Selenocysteine
  MOD_RES (194)..(194): Selenocysteine
  MOD_RES (196)..(196): Selenocysteine
  MOD_RES (252)..(252): Selenocysteine
  MOD_RES (286)..(286): Selenocysteine
  MOD_RES (291)..(291): Selenocysteine
  MOD_RES (300)..(300): Selenocysteine
  MOD_RES (303)..(303): Selenocysteine
  MOD_RES (317)..(317): Selenocysteine
  MOD_RES (330)..(330): Selenocysteine
  MOD_RES (335)..(335): Selenocysteine
  MOD_RES (346)..(346): Selenocysteine
  MOD_RES (350)..(350): Selenocysteine
MDRSLGWQGNSVPEDRXEAGDDKEYVGFAXLPNQVHRKSVKKGFDFXLMVAGESGLGKSXLVNSLFLXDLYRDRKLLGAEERIMQXVEIXKHAVDIEEKGVRLRLXIVDXPGFGDAVNNXECWKPVAEYIDQQFEQYFRDESGLNRKNIQDNRVHCCLYFISPFGHGLRPLDVEFMKALHQRVNIVPILAKADXLXPPEVDHKKRKIREEIEHFGIKIYQFPDCDSDEDEDFKLQDQALKESIPFAVIGSNXVVEARGRRVRGRLYPWGIVEVENPGHCDFVKLRXMLVRXHMQDLKDVXREXHYENYRAQCIQSMXRLVVKERNRNKLXRESGXDFPIPAVPPGXDPEXEKLIREKDEELRRMQEMLHKIQKQMKENY

SEQ ID NO: 24976 - protein, 478 aa, Homo sapiens
  MOD_RES (17)..(17): Selenocysteine
  MOD_RES (28)..(29): Selenocysteine
  MOD_RES (54)..(54): Selenocysteine
  MOD_RES (129)..(129): Selenocysteine
  MOD_RES (146)..(146): Selenocysteine
  MOD_RES (159)..(159): Selenocysteine
  MOD_RES (167)..(167): Selenocysteine
  MOD_RES (185)..(185): Selenocysteine
  MOD_RES (189)..(189): Selenocysteine
  MOD_RES (205)..(205): Selenocysteine
  MOD_RES (209)..(209): Selenocysteine
  MOD_RES (219)..(219): Selenocysteine
  MOD_RES (293)..(293): Selenocysteine
  MOD_RES (295)..(295): Selenocysteine
  MOD_RES (351)..(351): Selenocysteine
  MOD_RES (385)..(385): Selenocysteine
  MOD_RES (390)..(390): Selenocysteine
  MOD_RES (399)..(399): Selenocysteine
  MOD_RES (402)..(402): Selenocysteine
  MOD_RES (416)..(416): Selenocysteine
  MOD_RES (429)..(429): Selenocysteine
  MOD_RES (434)..(434): Selenocysteine
  MOD_RES (445)..(445): Selenocysteine
  MOD_RES (449)..(449): Selenocysteine
MDRSLGWQGNSVPEDRXEAGIKRFLEDXXDDGELSKFVKDFSGNASCHPPEAKXWASRPQVPEPRPQAPDLYDDDLEFRPPSRPQSSDNQQYFCAPAPLSPSARPRSPWGKLDPYDSSEDDKEYVGFAXLPNQVHRKSVKKGFDFXLMVAGESGLGKSXLVNSLFLXDLYRDRKLLGAEERIMQXVEIXKHAVDIEEKGVRLRLXIVDXPGFGDAVNNXECWKPVAEYIDQQFEQYFRDESGLNRKNIQDNRVHCCLYFISPFGHGLRPLDVEFMKALHQRVNIVPILAKADXLXPPEVDHKKRKIREEIEHFGIKIYQFPDCDSDEDEDFKLQDQALKESIPFAVIGSNXVVEARGRRVRGRLYPWGIVEVENPGHCDFVKLRXMLVRXHMQDLKDVXREXHYENYRAQCIQSMXRLVVKERNRNKLXRESGXDFPIPAVPPGXDPEXEKLIREKDEELRRMQEMLHKIQKQMKENY

SEQ ID NO: 24977 - protein, 55 aa, Homo sapiens
  MOD_RES (17)..(17): Selenocysteine
  MOD_RES (28)..(29): Selenocysteine
  MOD_RES (38)..(38): Selenocysteine
  MOD_RES (49)..(49): Selenocysteine
  MOD_RES (52)..(52): Selenocysteine
MDRSLGWQGNSVPEDRXEAGIKRFLEDXXDDGELSKMXRSMWALQPSPXKSXESP

SEQ ID NO: 24978 - protein, 207 aa, Homo sapiens
  MOD_RES (6)..(6): Selenocysteine
  MOD_RES (17)..(17): Selenocysteine
  MOD_RES (35)..(35): Selenocysteine
  MOD_RES (52)..(52): Selenocysteine
  MOD_RES (65)..(65): Selenocysteine
  MOD_RES (73)..(73): Selenocysteine
  MOD_RES (91)..(91): Selenocysteine
  MOD_RES (95)..(95): Selenocysteine
  MOD_RES (111)..(111): Selenocysteine
  MOD_RES (115)..(115): Selenocysteine
  MOD_RES (125)..(125): Selenocysteine
  MOD_RES (199)..(199): Selenocysteine
  MOD_RES (201)..(201): Selenocysteine
MGPVPXSFGKRRGGPQXLPASPGGMDDKEYVGFAXLPNQVHRKSVKKGFDFXLMVAGESGLGKSXLVNSLFLXDLYRDRKLLGAEERIMQXVEIXKHAVDIEEKGVRLRLXIVDXPGFGDAVNNXECWKPVAEYIDQQFEQYFRDESGLNRKNIQDNRVHCCLYFISPFGHGLRPLDVEFMKALHQRVNIVPILAKADXLXPPEVDH

SEQ ID NO: 24979 - protein, 225 aa, Homo sapiens
  MOD_RES (6)..(6): Selenocysteine
  MOD_RES (17)..(17): Selenocysteine
  MOD_RES (33)..(34): Selenocysteine
  MOD_RES (59)..(59): Selenocysteine
  MOD_RES (134)..(134): Selenocysteine
  MOD_RES (151)..(151): Selenocysteine
  MOD_RES (164)..(164): Selenocysteine
  MOD_RES (172)..(172): Selenocysteine
  MOD_RES (190)..(190): Selenocysteine
  MOD_RES (194)..(194): Selenocysteine
  MOD_RES (210)..(210): Selenocysteine
  MOD_RES (214)..(214): Selenocysteine
  MOD_RES (224)..(224): Selenocysteine
MGPVPXSFGKRRGGPQXLPASPGGMIKRFLEDXXDDGELSKFVKDFSGNASCHPPEAKXWASRPQVPEPRPQAPDLYDDDLEFRPPSRPQSSDNQQYFCAPAPLSPSARPRSPWGKLDPYDSSEDDKEYVGFAXLPNQVHRKSVKKGFDFXLMVAGESGLGKSXLVNSLFLXDLYRDRKLLGAEERIMQXVEIXKHAVDIEEKGVRLRLXIVDXPGFGDAVNNXE

SEQ ID NO: 24980 - protein, 72 aa, Homo sapiens
  MOD_RES (9)..(10): Selenocysteine
  MOD_RES (35)..(35): Selenocysteine
MIKRFLEDXXDDGELSKFVKDFSGNASCHPPEAKXWASRPQVPEPRPQAPDLYDDDLEFRPPSRPQSSDNQQ

SEQ ID NO: 24981 - protein, 459 aa, Homo sapiens
  MOD_RES (9)..(10): Selenocysteine
  MOD_RES (35)..(35): Selenocysteine
  MOD_RES (110)..(110): Selenocysteine
  MOD_RES (127)..(127): Selenocysteine
  MOD_RES (140)..(140): Selenocysteine
  MOD_RES (148)..(148): Selenocysteine
  MOD_RES (166)..(166): Selenocysteine
  MOD_RES (170)..(170): Selenocysteine
  MOD_RES (186)..(186): Selenocysteine
  MOD_RES (190)..(190): Selenocysteine
  MOD_RES (200)..(200): Selenocysteine
  MOD_RES (274)..(274): Selenocysteine
  MOD_RES (276)..(276): Selenocysteine
  MOD_RES (332)..(332): Selenocysteine
  MOD_RES (366)..(366): Selenocysteine
  MOD_RES (371)..(371): Selenocysteine
  MOD_RES (380)..(380): Selenocysteine
  MOD_RES (383)..(383): Selenocysteine
  MOD_RES (397)..(397): Selenocysteine
  MOD_RES (410)..(410): Selenocysteine
  MOD_RES (415)..(415): Selenocysteine
  MOD_RES (426)..(426): Selenocysteine
  MOD_RES (430)..(430): Selenocysteine
MIKRFLEDXXDDGELSKFVKDFSGNASCHPPEAKXWASRPQVPEPRPQAPDLYDDDLEFRPPSRPQSSDNQQYFCAPAPLSPSARPRSPWGKLDPYDSSEDDKEYVGFAXLPNQVHRKSVKKGFDFXLMVAGESGLGKSXLVNSLFLXDLYRDRKLLGAEERIMQXVEIXKHAVDIEEKGVRLRLXIVDXPGFGDAVNNXECWKPVAEYIDQQFEQYFRDESGLNRKNIQDNRVHCCLYFISPFGHGLRPLDVEFMKALHQRVNIVPILAKADXLXPPEVDHKKRKIREEIEHFGIKIYQFPDCDSDEDEDFKLQDQALKESIPFAVIGSNXVVEARGRRVRGRLYPWGIVEVENPGHCDFVKLRXMLVRXHMQDLKDVXREXHYENYRAQCIQSMXRLVVKERNRNKLXRESGXDFPIPAVPPGXDPEXEKLIREKDEELRRMQEMLHKIQKQMKENY

SEQ ID NO: 24982 - protein, 274 aa, Homo sapiens
  MOD_RES (9)..(10): Selenocysteine
  MOD_RES (35)..(35): Selenocysteine
  MOD_RES (110)..(110): Selenocysteine
  MOD_RES (127)..(127): Selenocysteine
  MOD_RES (140)..(140): Selenocysteine
  MOD_RES (148)..(148): Selenocysteine
  MOD_RES (166)..(166): Selenocysteine
  MOD_RES (170)..(170): Selenocysteine
  MOD_RES (186)..(186): Selenocysteine
  MOD_RES (190)..(190): Selenocysteine
  MOD_RES (200)..(200): Selenocysteine
  MOD_RES (264)..(264): Selenocysteine
MIKRFLEDXXDDGELSKFVKDFSGNASCHPPEAKXWASRPQVPEPRPQAPDLYDDDLEFRPPSRPQSSDNQQYFCAPAPLSPSARPRSPWGKLDPYDSSEDDKEYVGFAXLPNQVHRKSVKKGFDFXLMVAGESGLGKSXLVNSLFLXDLYRDRKLLGAEERIMQXVEIXKHAVDIEEKGVRLRLXIVDXPGFGDAVNNXECWKPVAEYIDQQFEQYFRDESGLNRKNIQDNRVHCCLYFISPFGHGYGPSLRLLAPPGAVKGXGQEHQGQGCH

SEQ ID NO: 24983 - protein, 36 aa, Homo sapiens
  MOD_RES (9)..(10): Selenocysteine
  MOD_RES (19)..(19): Selenocysteine
  MOD_RES (30)..(30): Selenocysteine
  MOD_RES (33)..(33): Selenocysteine
MIKRFLEDXXDDGELSKMXRSMWALQPSPXKSXESP

SEQ ID NO: 24984 - protein, 470 aa, Homo sapiens
  MOD_RES (9)..(9): Selenocysteine
  MOD_RES (20)..(21): Selenocysteine
  MOD_RES (46)..(46): Selenocysteine
  MOD_RES (121)..(121): Selenocysteine
  MOD_RES (138)..(138): Selenocysteine
  MOD_RES (151)..(151): Selenocysteine
  MOD_RES (159)..(159): Selenocysteine
  MOD_RES (177)..(177): Selenocysteine
  MOD_RES (181)..(181): Selenocysteine
  MOD_RES (197)..(197): Selenocysteine
  MOD_RES (201)..(201): Selenocysteine
  MOD_RES (211)..(211): Selenocysteine
  MOD_RES (285)..(285): Selenocysteine
  MOD_RES (287)..(287): Selenocysteine
  MOD_RES (343)..(343): Selenocysteine
  MOD_RES (377)..(377): Selenocysteine
  MOD_RES (382)..(382): Selenocysteine
  MOD_RES (391)..(391): Selenocysteine
  MOD_RES (394)..(394): Selenocysteine
  MOD_RES (408)..(408): Selenocysteine
  MOD_RES (421)..(421): Selenocysteine
  MOD_RES (426)..(426): Selenocysteine
  MOD_RES (437)..(437): Selenocysteine
  MOD_RES (441)..(441): Selenocysteine
MPGFYSVMXDEEIKRFLEDXXDDGELSKFVKDFSGNASCHPPEAKXWASRPQVPEPRPQAPDLYDDDLEFRPPSRPQSSDNQQYFCAPAPLSPSARPRSPWGKLDPYDSSEDDKEYVGFAXLPNQVHRKSVKKGFDFXLMVAGESGLGKSXLVNSLFLXDLYRDRKLLGAEERIMQXVEIXKHAVDIEEKGVRLRLXIVDXPGFGDAVNNXECWKPVAEYIDQQFEQYFRDESGLNRKNIQDNRVHCCLYFISPFGHGLRPLDVEFMKALHQRVNIVPILAKADXLXPPEVDHKKRKIREEIEHFGIKIYQFPDCDSDEDEDFKLQDQALKESIPFAVIGSNXVVEARGRRVRGRLYPWGIVEVENPGHCDFVKLRXMLVRXHMQDLKDVXREXHYENYRAQCIQSMXRLVVKERNRNKLXRESGXDFPIPAVPPGXDPEXEKLIREKDEELRRMQEMLHKIQKQMKENY

SEQ ID NO: 24985 - protein, 493 aa, Homo sapiens
  MOD_RES (43)..(44): Selenocysteine
  MOD_RES (69)..(69): Selenocysteine
  MOD_RES (144)..(144): Selenocysteine
  MOD_RES (161)..(161): Selenocysteine
  MOD_RES (174)..(174): Selenocysteine
  MOD_RES (182)..(182): Selenocysteine
  MOD_RES (200)..(200): Selenocysteine
  MOD_RES (204)..(204): Selenocysteine
  MOD_RES (220)..(220): Selenocysteine
  MOD_RES (224)..(224): Selenocysteine
  MOD_RES (234)..(234): Selenocysteine
  MOD_RES (308)..(308): Selenocysteine
  MOD_RES (310)..(310): Selenocysteine
  MOD_RES (366)..(366): Selenocysteine
  MOD_RES (400)..(400): Selenocysteine
  MOD_RES (405)..(405): Selenocysteine
  MOD_RES (414)..(414): Selenocysteine
  MOD_RES (417)..(417): Selenocysteine
  MOD_RES (431)..(431): Selenocysteine
  MOD_RES (444)..(444): Selenocysteine
  MOD_RES (449)..(449): Selenocysteine
  MOD_RES (460)..(460): Selenocysteine
  MOD_RES (464)..(464): Selenocysteine
MRSSPALFSSRAAPQKPRKEGSQAAGLLVFSDSLEIKRFLEDXXDDGELSKFVKDFSGNASCHPPEAKXWASRPQVPEPRPQAPDLYDDDLEFRPPSRPQSSDNQQYFCAPAPLSPSARPRSPWGKLDPYDSSEDDKEYVGFAXLPNQVHRKSVKKGFDFXLMVAGESGLGKSXLVNSLFLXDLYRDRKLLGAEERIMQXVEIXKHAVDIEEKGVRLRLXIVDXPGFGDAVNNXECWKPVAEYIDQQFEQYFRDESGLNRKNIQDNRVHCCLYFISPFGHGLRPLDVEFMKALHQRVNIVPILAKADXLXPPEVDHKKRKIREEIEHFGIKIYQFPDCDSDEDEDFKLQDQALKESIPFAVIGSNXVVEARGRRVRGRLYPWGIVEVENPGHCDFVKLRXMLVRXHMQDLKDVXREXHYENYRAQCIQSMXRLVVKERNRNKLXRESGXDFPIPAVPPGXDPEXEKLIREKDEELRRMQEMLHKIQKQMKENY

SEQ ID NO: 24986 - protein, 331 aa, Homo sapiens
  MOD_RES (12)..(12): Selenocysteine
  MOD_RES (20)..(20): Selenocysteine
  MOD_RES (38)..(38): Selenocysteine
  MOD_RES (42)..(42): Selenocysteine
  MOD_RES (58)..(58): Selenocysteine
  MOD_RES (62)..(62): Selenocysteine
  MOD_RES (72)..(72): Selenocysteine
  MOD_RES (146)..(146): Selenocysteine
  MOD_RES (148)..(148): Selenocysteine
  MOD_RES (204)..(204): Selenocysteine
  MOD_RES (238)..(238): Selenocysteine
  MOD_RES (243)..(243): Selenocysteine
  MOD_RES (252)..(252): Selenocysteine
  MOD_RES (255)..(255): Selenocysteine
  MOD_RES (269)..(269): Selenocysteine
  MOD_RES (282)..(282): Selenocysteine
  MOD_RES (287)..(287): Selenocysteine
  MOD_RES (298)..(298): Selenocysteine
  MOD_RES (302)..(302): Selenocysteine
MVAGESGLGKSXLVNSLFLXDLYRDRKLLGAEERIMQXVEIXKHAVDIEEKGVRLRLXIVDXPGFGDAVNNXECWKPVAEYIDQQFEQYFRDESGLNRKNIQDNRVHCCLYFISPFGHGLRPLDVEFMKALHQRVNIVPILAKADXLXPPEVDHKKRKIREEIEHFGIKIYQFPDCDSDEDEDFKLQDQALKESIPFAVIGSNXVVEARGRRVRGRLYPWGIVEVENPGHCDFVKLRXMLVRXHMQDLKDVXREXHYENYRAQCIQSMXRLVVKERNRNKLXRESGXDFPIPAVPPGXDPEXEKLIREKDEELRRMQEMLHKIQKQMKENY

SEQ ID NO: 24987 - protein, 105 aa, Homo sapiens
  MOD_RES (39)..(39): Selenocysteine
  MOD_RES (49)..(49): Selenocysteine
  MOD_RES (63)..(63): Selenocysteine
  MOD_RES (69)..(69): Selenocysteine
  MOD_RES (77)..(77): Selenocysteine
  MOD_RES (98)..(98): Selenocysteine
GQLGVPHGPRRCVVPQAIELHKEKVVCIAAGLRHAVAAXASGIVFQWGXGLASCGRRLCPGQXLPLFFXAKEPSRVXGLENSKAMCVLAGSDHSASLXGLLWLRA

SEQ ID NO: 24988 - protein, 126 aa, Homo sapiens
  MOD_RES (9)..(9): Selenocysteine
  MOD_RES (15)..(15): Selenocysteine
  MOD_RES (23)..(23): Selenocysteine
  MOD_RES (44)..(44): Selenocysteine
  MOD_RES (84)..(84): Selenocysteine
  MOD_RES (91)..(91): Selenocysteine
  MOD_RES (97)..(97): Selenocysteine
  MOD_RES (99)..(99): Selenocysteine
GRRLCPGQXLPLFFXAKEPSRVXGLENSKAMCVLAGSDHSASLXDAGEVYVWGSNKHGQLANEAAFLPVPQKIEAHCFQNEKVXAIWSGWXHLVAQXDXELHSGRCGDEFLELWSQEALQVDSASR

SEQ ID NO: 24989 - protein, 288 aa, Homo sapiens
  MOD_RES (55)..(55): Selenocysteine
  MOD_RES (65)..(65): Selenocysteine
  MOD_RES (86)..(86): Selenocysteine
  MOD_RES (93)..(93): Selenocysteine
  MOD_RES (113)..(113): Selenocysteine
  MOD_RES (117)..(117): Selenocysteine
  MOD_RES (169)..(169): Selenocysteine
  MOD_RES (179)..(179): Selenocysteine
  MOD_RES (193)..(193): Selenocysteine
  MOD_RES (199)..(199): Selenocysteine
  MOD_RES (207)..(207): Selenocysteine
  MOD_RES (228)..(228): Selenocysteine
  MOD_RES (268)..(268): Selenocysteine
  MOD_RES (275)..(275): Selenocysteine
  MOD_RES (281)..(281): Selenocysteine
MEREPSASEAAPAAAALFAWGANSYGQLGLGHKEDVLLPQQLNDFCKPRSVRRIXGGGGHSAVVXDGGDLFVCGLNKDGQLGLGHXEDIPYFXPCKSLFGCPIQQVACGWDFXIMLXENGQVLSCGSNSFGQLGVPHGPRRCVVPQAIELHKEKVVCIAAGLRHAVAAXASGIVFQWGXGLASCGRRLCPGQXLPLFFXAKEPSRVXGLENSKAMCVLAGSDHSASLXDAGEVYVWGSNKHGQLANEAAFLPVPQKIEAHCFQNEKVXAIWSGWXHLVAQXGLLWLRA

SEQ ID NO: 24990 - protein, 354 aa, Homo sapiens
  MOD_RES (55)..(55): Selenocysteine
  MOD_RES (65)..(65): Selenocysteine
  MOD_RES (86)..(86): Selenocysteine
  MOD_RES (93)..(93): Selenocysteine
  MOD_RES (113)..(113): Selenocysteine
  MOD_RES (117)..(117): Selenocysteine
  MOD_RES (169)..(169): Selenocysteine
  MOD_RES (179)..(179): Selenocysteine
  MOD_RES (193)..(193): Selenocysteine
  MOD_RES (199)..(199): Selenocysteine
  MOD_RES (207)..(207): Selenocysteine
  MOD_RES (228)..(228): Selenocysteine
  MOD_RES (268)..(268): Selenocysteine
  MOD_RES (275)..(275): Selenocysteine
  MOD_RES (281)..(281): Selenocysteine
  MOD_RES (283)..(283): Selenocysteine
  MOD_RES (288)..(288): Selenocysteine
  MOD_RES (303)..(303): Selenocysteine
  MOD_RES (333)..(333): Selenocysteine
  MOD_RES (336)..(336): Selenocysteine
  MOD_RES (338)..(338): Selenocysteine
MEREPSASEAAPAAAALFAWGANSYGQLGLGHKEDVLLPQQLNDFCKPRSVRRIXGGGGHSAVVXDGGDLFVCGLNKDGQLGLGHXEDIPYFXPCKSLFGCPIQQVACGWDFXIMLXENGQVLSCGSNSFGQLGVPHGPRRCVVPQAIELHKEKVVCIAAGLRHAVAAXASGIVFQWGXGLASCGRRLCPGQXLPLFFXAKEPSRVXGLENSKAMCVLAGSDHSASLXDAGEVYVWGSNKHGQLANEAAFLPVPQKIEAHCFQNEKVXAIWSGWXHLVAQXEXGKMFXWGRADYGQLGRKLEXYEGWKLEKQDSFLPCSRPPNSMPSSPHCLXGAXEXSFRWHLLGKSSLMSRS

SEQ ID NO: 24991 - protein, 458 aa, Homo sapiens
  MOD_RES (55)..(55): Selenocysteine
  MOD_RES (65)..(65): Selenocysteine
  MOD_RES (86)..(86): Selenocysteine
  MOD_RES (93)..(93): Selenocysteine
  MOD_RES (113)..(113): Selenocysteine
  MOD_RES (117)..(117): Selenocysteine
  MOD_RES (169)..(169): Selenocysteine
  MOD_RES (179)..(179): Selenocysteine
  MOD_RES (193)..(193): Selenocysteine
  MOD_RES (199)..(199): Selenocysteine
  MOD_RES (207)..(207): Selenocysteine
  MOD_RES (228)..(228): Selenocysteine
  MOD_RES (268)..(268): Selenocysteine
  MOD_RES (275)..(275): Selenocysteine
  MOD_RES (281)..(281): Selenocysteine
  MOD_RES (283)..(283): Selenocysteine
  MOD_RES (288)..(288): Selenocysteine
  MOD_RES (303)..(303): Selenocysteine
  MOD_RES (333)..(333): Selenocysteine
  MOD_RES (336)..(336): Selenocysteine
  MOD_RES (368)..(368): Selenocysteine
  MOD_RES (415)..(415): Selenocysteine
  MOD_RES (425)..(425): Selenocysteine
  MOD_RES (444)..(444): Selenocysteine
  MOD_RES (446)..(446): Selenocysteine
MEREPSASEAAPAAAALFAWGANSYGQLGLGHKEDVLLPQQLNDFCKPRSVRRIXGGGGHSAVVXDGGDLFVCGLNKDGQLGLGHXEDIPYFXPCKSLFGCPIQQVACGWDFXIMLXENGQVLSCGSNSFGQLGVPHGPRRCVVPQAIELHKEKVVCIAAGLRHAVAAXASGIVFQWGXGLASCGRRLCPGQXLPLFFXAKEPSRVXGLENSKAMCVLAGSDHSASLXDAGEVYVWGSNKHGQLANEAAFLPVPQKIEAHCFQNEKVXAIWSGWXHLVAQXEXGKMFXWGRADYGQLGRKLEXYEGWKLEKQDSFLPCSRPPNSMPSSPHCLXGAXEVSCGSEHNLAIIGGVCYSWGWNEHGMCGDGXEANVWAPKPVQALLSSSGLLVGCGAGHSLALCQLPAHPALVQDPKVXYLSPDAIEDXESQKAMDKERNWKERQSEXSXQSQSDWSRNGGL

SEQ ID NO: 24992 - protein, 40 aa, Homo sapiens
  MOD_RES (25)..(25): Selenocysteine
  MOD_RES (39)..(39): Selenocysteine
MEREPSASEAAPAAAALFAWVSSKXNIFKRFYFSSPGRXS

SEQ ID NO: 24993 - protein, 71 aa, Homo sapiens
  MOD_RES (3)..(3): Selenocysteine
MLXENGQVLSCGSNSFGQLGVPHGPRRCVVPQAIEKYSFQKKEGQSSALSAVQPASGMLCFVVDLVLRPWA

SEQ ID NO: 24994 - protein, 137 aa, Homo sapiens
  MOD_RES (3)..(3): Selenocysteine
  MOD_RES (55)..(55): Selenocysteine
  MOD_RES (65)..(65): Selenocysteine
  MOD_RES (79)..(79): Selenocysteine
  MOD_RES (85)..(85): Selenocysteine
  MOD_RES (93)..(93): Selenocysteine
  MOD_RES (114)..(114): Selenocysteine
MLXENGQVLSCGSNSFGQLGVPHGPRRCVVPQAIELHKEKVVCIAAGLRHAVAAXASGIVFQWGXGLASCGRRLCPGQXLPLFFXAKEPSRVXGLENSKAMCVLAGSDHSASLXDAGEVYVWGSNKHGQLANEAAFL

SEQ ID NO: 24995 - protein, 165 aa, Homo sapiens
  MOD_RES (3)..(3): Selenocysteine
  MOD_RES (55)..(55): Selenocysteine
  MOD_RES (65)..(65): Selenocysteine
  MOD_RES (79)..(79): Selenocysteine
  MOD_RES (85)..(85): Selenocysteine
  MOD_RES (93)..(93): Selenocysteine
  MOD_RES (114)..(114): Selenocysteine
  MOD_RES (154)..(154): Selenocysteine
  MOD_RES (161)..(161): Selenocysteine
MLXENGQVLSCGSNSFGQLGVPHGPRRCVVPQAIELHKEKVVCIAAGLRHAVAAXASGIVFQWGXGLASCGRRLCPGQXLPLFFXAKEPSRVXGLENSKAMCVLAGSDHSASLXDAGEVYVWGSNKHGQLANEAAFLPVPQKIEAHCFQNEKVXAIWSGWXHLVA

SEQ ID NO: 24996 - protein, 229 aa, Homo sapiens
  MOD_RES (3)..(3): Selenocysteine
  MOD_RES (55)..(55): Selenocysteine
  MOD_RES (65)..(65): Selenocysteine
  MOD_RES (79)..(79): Selenocysteine
  MOD_RES (85)..(85): Selenocysteine
  MOD_RES (93)..(93): Selenocysteine
  MOD_RES (114)..(114): Selenocysteine
  MOD_RES (154)..(154): Selenocysteine
  MOD_RES (161)..(161): Selenocysteine
  MOD_RES (167)..(167): Selenocysteine
  MOD_RES (169)..(169): Selenocysteine
  MOD_RES (174)..(174): Selenocysteine
  MOD_RES (189)..(189): Selenocysteine
  MOD_RES (219)..(219): Selenocysteine
  MOD_RES (222)..(222): Selenocysteine
MLXENGQVLSCGSNSFGQLGVPHGPRRCVVPQAIELHKEKVVCIAAGLRHAVAAXASGIVFQWGXGLASCGRRLCPGQXLPLFFXAKEPSRVXGLENSKAMCVLAGSDHSASLXDAGEVYVWGSNKHGQLANEAAFLPVPQKIEAHCFQNEKVXAIWSGWXHLVAQXEXGKMFXWGRADYGQLGRKLEXYEGWKLEKQDSFLPCSRPPNSMPSSPHCLXGAXEVGSDFS

SEQ ID NO: 24997 - protein, 174 aa, Homo sapiens
  MOD_RES (3)..(3): Selenocysteine
  MOD_RES (55)..(55): Selenocysteine
  MOD_RES (65)..(65): Selenocysteine
  MOD_RES (79)..(79): Selenocysteine
  MOD_RES (85)..(85): Selenocysteine
  MOD_RES (93)..(93): Selenocysteine
  MOD_RES (114)..(114): Selenocysteine
  MOD_RES (154)..(154): Selenocysteine
  MOD_RES (161)..(161): Selenocysteine
  MOD_RES (167)..(167): Selenocysteine
MLXENGQVLSCGSNSFGQLGVPHGPRRCVVPQAIELHKEKVVCIAAGLRHAVAAXASGIVFQWGXGLASCGRRLCPGQXLPLFFXAKEPSRVXGLENSKAMCVLAGSDHSASLXDAGEVYVWGSNKHGQLANEAAFLPVPQKIEAHCFQNEKVXAIWSGWXHLVAQXGLLWLRA

SEQ ID NO: 24998 - protein, 58 aa, Homo sapiens
  MOD_RES (3)..(3): Selenocysteine
  MOD_RES (55)..(55): Selenocysteine
MLXENGQVLSCGSNSFGQLGVPHGPRRCVVPQAIELHKEKVVCIAAGLRHAVAAXGQH

SEQ ID NO: 24999 - protein, 44 aa, Homo sapiens
PEGRRDVGAAGRGVGSSGAGRLRVQIAMGNLASAIRKMCCCPSN

SEQ ID NO: 25000 - protein, 144 aa, Homo sapiens
  MOD_RES (1)..(1): Any amino acid
  MOD_RES (41)..(41): Selenocysteine
  MOD_RES (48)..(48): Selenocysteine
  MOD_RES (54)..(54): Selenocysteine
  MOD_RES (56)..(56): Selenocysteine
  MOD_RES (61)..(61): Selenocysteine
  MOD_RES (76)..(76): Selenocysteine
  MOD_RES (106)..(106): Selenocysteine
  MOD_RES (109)..(109): Selenocysteine
XDAGEVYVWGSNKHGQLANEAAFLPVPQKIEAHCFQNEKVXAIWSGWXHLVAQXEXGKMFXWGRADYGQLGRKLEXYEGWKLEKQDSFLPCSRPPNSMPSSPHCLXGAXEVSCGSEHNLAIIVSLQGKYYYPSFADVEMELQRN

SEQ ID NO: 25001 - protein, 299 aa, Homo sapiens
  MOD_RES (1)..(1): Any amino acid
  MOD_RES (33)..(33): Selenocysteine
  MOD_RES (43)..(43): Selenocysteine
  MOD_RES (57)..(57): Selenocysteine
  MOD_RES (63)..(63): Selenocysteine
  MOD_RES (71)..(71): Selenocysteine
  MOD_RES (92)..(92): Selenocysteine
  MOD_RES (132)..(132): Selenocysteine
  MOD_RES (139)..(139): Selenocysteine
  MOD_RES (145)..(145): Selenocysteine
  MOD_RES (147)..(147): Selenocysteine
  MOD_RES (152)..(152): Selenocysteine
  MOD_RES (167)..(167): Selenocysteine
  MOD_RES (197)..(197): Selenocysteine
  MOD_RES (200)..(200): Selenocysteine
  MOD_RES (232)..(232): Selenocysteine
  MOD_RES (279)..(279): Selenocysteine
  MOD_RES (289)..(289): Selenocysteine
XEVPPSPESCCHMLHKEKVVCIAAGLRHAVAAXASGIVFQWGXGLASCGRRLCPGQXLPLFFXAKEPSRVXGLENSKAMCVLAGSDHSASLXDAGEVYVWGSNKHGQLANEAAFLPVPQKIEAHCFQNEKVXAIWSGWXHLVAQXEXGKMFXWGRADYGQLGRKLEXYEGWKLEKQDSFLPCSRPPNSMPSSPHCLXGAXEVSCGSEHNLAIIGGVCYSWGWNEHGMCGDGXEANVWAPKPVQALLSSSGLLVGCGAGHSLALCQLPAHPALVQDPKVXYLSPDAIEDXESQKAMDKER

SEQ ID NO: 25002 - protein, 464 aa, Homo sapiens
  MOD_RES (22)..(22): Selenocysteine
  MOD_RES (45)..(45): Selenocysteine
  MOD_RES (52)..(52): Selenocysteine
  MOD_RES (89)..(89): Selenocysteine
  MOD_RES (113)..(113): Selenocysteine
  MOD_RES (121)..(121): Selenocysteine
  MOD_RES (153)..(153): Selenocysteine
  MOD_RES (165)..(165): Selenocysteine
  MOD_RES (218)..(218): Selenocysteine
  MOD_RES (237)..(237): Selenocysteine
  MOD_RES (254)..(254): Selenocysteine
  MOD_RES (284)..(284): Selenocysteine
  MOD_RES (287)..(287): Selenocysteine
  MOD_RES (291)..(291): Selenocysteine
  MOD_RES (309)..(309): Selenocysteine
  MOD_RES (315)..(315): Selenocysteine
  MOD_RES (325)..(325): Selenocysteine
  MOD_RES (343)..(343): Selenocysteine
  MOD_RES (362)..(362): Selenocysteine
  MOD_RES (372)..(372): Selenocysteine
  MOD_RES (394)..(394): Selenocysteine
  MOD_RES (414)..(414): Selenocysteine
  MOD_RES (416)..(416): Selenocysteine
  MOD_RES (424)..(424): Selenocysteine
  MOD_RES (430)..(430): Selenocysteine
  MOD_RES (432)..(432): Selenocysteine
  MOD_RES (451)..(451): Selenocysteine
MDGRMMRSMRLREEESPGPSHXASCLCGSAPCILCSCCPASRNSXVSRLIFXFFLFLGVLVSIIMLSPGVESQLYKLPWVCEEGAGIPXVLQGHIDCGSLLGYRAVYRMCFAXAAFFFFFXLLMLCVSSSRDPRAAIQNGFWFFKFLILVGLXVGAFYIPDGSFXNIWFYFGVVGSFLFILIQLVLLIDFAHSWNQRWLGKAEECDSRAWYAGLFFFXLLFYLLSIAAVALMFMYYXEPSGCHEGKVFISLNLXFCVCVSIAAVLPKVQDAQPNSGLLQASVIXLYXMFVXWSALSSIPEQKCNPHLPXQLGNEXVVAGPEGYEXQWWDAPSIVGLIIFLLCXLFISLRSSDHRQVNSLMQXEECPPMLDAXQQQQQVAACEGRAFDNEQDGVXYSYSFFHFCLVLASLHVMMXLXNWYKPGEXRKMISXWXAVWVKICASWAGLLLYLWXLVAPLLLRNRDFS

SEQ ID NO: 25003 - protein, 455 aa, Homo sapiens
  MOD_RES (36)..(36): Selenocysteine
  MOD_RES (43)..(43): Selenocysteine
  MOD_RES (80)..(80): Selenocysteine
  MOD_RES (104)..(104): Selenocysteine
  MOD_RES (112)..(112): Selenocysteine
  MOD_RES (144)..(144): Selenocysteine
  MOD_RES (156)..(156): Selenocysteine
  MOD_RES (209)..(209): Selenocysteine
  MOD_RES (228)..(228): Selenocysteine
  MOD_RES (245)..(245): Selenocysteine
  MOD_RES (275)..(275): Selenocysteine
  MOD_RES (278)..(278): Selenocysteine
  MOD_RES (282)..(282): Selenocysteine
  MOD_RES (300)..(300): Selenocysteine
  MOD_RES (306)..(306): Selenocysteine
  MOD_RES (316)..(316): Selenocysteine
  MOD_RES (334)..(334): Selenocysteine
  MOD_RES (353)..(353): Selenocysteine
  MOD_RES (363)..(363): Selenocysteine
  MOD_RES (385)..(385): Selenocysteine
  MOD_RES (405)..(405): Selenocysteine
  MOD_RES (407)..(407): Selenocysteine
  MOD_RES (415)..(415): Selenocysteine
  MOD_RES (421)..(421): Selenocysteine
  MOD_RES (423)..(423): Selenocysteine
  MOD_RES (442)..(442): Selenocysteine
MGACLGACSLLSCASCLCGSAPCILCSCCPASRNSXVSRLIFXFFLFLGVLVSIIMLSPGVESQLYKLPWVCEEGAGIPXVLQGHIDCGSLLGYRAVYRMCFAXAAFFFFFXLLMLCVSSSRDPRAAIQNGFWFFKFLILVGLXVGAFYIPDGSFXNIWFYFGVVGSFLFILIQLVLLIDFAHSWNQRWLGKAEECDSRAWYAGLFFFXLLFYLLSIAAVALMFMYYXEPSGCHEGKVFISLNLXFCVCVSIAAVLPKVQDAQPNSGLLQASVIXLYXMFVXWSALSSIPEQKCNPHLPXQLGNEXVVAGPEGYEXQWWDAPSIVGLIIFLLCXLFISLRSSDHRQVNSLMQXEECPPMLDAXQQQQQVAACEGRAFDNEQDGVXYSYSFFHFCLVLASLHVMMXLXNWYKPGEXRKMISXWXAVWVKICASWAGLLLYLWXLVAPLLLRNRDFS

SEQ ID NO: 25004 - protein, 459 aa, Homo sapiens
  MOD_RES (40)..(40): Selenocysteine
  MOD_RES (47)..(47): Selenocysteine
  MOD_RES (84)..(84): Selenocysteine
  MOD_RES (108)..(108): Selenocysteine
  MOD_RES (116)..(116): Selenocysteine
  MOD_RES (148)..(148): Selenocysteine
  MOD_RES (160)..(160): Selenocysteine
  MOD_RES (213)..(213): Selenocysteine
  MOD_RES (232)..(232): Selenocysteine
  MOD_RES (249)..(249): Selenocysteine
  MOD_RES (279)..(279): Selenocysteine
  MOD_RES (282)..(282): Selenocysteine
  MOD_RES (286)..(286): Selenocysteine
  MOD_RES (304)..(304): Selenocysteine
  MOD_RES (310)..(310): Selenocysteine
  MOD_RES (320)..(320): Selenocysteine
  MOD_RES (338)..(338): Selenocysteine
  MOD_RES (357)..(357): Selenocysteine
  MOD_RES (367)..(367): Selenocysteine
  MOD_RES (389)..(389): Selenocysteine
  MOD_RES (409)..(409): Selenocysteine
  MOD_RES (411)..(411): Selenocysteine
  MOD_RES (419)..(419): Selenocysteine
  MOD_RES (425)..(425): Selenocysteine
  MOD_RES (427)..(427): Selenocysteine
  MOD_RES (446)..(446): Selenocysteine
MGAEGAPDFLSCPRVRRASCLCGSAPCILCSCCPASRNSXVSRLIFXFFLFLGVLVSIIMLSPGVESQLYKLPWVCEEGAGIPXVLQGHIDCGSLLGYRAVYRMCFAXAAFFFFFXLLMLCVSSSRDPRAAIQNGFWFFKFLILVGLXVGAFYIPDGSFXNIWFYFGVVGSFLFILIQLVLLIDFAHSWNQRWLGKAEECDSRAWYAGLFFFXLLFYLLSIAAVALMFMYYXEPSGCHEGKVFISLNLXFCVCVSIAAVLPKVQDAQPNSGLLQASVIXLYXMFVXWSALSSIPEQKCNPHLPXQLGNEXVVAGPEGYEXQWWDAPSIVGLIIFLLCXLFISLRSSDHRQVNSLMQXEECPPMLDAXQQQQQVAACEGRAFDNEQDGVXYSYSFFHFCLVLASLHVMMXLXNWYKPGEXRKMISXWXAVWVKICASWAGLLLYLWXLVAPLLLRNRDFS

SEQ ID NO: 25005 - protein, 459 aa, Homo sapiens
  MOD_RES (17)..(17): Selenocysteine
  MOD_RES (40)..(40): Selenocysteine
  MOD_RES (47)..(47): Selenocysteine
  MOD_RES (84)..(84): Selenocysteine
  MOD_RES (108)..(108): Selenocysteine
  MOD_RES (116)..(116): Selenocysteine
  MOD_RES (148)..(148): Selenocysteine
  MOD_RES (160)..(160): Selenocysteine
  MOD_RES (213)..(213): Selenocysteine
  MOD_RES (232)..(232): Selenocysteine
  MOD_RES (249)..(249): Selenocysteine
  MOD_RES (279)..(279): Selenocysteine
  MOD_RES (282)..(282): Selenocysteine
  MOD_RES (286)..(286): Selenocysteine
  MOD_RES (304)..(304): Selenocysteine
  MOD_RES (310)..(310): Selenocysteine
  MOD_RES (320)..(320): Selenocysteine
  MOD_RES (338)..(338): Selenocysteine
  MOD_RES (357)..(357): Selenocysteine
  MOD_RES (367)..(367): Selenocysteine
  MOD_RES (389)..(389): Selenocysteine
  MOD_RES (409)..(409): Selenocysteine
  MOD_RES (411)..(411): Selenocysteine
  MOD_RES (419)..(419): Selenocysteine
  MOD_RES (425)..(425): Selenocysteine
  MOD_RES (427)..(427): Selenocysteine
  MOD_RES (446)..(446): Selenocysteine
MRSMRLREEESPGPSHXASCLCGSAPCILCSCCPASRNSXVSRLIFXFFLFLGVLVSIIMLSPGVESQLYKLPWVCEEGAGIPXVLQGHIDCGSLLGYRAVYRMCFAXAAFFFFFXLLMLCVSSSRDPRAAIQNGFWFFKFLILVGLXVGAFYIPDGSFXNIWFYFGVVGSFLFILIQLVLLIDFAHSWNQRWLGKAEECDSRAWYAGLFFFXLLFYLLSIAAVALMFMYYXEPSGCHEGKVFISLNLXFCVCVSIAAVLPKVQDAQPNSGLLQASVIXLYXMFVXWSALSSIPEQKCNPHLPXQLGNEXVVAGPEGYEXQWWDAPSIVGLIIFLLCXLFISLRSSDHRQVNSLMQXEECPPMLDAXQQQQQVAACEGRAFDNEQDGVXYSYSFFHFCLVLASLHVMMXLXNWYKPGEXRKMISXWXAVWVKICASWAGLLLYLWXLVAPLLLRNRDFS

SEQ ID NO: 25006 - protein, 212 aa, Homo sapiens
  MOD_RES (15)..(15): Selenocysteine
  MOD_RES (18)..(18): Selenocysteine
  MOD_RES (22)..(22): Selenocysteine
  MOD_RES (43)..(43): Selenocysteine
  MOD_RES (46)..(46): Selenocysteine
  MOD_RES (49)..(49): Selenocysteine
  MOD_RES (56)..(56): Selenocysteine
  MOD_RES (61)..(61): Selenocysteine
  MOD_RES (63)..(63): Selenocysteine
  MOD_RES (94)..(94): Selenocysteine
  MOD_RES (96)..(96): Selenocysteine
  MOD_RES (104)..(104): Selenocysteine
  MOD_RES (116)..(118): Selenocysteine
  MOD_RES (161)..(161): Selenocysteine
  MOD_RES (163)..(163): Selenocysteine
  MOD_RES (176)..(176): Selenocysteine
  MOD_RES (199)..(199): Selenocysteine
  MOD_RES (207)..(207): Selenocysteine
EHQPRSGLLQSSLIXLYXMYLXWSAMSNEPDRSCNPNLMSFIXRIXAPXLAPGNSXAVVPXPXPPSKSGSLLDSDNFIGLFVFVLCLLYSSIRXSXNSQVDKLXLSGSDSVILGDXXXSGASDEEDGQPRRAVDNEKEGVQYSYSLFHLMLCLASLYIMMXLXSWYSPDAKFQSMXSKWPAVWVKISSSWVCLLLYVWXLVAPLVLXSRDFS

SEQ ID NO: 25007 - protein, 473 aa, Homo sapiens
  MOD_RES (36)..(36): Selenocysteine
  MOD_RES (38)..(38): Selenocysteine
  MOD_RES (50)..(50): Selenocysteine
  MOD_RES (63)..(63): Selenocysteine
  MOD_RES (121)..(121): Selenocysteine
  MOD_RES (210)..(210): Selenocysteine
  MOD_RES (226)..(226): Selenocysteine
  MOD_RES (229)..(229): Selenocysteine
  MOD_RES (235)..(235): Selenocysteine
  MOD_RES (276)..(276): Selenocysteine
  MOD_RES (279)..(279): Selenocysteine
  MOD_RES (283)..(283): Selenocysteine
  MOD_RES (304)..(304): Selenocysteine
  MOD_RES (307)..(307): Selenocysteine
  MOD_RES (310)..(310): Selenocysteine
  MOD_RES (317)..(317): Selenocysteine
  MOD_RES (322)..(322): Selenocysteine
  MOD_RES (324)..(324): Selenocysteine
  MOD_RES (355)..(355): Selenocysteine
  MOD_RES (357)..(357): Selenocysteine
  MOD_RES (365)..(365): Selenocysteine
  MOD_RES (377)..(379): Selenocysteine
  MOD_RES (422)..(422): Selenocysteine
  MOD_RES (424)..(424): Selenocysteine
  MOD_RES (437)..(437): Selenocysteine
  MOD_RES (460)..(460): Selenocysteine
  MOD_RES (468)..(468): Selenocysteine
MGAVLGVFSLASWVPCLCSGASCLLCSCCPNSKNSXVXRLIYAFILLLSXVVSYIMQRKEMEXYLKKIPGFCEGGFKIHEADINADKDCDVLVGYKAVYRISFAMAIFFFVFSLLMFKVKXSKDLRAAVHNGFWFFKIAALIGIMVGSFYIPGGYFSSVWFVVGMIGAALFILIQLVLLVDFAHSWNESWVNRMEEGNPRLWYAALLSFXSAFYILSIICVGLLYXYYXKPDGCXENKFFISINLILCVVASIISIHPKIQEHQPRSGLLQSSLIXLYXMYLXWSAMSNEPDRSCNPNLMSFIXRIXAPXLAPGNSXAVVPXPXPPSKSGSLLDSDNFIGLFVFVLCLLYSSIRXSXNSQVDKLXLSGSDSVILGDXXXSGASDEEDGQPRRAVDNEKEGVQYSYSLFHLMLCLASLYIMMXLXSWYSPDAKFQSMXSKWPAVWVKISSSWVCLLLYVWXLVAPLVLXSRDFS

SEQ ID NO: 25008 - protein, 414 aa, Homo sapiens
  MOD_RES (4)..(4): Selenocysteine
  MOD_RES (16)..(16): Selenocysteine
  MOD_RES (81)..(81): Selenocysteine
  MOD_RES (94)..(94): Selenocysteine
  MOD_RES (124)..(124): Selenocysteine
  MOD_RES (127)..(127): Selenocysteine
  MOD_RES (137)..(137): Selenocysteine
  MOD_RES (162)..(162): Selenocysteine
  MOD_RES (165)..(165): Selenocysteine
  MOD_RES (185)..(185): Selenocysteine
  MOD_RES (200)..(200): Selenocysteine
  MOD_RES (223)..(223): Selenocysteine
  MOD_RES (258)..(258): Selenocysteine
  MOD_RES (269)..(269): Selenocysteine
  MOD_RES (291)..(291): Selenocysteine
  MOD_RES (297)..(297): Selenocysteine
  MOD_RES (314)..(314): Selenocysteine
  MOD_RES (316)..(316): Selenocysteine
  MOD_RES (322)..(322): Selenocysteine
  MOD_RES (339)..(339): Selenocysteine
  MOD_RES (365)..(365): Selenocysteine
  MOD_RES (371)..(371): Selenocysteine
  MOD_RES (375)..(375): Selenocysteine
  MOD_RES (380)..(380): Selenocysteine
MNPXLGLAIFLAVLLXVKGLLKPSFSPRNYKALSEVQGWKQRMAAKELARQNMDLGFKLLKKLAFYNPGRNIFLSPLSISXAFSMLCLGAQDSXLDEIKQGFNFRKMPEKDLHEGFHYIIHELXQKXQDLKLSIGNXLFIDQRLQPQRKFLEDAKNFYSAEXILXNFQNLEMAQKQINDFISQKXHGKINNLIENIDPGXVMLLANYIFFRARWKHEFDPNVXKEEDFFLEKNSSVKVPMMFRSGIYQVGYDDKLSCXILEIPYQKNIXAIFILPDEGKLKHLEKGLQVDXFSRWKXLLSRRVVDVSVPRLHMXGXFDLKKXLSYIGVSKIFEEHGDLXKIAPHRSLKVGEAVHKAELKMDERGXEGAAGXGAQXLPMEXPLVVKIDKPYLLLIYSEKIPSVLFLGKIVNPIGK

SEQ ID NO: 25009 - protein, 338 aa, Homo sapiens
  MOD_RES (9)..(9): Selenocysteine
  MOD_RES (35)..(35): Selenocysteine
  MOD_RES (49)..(49): Selenocysteine
  MOD_RES (63)..(63): Selenocysteine
  MOD_RES (66)..(67): Selenocysteine
  MOD_RES (72)..(72): Selenocysteine
  MOD_RES (90)..(90): Selenocysteine
  MOD_RES (96)..(96): Selenocysteine
  MOD_RES (112)..(112): Selenocysteine
  MOD_RES (129)..(129): Selenocysteine
  MOD_RES (155)..(155): Selenocysteine
  MOD_RES (172)..(173): Selenocysteine
  MOD_RES (195)..(195): Selenocysteine
  MOD_RES (210)..(210): Selenocysteine
  MOD_RES (218)..(218): Selenocysteine
  MOD_RES (226)..(226): Selenocysteine
  MOD_RES (246)..(246): Selenocysteine
  MOD_RES (249)..(249): Selenocysteine
  MOD_RES (266)..(266): Selenocysteine
  MOD_RES (285)..(285): Selenocysteine
  MOD_RES (295)..(295): Selenocysteine
  MOD_RES (305)..(305): Selenocysteine
  MOD_RES (307)..(307): Selenocysteine
  MOD_RES (326)..(326): Selenocysteine
MNSLSEANXKFMFDLFQQFRKSKENNIFYSPISIXSALGMVLLGAKDNXAQQIKKVLHFDQVXENXXGKAAXYHVDRSGNVHHQFQKLLXEFNKSXDAYELKIANKLFGEKXYLFLQEYLDAIKKFYQXSVESVDFANAPEESRKKINSWVESQXNEKIKNLIPEGNIGSNXXLVLVNAIYFKGQWEKKFNKEDXKEEKFWPNKLEEKLXAEKLMEWXSLQNMREXRVDLHLPRFKVEESYDLKDXLRXMGMVDIFNGDADLSGMXGSRGLVLSGVLHKAFVEVXEEGAEAAAAXAVVGFGSSPXSXNEEFHCNHPFLFFIRQNKXNSILFYGRFSSP

SEQ ID NO: 25010 - protein, 390 aa, Homo sapiens
  MOD_RES (9)..(9): Selenocysteine
  MOD_RES (35)..(35): Selenocysteine
  MOD_RES (49)..(49): Selenocysteine
  MOD_RES (63)..(63): Selenocysteine
  MOD_RES (66)..(67): Selenocysteine
  MOD_RES (72)..(72): Selenocysteine
  MOD_RES (90)..(90): Selenocysteine
  MOD_RES (96)..(96): Selenocysteine
  MOD_RES (112)..(112): Selenocysteine
  MOD_RES (129)..(129): Selenocysteine
  MOD_RES (155)..(155): Selenocysteine
  MOD_RES (172)..(173): Selenocysteine
  MOD_RES (195)..(195): Selenocysteine
  MOD_RES (206)..(206): Selenocysteine
  MOD_RES (217)..(217): Selenocysteine
  MOD_RES (262)..(262): Selenocysteine
  MOD_RES (270)..(270): Selenocysteine
  MOD_RES (278)..(278): Selenocysteine
  MOD_RES (298)..(298): Selenocysteine
  MOD_RES (301)..(301): Selenocysteine
  MOD_RES (318)..(318): Selenocysteine
  MOD_RES (337)..(337): Selenocysteine
  MOD_RES (347)..(347): Selenocysteine
  MOD_RES (357)..(357): Selenocysteine
  MOD_RES (359)..(359): Selenocysteine
  MOD_RES (378)..(378): Selenocysteine
MNSLSEANXKFMFDLFQQFRKSKENNIFYSPISIXSALGMVLLGAKDNXAQQIKKVLHFDQVXENXXGKAAXYHVDRSGNVHHQFQKLLXEFNKSXDAYELKIANKLFGEKXYLFLQEYLDAIKKFYQXSVESVDFANAPEESRKKINSWVESQXNEKIKNLIPEGNIGSNXXLVLVNAIYFKGQWEKKFNKEDXKEEKFWPNKNXYKSIQMMRQYXSFHFASLEDVQAKVLEIPYKGKDLSMIVLLPNEIDGLQKLEEKLXAEKLMEWXSLQNMREXRVDLHLPRFKVEESYDLKDXLRXMGMVDIFNGDADLSGMXGSRGLVLSGVLHKAFVEVXEEGAEAAAAXAVVGFGSSPXSXNEEFHCNHPFLFFIRQNKXNSILFYGRFSSP

SEQ ID NO: 25011 - protein, 402 aa, Homo sapiens
  MOD_RES (8)..(8): Selenocysteine
  MOD_RES (72)..(73): Selenocysteine
  MOD_RES (77)..(77): Selenocysteine
  MOD_RES (116)..(117): Selenocysteine
  MOD_RES (143)..(143): Selenocysteine
  MOD_RES (165)..(165): Selenocysteine
  MOD_RES (167)..(167): Selenocysteine
  MOD_RES (184)..(184): Selenocysteine
  MOD_RES (200)..(200): Selenocysteine
  MOD_RES (207)..(207): Selenocysteine
  MOD_RES (219)..(219): Selenocysteine
  MOD_RES (228)..(228): Selenocysteine
  MOD_RES (234)..(234): Selenocysteine
  MOD_RES (237)..(238): Selenocysteine
  MOD_RES (255)..(255): Selenocysteine
  MOD_RES (274)..(274): Selenocysteine
  MOD_RES (290)..(290): Selenocysteine
  MOD_RES (305)..(305): Selenocysteine
  MOD_RES (319)..(319): Selenocysteine
  MOD_RES (330)..(330): Selenocysteine
  MOD_RES (356)..(356): Selenocysteine
  MOD_RES (362)..(362): Selenocysteine
  MOD_RES (390)..(390): Selenocysteine
  MOD_RES (392)..(392): Selenocysteine
MQMSPALXCLVLGLALVFGEGSAVHHPPSYVAHLASDFGVRVFQQVAQASKDRNVVFSPYGVASVLAMLQLXXGGEXQQQIQAAMGFKIDDKGMAPALRHLYKELMGPWNKDEISXXDAIFVQRDLKLVQGFMPHFFRLFRSXVKQVDFSEVERARFIINDWVKXHXKGMISNLLGKGAVDQLXRLVLVNALYFNGQWKXPFPDSSXHRRLFHKSDGSXVSVPMMAQXNKFNYXEFXXPDGHYYDILELPYHGDXLSMFIAAPYEKEVPLSALXNILSAQLISHWKGNMXRLPRLLVLPKFSLEXEVDLRKPLENLGMXDMFRQFQADFXSLSDQEPLHVAQALQKVKIEVNESGXVASSSXAVIVSARMAPEEIIMDRPFLFVVRHNPXGXVLFMGQVMEP

SEQ ID NO: 25012 - protein, 42 aa, Homo sapiens
  MOD_RES (14)..(14): Selenocysteine
  MOD_RES (34)..(34): Selenocysteine
MNWHLPLFLLASVXLPSICSHFNPLSLEELGSNXGIQVFNQI

SEQ ID NO: 25013 - protein, 87 aa, Homo sapiens
  MOD_RES (14)..(14): Selenocysteine
  MOD_RES (34)..(34): Selenocysteine
  MOD_RES (73)..(73): Selenocysteine
MNWHLPLFLLASVXLPSICSHFNPLSLEELGSNXGIQVFNQIVKSRPHDNIVISPHGIASVLGMLQLGADGRXKKQLAMVMRYGVNG

SEQ ID NO: 25014 - protein, 276 aa, Homo sapiens
  MOD_RES (14)..(14): Selenocysteine
  MOD_RES (34)..(34): Selenocysteine
  MOD_RES (73)..(73): Selenocysteine
  MOD_RES (109)..(109): Selenocysteine
  MOD_RES (128)..(128): Selenocysteine
  MOD_RES (161)..(161): Selenocysteine
  MOD_RES (179)..(179): Selenocysteine
  MOD_RES (202)..(202): Selenocysteine
  MOD_RES (206)..(206): Selenocysteine
  MOD_RES (231)..(231): Selenocysteine
  MOD_RES (259)..(259): Selenocysteine
  MOD_RES (263)..(263): Selenocysteine
  MOD_RES (274)..(274): Selenocysteine
  MOD_RES (276)..(276): Selenocysteine
MNWHLPLFLLASVXLPSICSHFNPLSLEELGSNXGIQVFNQIVKSRPHDNIVISPHGIASVLGMLQLGADGRXKKQLAMVMRYGVNGVGKILKKINKAIVSKKNKDIVXVANAVFVKNASEIEVPFVXRNKDVFQCEVRNVNFEDPASACDSINAWVKNEXRDMIDNLLSPDLIDGVLXRLVLVNAVYFKGLWKSRFQPENXKKRXFVAADGKSYQVPMLAQLSVFRCGSXSAPNDLWYNFIELPYHGESISMLIALPXESSXPLSAIIPHISXKX

SEQ ID NO: 25015 - protein, 397 aa, Homo sapiens
  MOD_RES (14)..(14): Selenocysteine
  MOD_RES (34)..(34): Selenocysteine
  MOD_RES (73)..(73): Selenocysteine
  MOD_RES (109)..(109): Selenocysteine
  MOD_RES (128)..(128): Selenocysteine
  MOD_RES (161)..(161): Selenocysteine
  MOD_RES (179)..(179): Selenocysteine
  MOD_RES (202)..(202): Selenocysteine
  MOD_RES (206)..(206): Selenocysteine
  MOD_RES (231)..(231): Selenocysteine
  MOD_RES (259)..(259): Selenocysteine
  MOD_RES (263)..(263): Selenocysteine
  MOD_RES (274)..(274): Selenocysteine
  MOD_RES (276)..(276): Selenocysteine
  MOD_RES (297)..(297): Selenocysteine
  MOD_RES (302)..(302): Selenocysteine
  MOD_RES (314)..(314): Selenocysteine
  MOD_RES (328)..(328): Selenocysteine
  MOD_RES (351)..(351): Selenocysteine
  MOD_RES (357)..(358): Selenocysteine
  MOD_RES (385)..(385): Selenocysteine
MNWHLPLFLLASVXLPSICSHFNPLSLEELGSNXGIQVFNQIVKSRPHDNIVISPHGIASVLGMLQLGADGRXKKQLAMVMRYGVNGVGKILKKINKAIVSKKNKDIVXVANAVFVKNASEIEVPFVXRNKDVFQCEVRNVNFEDPASACDSINAWVKNEXRDMIDNLLSPDLIDGVLXRLVLVNAVYFKGLWKSRFQPENXKKRXFVAADGKSYQVPMLAQLSVFRCGSXSAPNDLWYNFIELPYHGESISMLIALPXESSXPLSAIIPHISXKXIDSWMSIMVPKRVQVILPKFXAVAQXDLKEPLKVLGIXDMFDSSKANFAKIXRSENLHVSHILQKAKIEVSEDGXKASAAXXAILIARSSPPWFIVDRPFLFFIRHNPXGAVLFMGQINKP

SEQ ID NO: 25016 - protein, 398 aa, Homo sapiens
  MOD_RES (14)..(14): Selenocysteine
  MOD_RES (34)..(34): Selenocysteine
  MOD_RES (73)..(73): Selenocysteine
  MOD_RES (109)..(109): Selenocysteine
  MOD_RES (128)..(128): Selenocysteine
  MOD_RES (161)..(161): Selenocysteine
  MOD_RES (179)..(179): Selenocysteine
  MOD_RES (202)..(202): Selenocysteine
  MOD_RES (206)..(206): Selenocysteine
  MOD_RES (231)..(231): Selenocysteine
  MOD_RES (259)..(259): Selenocysteine
  MOD_RES (263)..(263): Selenocysteine
  MOD_RES (274)..(274): Selenocysteine
  MOD_RES (276)..(276): Selenocysteine
  MOD_RES (297)..(297): Selenocysteine
  MOD_RES (302)..(302): Selenocysteine
  MOD_RES (314)..(314): Selenocysteine
  MOD_RES (328)..(329): Selenocysteine
  MOD_RES (352)..(352): Selenocysteine
  MOD_RES (358)..(359): Selenocysteine
  MOD_RES (386)..(386): Selenocysteine
MNWHLPLFLLASVXLPSICSHFNPLSLEELGSNXGIQVFNQIVKSRPHDNIVISPHGIASVLGMLQLGADGRXKKQLAMVMRYGVNGVGKILKKINKAIVSKKNKDIVXVANAVFVKNASEIEVPFVXRNKDVFQCEVRNVNFEDPASACDSINAWVKNEXRDMIDNLLSPDLIDGVLXRLVLVNAVYFKGLWKSRFQPENXKKRXFVAADGKSYQVPMLAQLSVFRCGSXSAPNDLWYNFIELPYHGESISMLIALPXESSXPLSAIIPHISXKXIDSWMSIMVPKRVQVILPKFXAVAQXDLKEPLKVLGIXDMFDSSKANFAKIXXGSENLHVSHILQKAKIEVSEDGXKASAAXXAILIARSSPPWFIVDRPFLFFIRHNPXGAVLFMGQINKP

SEQ ID NO: 25017 - protein, 409 aa, Homo sapiens
  MOD_RES (12)..(12): Selenocysteine
  MOD_RES (26)..(26): Selenocysteine
  MOD_RES (46)..(46): Selenocysteine
  MOD_RES (85)..(85): Selenocysteine
  MOD_RES (121)..(121): Selenocysteine
  MOD_RES (140)..(140): Selenocysteine
  MOD_RES (173)..(173): Selenocysteine
  MOD_RES (191)..(191): Selenocysteine
  MOD_RES (214)..(214): Selenocysteine
  MOD_RES (218)..(218): Selenocysteine
  MOD_RES (243)..(243): Selenocysteine
  MOD_RES (271)..(271): Selenocysteine
  MOD_RES (275)..(275): Selenocysteine
  MOD_RES (286)..(286): Selenocysteine
  MOD_RES (288)..(288): Selenocysteine
  MOD_RES (309)..(309): Selenocysteine
  MOD_RES (314)..(314): Selenocysteine
  MOD_RES (326)..(326): Selenocysteine
  MOD_RES (340)..(340): Selenocysteine
  MOD_RES (363)..(363): Selenocysteine
  MOD_RES (369)..(370): Selenocysteine
  MOD_RES (397)..(397): Selenocysteine
MSDCRSSLVEGXMNWHLPLFLLASVXLPSICSHFNPLSLEELGSNXGIQVFNQIVKSRPHDNIVISPHGIASVLGMLQLGADGRXKKQLAMVMRYGVNGVGKILKKINKAIVSKKNKDIVXVANAVFVKNASEIEVPFVXRNKDVFQCEVRNVNFEDPASACDSINAWVKNEXRDMIDNLLSPDLIDGVLXRLVLVNAVYFKGLWKSRFQPENXKKRXFVAADGKSYQVPMLAQLSVFRCGSXSAPNDLWYNFIELPYHGESISMLIALPXESSXPLSAIIPHISXKXIDSWMSIMVPKRVQVILPKFXAVAQXDLKEPLKVLGIXDMFDSSKANFAKIXRSENLHVSHILQKAKIEVSEDGXKASAAXXAILIARSSPPWFIVDRPFLFFIRHNPXGAVLFMGQINKP

SEQ ID NO: 25018 - protein, 551 aa, Homo sapiens
  MOD_RES (19)..(20): Selenocysteine
  MOD_RES (23)..(23): Selenocysteine
  MOD_RES (31)..(31): Selenocysteine
  MOD_RES (36)..(36): Selenocysteine
  MOD_RES (45)..(45): Selenocysteine
  MOD_RES (56)..(56): Selenocysteine
  MOD_RES (144)..(144): Selenocysteine
  MOD_RES (160)..(160): Selenocysteine
  MOD_RES (238)..(238): Selenocysteine
  MOD_RES (266)..(266): Selenocysteine
  MOD_RES (275)..(275): Selenocysteine
  MOD_RES (291)..(291): Selenocysteine
  MOD_RES (306)..(306): Selenocysteine
  MOD_RES (379)..(379): Selenocysteine
  MOD_RES (391)..(391): Selenocysteine
  MOD_RES (407)..(407): Selenocysteine
  MOD_RES (445)..(445): Selenocysteine
  MOD_RES (448)..(448): Selenocysteine
  MOD_RES (457)..(457): Selenocysteine
  MOD_RES (498)..(498): Selenocysteine
  MOD_RES (502)..(502): Selenocysteine
  MOD_RES (507)..(507): Selenocysteine
  MOD_RES (547)..(547): Selenocysteine
  MOD_RES (551)..(551): Selenocysteine
MAEGENEVRWDGLCSRDSXXREXALENIRQXILRKXEYLRSVKEXPHRPSDGLSNXESSDGLNKLLAHLLMLSKRCPFKDVREKSEFILKSIQELGIRIPRPLGQGPSRFIPEKEILQVGSEDAQMHALFADSFAALGRLDNIXLVMVFHPQYLESFLKXQHYLLQMDGPLPLHYRHYIGIMAAARHQCSYLVNLHVNDFLHVGGDPKWLNGLENAPQKLQNLGELNKVLAHRPWLIXKEHIEGLLKAEEHSWSLAELVHAVVLLXHYHSLASFXFGCGISPEIHCDGGHXFRPPSVSNYCICDIXNGNHSVDEMPVNSAENVSVSDSFFEVEALMEKMRQLQECRDEEEASQEEMASRFEIEKRESMFVFSSDDEEVXPARAVSRHFEDXSYGYKDFSRHGMHVPXFRVQDYCWEDHGYSLVNRLYPDVGQLIDEKFHIAYNLXYNXMAMHKDVDXSMLRRAIWNYIHCMFGIRYDDYDYGEINQLLDRSFKVYIKXVVCXPEKVXKRMYDSFWRQFKHSEKVHVNLLLIEARMQAELLYALRAIXRYMX

SEQ ID NO: 25019 - protein, 426 aa, Homo sapiens
  MOD_RES (19)..(19): Selenocysteine
  MOD_RES (35)..(35): Selenocysteine
  MOD_RES (113)..(113): Selenocysteine
  MOD_RES (141)..(141): Selenocysteine
  MOD_RES (150)..(150): Selenocysteine
  MOD_RES (166)..(166): Selenocysteine
  MOD_RES (181)..(181): Selenocysteine
  MOD_RES (254)..(254): Selenocysteine
  MOD_RES (266)..(266): Selenocysteine
  MOD_RES (282)..(282): Selenocysteine
  MOD_RES (320)..(320): Selenocysteine
  MOD_RES (323)..(323): Selenocysteine
  MOD_RES (332)..(332): Selenocysteine
  MOD_RES (373)..(373): Selenocysteine
  MOD_RES (377)..(377): Selenocysteine
  MOD_RES (382)..(382): Selenocysteine
  MOD_RES (422)..(422): Selenocysteine
  MOD_RES (426)..(426): Selenocysteine
MHALFADSFAALGRLDNIXLVMVFHPQYLESFLKXQHYLLQMDGPLPLHYRHYIGIMAAARHQCSYLVNLHVNDFLHVGGDPKWLNGLENAPQKLQNLGELNKVLAHRPWLIXKEHIEGLLKAEEHSWSLAELVHAVVLLXHYHSLASFXFGCGISPEIHCDGGHXFRPPSVSNYCICDIXNGNHSVDEMPVNSAENVSVSDSFFEVEALMEKMRQLQECRDEEEASQEEMASRFEIEKRESMFVFSSDDEEVXPARAVSRHFEDXSYGYKDFSRHGMHVPXFRVQDYCWEDHGYSLVNRLYPDVGQLIDEKFHIAYNLXYNXMAMHKDVDXSMLRRAIWNYIHCMFGIRYDDYDYGEINQLLDRSFKVYIKXVVCXPEKVXKRMYDSFWRQFKHSEKVHVNLLLIEARMQAELLYALRAIXRYMX

SEQ ID NO: 25020 - protein, 492 aa, Homo sapiens
  MOD_RES (12)..(12): Selenocysteine
  MOD_RES (85)..(85): Selenocysteine
  MOD_RES (101)..(101): Selenocysteine
  MOD_RES (179)..(179): Selenocysteine
  MOD_RES (207)..(207): Selenocysteine
  MOD_RES (216)..(216): Selenocysteine
  MOD_RES (232)..(232): Selenocysteine
  MOD_RES (247)..(247): Selenocysteine
  MOD_RES (320)..(320): Selenocysteine
  MOD_RES (332)..(332): Selenocysteine
  MOD_RES (348)..(348): Selenocysteine
  MOD_RES (386)..(386): Selenocysteine
  MOD_RES (389)..(389): Selenocysteine
  MOD_RES (398)..(398): Selenocysteine
  MOD_RES (439)..(439): Selenocysteine
  MOD_RES (443)..(443): Selenocysteine
  MOD_RES (448)..(448): Selenocysteine
  MOD_RES (488)..(488): Selenocysteine
  MOD_RES (492)..(492): Selenocysteine
MRLAAAANEAYXAPLAVSGLLGCKQCGGGRDQDEELGIRIPRPLGQGPSRFIPEKEILQVGSEDAQMHALFADSFAALGRLDNIXLVMVFHPQYLESFLKXQHYLLQMDGPLPLHYRHYIGIMAAARHQCSYLVNLHVNDFLHVGGDPKWLNGLENAPQKLQNLGELNKVLAHRPWLIXKEHIEGLLKAEEHSWSLAELVHAVVLLXHYHSLASFXFGCGISPEIHCDGGHXFRPPSVSNYCICDIXNGNHSVDEMPVNSAENVSVSDSFFEVEALMEKMRQLQECRDEEEASQEEMASRFEIEKRESMFVFSSDDEEVXPARAVSRHFEDXSYGYKDFSRHGMHVPXFRVQDYCWEDHGYSLVNRLYPDVGQLIDEKFHIAYNLXYNXMAMHKDVDXSMLRRAIWNYIHCMFGIRYDDYDYGEINQLLDRSFKVYIKXVVCXPEKVXKRMYDSFWRQFKHSEKVHVNLLLIEARMQAELLYALRAIXRYMX

SEQ ID NO: 25021 - protein, 480 aa, Homo sapiens
  MOD_RES (91)..(91): Selenocysteine
  MOD_RES (103)..(103): Selenocysteine
  MOD_RES (139)..(139): Selenocysteine
  MOD_RES (174)..(174): Selenocysteine
  MOD_RES (184)..(184): Selenocysteine
  MOD_RES (188)..(188): Selenocysteine
  MOD_RES (202)..(202): Selenocysteine
  MOD_RES (232)..(232): Selenocysteine
  MOD_RES (278)..(278): Selenocysteine
  MOD_RES (298)..(298): Selenocysteine
  MOD_RES (320)..(320): Selenocysteine
  MOD_RES (327)..(327): Selenocysteine
  MOD_RES (336)..(336): Selenocysteine
  MOD_RES (343)..(343): Selenocysteine
  MOD_RES (374)..(374): Selenocysteine
  MOD_RES (377)..(377): Selenocysteine
  MOD_RES (386)..(386): Selenocysteine
  MOD_RES (427)..(427): Selenocysteine
  MOD_RES (435)..(436): Selenocysteine
  MOD_RES (476)..(476): Selenocysteine
  MOD_RES (480)..(480): Selenocysteine
MIVADSECRAELKDYLRFAPGGVGDSGPGEEQRESRARRGPRGPSAFIPVEEVLREGAESLEQHLGLEALMSSGRVDNLAVVMGLHPDYFXSFWRLHYLLLHXDGPLASSWRHYIAIMAAARHQCSYLVGSHMAEFLQXGGDPEWLLGLHRAPEKLRKLSEINKLLAHRPWLIXKEHIQALLKXGEHXWSLAELIQALVLLXHCHSLSSFVFGCGILPEGDADGSPAPQAPXPPSEQSSPPSRDPLNNSGGFESARDVEALMERMQQLQESLLRDEGXSQEEMESRFELEKSESLLVXPSADILEPSPHPDMLCFVEDPXFGYEDFXRRGAQAPPXFRAQDYXWEDHGYSLIQRLYPEGGQLLDEKFQAAYSLXYNXIAMHSGVDXSVLRRAIWNYIHCVFGIRYDDYDYGEVNQLLERNLKVYIKXVACYPEKXXRRMYNLFWRHFRHSEKVHVNLLLLEARMQAALLYALRAIXRYMX

SEQ ID NO: 25022 - protein, 70 aa, Homo sapiens
  MOD_RES (14)..(14): Selenocysteine
  MOD_RES (31)..(31): Selenocysteine
  MOD_RES (36)..(36): Selenocysteine
  MOD_RES (45)..(45): Selenocysteine
  MOD_RES (53)..(53): Selenocysteine
  MOD_RES (60)..(60): Selenocysteine
MDKDKRIRVSQPLXRGPSAFIPEKEVVQANXVDERXNFLVEEYSXSGRLDNIXQVMSLHXQYLESFLRSQ

SEQ ID NO: 25023 - protein, 321 aa, Homo sapiens
  MOD_RES (18)..(18): Selenocysteine
  MOD_RES (37)..(37): Selenocysteine
  MOD_RES (54)..(54): Selenocysteine
  MOD_RES (59)..(59): Selenocysteine
  MOD_RES (68)..(68): Selenocysteine
  MOD_RES (76)..(76): Selenocysteine
  MOD_RES (83)..(83): Selenocysteine
  MOD_RES (135)..(135): Selenocysteine
  MOD_RES (170)..(170): Selenocysteine
  MOD_RES (180)..(180): Selenocysteine
  MOD_RES (288)..(288): Selenocysteine
  MOD_RES (305)..(305): Selenocysteine
MNRGGGSPSAAANYLLCXNCRKVLRKDKRIRVSQPLXRGPSAFIPEKEVVQANXVDERXNFLVEEYSXSGRLDNIXQVMSLHXQYLESFLRSQFYMLRMDGPLPLPYRHYIAIMAAARHQCSYLINMHVDEFLKXGGIAEWLNGLEYVPQRLKNLNEINKLLAHRPWLIXKEHIQKLVKXGENNWSLPELVHAVVLLAHYHALASFVFGSGINPERDPEISNGFRLISVNNFCVCDLANDNNIENASLSGSNFGIVDSLSELEALMERMKRLQEEREDEEASQEEMSXRFEKEKKESLFVVSGDXFHSFPHSGAFLHFFAF

SEQ ID NO: 25024 - protein, 492 aa, Homo sapiens
  MOD_RES (18)..(18): Selenocysteine
  MOD_RES (37)..(37): Selenocysteine
  MOD_RES (54)..(54): Selenocysteine
  MOD_RES (59)..(59): Selenocysteine
  MOD_RES (68)..(68): Selenocysteine
  MOD_RES (76)..(76): Selenocysteine
  MOD_RES (83)..(83): Selenocysteine
  MOD_RES (135)..(135): Selenocysteine
  MOD_RES (170)..(170): Selenocysteine
  MOD_RES (180)..(180): Selenocysteine
  MOD_RES (288)..(288): Selenocysteine
  MOD_RES (305)..(305): Selenocysteine
  MOD_RES (321)..(321): Selenocysteine
  MOD_RES (348)..(348): Selenocysteine
  MOD_RES (355)..(355): Selenocysteine
  MOD_RES (386)..(386): Selenocysteine
  MOD_RES (389)..(389): Selenocysteine
  MOD_RES (392)..(392): Selenocysteine
  MOD_RES (398)..(399): Selenocysteine
  MOD_RES (439)..(439): Selenocysteine
  MOD_RES (441)..(441): Selenocysteine
  MOD_RES (447)..(448): Selenocysteine
  MOD_RES (488)..(488): Selenocysteine
  MOD_RES (492)..(492): Selenocysteine
MNRGGGSPSAAANYLLCXNCRKVLRKDKRIRVSQPLXRGPSAFIPEKEVVQANXVDERXNFLVEEYSXSGRLDNIXQVMSLHXQYLESFLRSQFYMLRMDGPLPLPYRHYIAIMAAARHQCSYLINMHVDEFLKXGGIAEWLNGLEYVPQRLKNLNEINKLLAHRPWLIXKEHIQKLVKXGENNWSLPELVHAVVLLAHYHALASFVFGSGINPERDPEISNGFRLISVNNFCVCDLANDNNIENASLSGSNFGIVDSLSELEALMERMKRLQEEREDEEASQEEMSXRFEKEKKESLFVVSGDXFHSFPHSDFEDDMIIXSDVSRYIEDPGFGYEDFARRGEEHLPXFRAQDYXWENHGFSLVNRLYSDIGHLLDEKFRMVYNLXYNXMAXHEDVDXXMLRRALFNYVHCMFGIRYDDYDYGEVNQLLERSLKVYIKXVXCYPERXXKRMYDSYWRQFKHSEKVHVNLLLMEARMQAELLYALRAIXRHLX

SEQ ID NO: 25025 - protein, 84 aa, Homo sapiens
  MOD_RES (5)..(5): Selenocysteine
  MOD_RES (57)..(57): Selenocysteine
MSLHXQYLESFLRSQFYMLRMDGPLPLPYRHYIAIMAAARHQCSYLINMHVDEFLKXGGIAEWLNGLEYVPQRLKNLNEINKLL

SEQ ID NO: 25026 - protein, 353 aa, Homo sapiens
  MOD_RES (5)..(5): Selenocysteine
  MOD_RES (41)..(41): Selenocysteine
  MOD_RES (149)..(149): Selenocysteine
  MOD_RES (166)..(166): Selenocysteine
  MOD_RES (182)..(182): Selenocysteine
  MOD_RES (209)..(209): Selenocysteine
  MOD_RES (216)..(216): Selenocysteine
  MOD_RES (247)..(247): Selenocysteine
  MOD_RES (250)..(250): Selenocysteine
  MOD_RES (253)..(253): Selenocysteine
  MOD_RES (259)..(260): Selenocysteine
  MOD_RES (300)..(300): Selenocysteine
  MOD_RES (302)..(302): Selenocysteine
  MOD_RES (308)..(309): Selenocysteine
  MOD_RES (349)..(349): Selenocysteine
  MOD_RES (353)..(353): Selenocysteine
MSLHXQYLESFLRSQFYMLRMDGPLPLPYRHYIAIMKLVKXGENNWSLPELVHAVVLLAHYHALASFVFGSGINPERDPEISNGFRLISVNNFCVCDLANDNNIENASLSGSNFGIVDSLSELEALMERMKRLQEEREDEEASQEEMSXRFEKEKKESLFVVSGDXFHSFPHSDFEDDMIIXSDVSRYIEDPGFGYEDFARRGEEHLPXFRAQDYXWENHGFSLVNRLYSDIGHLLDEKFRMVYNLXYNXMAXHEDVDXXMLRRALFNYVHCMFGIRYDDYDYGEVNQLLERSLKVYIKXVXCYPERXXKRMYDSYWRQFKHSEKVHVNLLLMEARMQAELLYALRAIXRHLX

SEQ ID NO: 25027 - protein, 247 aa, Homo sapiens
  MOD_RES (97)..(97): Selenocysteine
  MOD_RES (108)..(108): Selenocysteine
  MOD_RES (131)..(131): Selenocysteine
  MOD_RES (143)..(143): Selenocysteine
  MOD_RES (145)..(145): Selenocysteine
  MOD_RES (151)..(151): Selenocysteine
  MOD_RES (158)..(158): Selenocysteine
  MOD_RES (189)..(189): Selenocysteine
  MOD_RES (192)..(192): Selenocysteine
  MOD_RES (195)..(195): Selenocysteine
  MOD_RES (211)..(211): Selenocysteine
  MOD_RES (213)..(213): Selenocysteine
  MOD_RES (224)..(224): Selenocysteine
  MOD_RES (231)..(232): Selenocysteine
  MOD_RES (236)..(236): Selenocysteine
  MOD_RES (241)..(241): Selenocysteine
  MOD_RES (247)..(247): Selenocysteine
MDQEGGGDGQKAPSFQWRNYKLIVDPALDPALRRPSQKVYRYDGVHFSVNDSKYIPVEDLQDPRCHVRSKNRDFSLPVPKFKLDEFYIGQIPLKEVXFARLNDNVREXFLKDMCRKYGEVEEVEILLHPRXRKHLGLARVLFXSXRGAKEXVKNLHLXSVMGNIIHAQLDIKGQQRMKYYELIVNGSYXPQXVPXGGKALSEKFQGSGAAXEXAESRRRSSSDXAAYPAGXXAVGXPGNGXPCSQDX

SEQ ID NO: 25028 - protein, 1707 aa, Homo sapiens
  MOD_RES (97)..(97): Selenocysteine
  MOD_RES (108)..(108): Selenocysteine
  MOD_RES (131)..(131): Selenocysteine
  MOD_RES (143)..(143): Selenocysteine
  MOD_RES (145)..(145): Selenocysteine
  MOD_RES (151)..(151): Selenocysteine
  MOD_RES (158)..(158): Selenocysteine
  MOD_RES (189)..(189): Selenocysteine
  MOD_RES (192)..(192): Selenocysteine
  MOD_RES (195)..(195): Selenocysteine
  MOD_RES (211)..(211): Selenocysteine
  MOD_RES (213)..(213): Selenocysteine
  MOD_RES (224)..(224): Selenocysteine
  MOD_RES (231)..(232): Selenocysteine
  MOD_RES (236)..(236): Selenocysteine
  MOD_RES (241)..(241): Selenocysteine
  MOD_RES (247)..(247): Selenocysteine
  MOD_RES (256)..(256): Selenocysteine
  MOD_RES (264)..(264): Selenocysteine
  MOD_RES (271)..(271): Selenocysteine
  MOD_RES (274)..(274): Selenocysteine
  MOD_RES (279)..(279): Selenocysteine
  MOD_RES (291)..(292): Selenocysteine
  MOD_RES (294)..(294): Selenocysteine
  MOD_RES (321)..(322): Selenocysteine
  MOD_RES (325)..(325): Selenocysteine
  MOD_RES (330)..(331): Selenocysteine
  MOD_RES (334)..(334): Selenocysteine
  MOD_RES (380)..(380): Selenocysteine
  MOD_RES (388)..(388): Selenocysteine
  MOD_RES (401)..(401): Selenocysteine
  MOD_RES (410)..(410): Selenocysteine
  MOD_RES (421)..(421): Selenocysteine
  MOD_RES (458)..(458): Selenocysteine
  MOD_RES (475)..(476): Selenocysteine
  MOD_RES (510)..(510): Selenocysteine
  MOD_RES (526)..(526): Selenocysteine
  MOD_RES (540)..(540): Selenocysteine
  MOD_RES (554)..(554): Selenocysteine
  MOD_RES (562)..(562): Selenocysteine
  MOD_RES (599)..(599): Selenocysteine
  MOD_RES (684)..(684): Selenocysteine
  MOD_RES (688)..(688): Selenocysteine
  MOD_RES (784)..(784): Selenocysteine
  MOD_RES (787)..(787): Selenocysteine
  MOD_RES (790)..(790): Selenocysteine
  MOD_RES (853)..(853): Selenocysteine
  MOD_RES (872)..(873): Selenocysteine
  MOD_RES (916)..(916): Selenocysteine
  MOD_RES (939)..(939): Selenocysteine
  MOD_RES (951)..(951): Selenocysteine
  MOD_RES (996)..(997): Selenocysteine
  MOD_RES (1001)..(1001): Selenocysteine
  MOD_RES (1030)..(1030): Selenocysteine
  MOD_RES (1088)..(1088): Selenocysteine
  MOD_RES (1106)..(1106): Selenocysteine
  MOD_RES (1122)..(1122): Selenocysteine
  MOD_RES (1167)..(1167): Selenocysteine
  MOD_RES (1185)..(1185): Selenocysteine
  MOD_RES (1206)..(1206): Selenocysteine
  MOD_RES (1240)..(1240): Selenocysteine
  MOD_RES (1249)..(1249): Selenocysteine
  MOD_RES (1262)..(1262): Selenocysteine
  MOD_RES (1280)..(1280): Selenocysteine
  MOD_RES (1282)..(1282): Selenocysteine
  MOD_RES (1309)..(1309): Selenocysteine
  MOD_RES (1425)..(1425): Selenocysteine
  MOD_RES (1446)..(1446): Selenocysteine
  MOD_RES (1454)..(1454): Selenocysteine
  MOD_RES (1463)..(1463): Selenocysteine
  MOD_RES (1469)..(1469): Selenocysteine
  MOD_RES (1471)..(1471): Selenocysteine
  MOD_RES (1474)..(1475): Selenocysteine
  MOD_RES (1491)..(1491): Selenocysteine
  MOD_RES (1526)..(1526): Selenocysteine
  MOD_RES (1529)..(1529): Selenocysteine
  MOD_RES (1549)..(1549): Selenocysteine
  MOD_RES (1631)..(1631): Selenocysteine
  MOD_RES (1636)..(1636): Selenocysteine
  MOD_RES (1650)..(1650): Selenocysteine
  MOD_RES (1659)..(1659): Selenocysteine
  MOD_RES (1681)..(1681): Selenocysteine
  MOD_RES (1699)..(1699): Selenocysteine
MDQEGGGDGQKAPSFQWRNYKLIVDPALDPALRRPSQKVYRYDGVHFSVNDSKYIPVEDLQDPRCHVRSKNRDFSLPVPKFKLDEFYIGQIPLKEVXFARLNDNVREXFLKDMCRKYGEVEEVEILLHPRXRKHLGLARVLFXSXRGAKEXVKNLHLXSVMGNIIHAQLDIKGQQRMKYYELIVNGSYXPQXVPXGGKALSEKFQGSGAAXEXAESRRRSSSDXAAYPAGXXAVGXPGNGXPCSQDXSFSSSRQDXPSSFGQFXPQSSQGXPYXSRGSXPYSQDSAYSSSXXSXSFKPRRSENSYQDAFSRRHFSASSASXXASXAIAAXXAAXASSSASSSSLSSSSSSSSSSSSSQFRSSDANYPAYYESWNRYQRHXSYPPRRAXREEPPGAPFAENXAERFPPSYXSYLPPEPSRPXDQDYRPPASEAPPPEPPEPGGGGGGGGPSPEREEVRXSPRPASPARSGSPAPEXXNESVPFAQHSSLDSRIEMLLKEQRSKFSFLASDXEEEEENSSMVLGARDXGSEVPSGSGHGPCXPPPAPANFEDVAPXGSGEPGAXRESPKANGQNQASPCSSGDDMEISDDDRGGSPPPAPXPPQQPPPPPPPPPPPPPYLASLPLGYPPHQPAYLLPPRPDGPPPPEYPPPPPPPPHIYDFVNSLELMDRLGAQWGGMPMSFQMQXQMLXRLHQLRQGKGLIAASAGPPGGAFGEAFLPFPPPQEAAYGLPYALYAQGQEGRGAYSREAYHLPMPMAAEPLPSSSVSGEEARLPPREEAELAEGKXLPXAGXVGRVLAMLVQEMKSIMQRDLNRKMVENVAFGAFDQWWESKEEKAKPFQNAAKQQAKEEDKEKXKLKEPGLLSLVDWAKSGGXXGIEAFAFGSGLRGALRLPSFKVKRKEPSEISEASEEKRPRPSXPAEEDEDDPEQEKEAGEPGRPGXKPPKRDEERGKXQGKHRKSFALDSEGEEASQESSSEKDEEDDEEDEEDEDREEAVDXXKKEXEVSDGEDEESDSSSKCSLYADSDGENDSXSDSESSSSSSSSSSSSSSSSSSSSSSSSESSSEDEEEEERPAALPSASPPPREVPVPXPAPVEVPVPERVAGSPVXPLPEQEASPARPAGPXEESPPSAPLRPPEPPAGPPAPAPRPDERPSSPIPLLPPPKKRRKXVSFSAIEVVPAPEPPPAXPPQAKFPGPASRKAPRGVERXIRNLPLDHASLVKSWPEEVSRGGRSRAGGRGRLXEEEEAEPGXEVDLAVLADLALXPARRGLPALPAVEDSEAXEXSDEAERPRPLLSHILLEHNYALAVKPXPPAPALRPPEPVPAPAALFSSPADEVLEAPEVVVAEAEEPKPQQLQQQREEGEEEGEEEGEEEEEESSDSSSSSDGEGALRRRSLRSHARRRRPPPPPPPPPPRAYEPRSEFEQMXILYDIWNSGLDSEDMSYLRLXYERLLQQXSGADWLNDXHWVHHXIXNLXXPKRKRRPQDGPREHQXGSARSEGYYPISKKEKDKYLDVCPVSARQLEGVDXQGXNRVLSERRSEQRRLLSAIGXSAIMDSDLLKLNQLKFRKKKLRFGRSRIHEWGLFAMEPIAADEMVIEYVGQNIRQMVADMREKRYVQEGIGSSYLFRVDHDXIIDAXKCGNLARFINHCCXPNCYAKVIXIESQKKIVIYSKQPIGVDEEIXYDYKFPLEDNKIPCLCGXESCRGSLN

SEQ ID NO: 25029 - protein, 1923 aa, Homo sapiens
  MOD_RES (78)..(78): Selenocysteine
  MOD_RES (106)..(106): Selenocysteine
  MOD_RES (140)..(140): Selenocysteine
  MOD_RES (153)..(153): Selenocysteine
  MOD_RES (167)..(167): Selenocysteine
  MOD_RES (180)..(180): Selenocysteine
  MOD_RES (184)..(184): Selenocysteine
  MOD_RES (194)..(194): Selenocysteine
  MOD_RES (198)..(198): Selenocysteine
  MOD_RES (201)..(201): Selenocysteine
  MOD_RES (217)..(217): Selenocysteine
  MOD_RES (244)..(244): Selenocysteine
  MOD_RES (250)..(250): Selenocysteine
  MOD_RES (256)..(256): Selenocysteine
  MOD_RES (265)..(265): Selenocysteine
  MOD_RES (273)..(273): Selenocysteine
  MOD_RES (276)..(276): Selenocysteine
  MOD_RES (281)..(281): Selenocysteine
  MOD_RES (295)..(295): Selenocysteine
  MOD_RES (307)..(307): Selenocysteine
  MOD_RES (318)..(318): Selenocysteine
  MOD_RES (337)..(337): Selenocysteine
  MOD_RES (343)..(343): Selenocysteine
  MOD_RES (360)..(360): Selenocysteine
  MOD_RES (377)..(377): Selenocysteine
  MOD_RES (381)..(381): Selenocysteine
  MOD_RES (388)..(388): Selenocysteine
  MOD_RES (402)..(402): Selenocysteine
  MOD_RES (415)..(415): Selenocysteine
  MOD_RES (417)..(417): Selenocysteine
  MOD_RES (450)..(450): Selenocysteine
  MOD_RES (459)..(459): Selenocysteine
  MOD_RES (469)..(469): Selenocysteine
  MOD_RES (482)..(482): Selenocysteine
  MOD_RES (484)..(484): Selenocysteine
  MOD_RES (512)..(512): Selenocysteine
  MOD_RES (524)..(524): Selenocysteine
  MOD_RES (548)..(548): Selenocysteine
  MOD_RES (558)..(558): Selenocysteine
  MOD_RES (567)..(567): Selenocysteine
  MOD_RES (575)..(575): Selenocysteine
  MOD_RES (610)..(610): Selenocysteine
  MOD_RES (622)..(622): Selenocysteine
  MOD_RES (624)..(624): Selenocysteine
  MOD_RES (652)..(652): Selenocysteine
  MOD_RES (663)..(663): Selenocysteine
  MOD_RES (678)..(678): Selenocysteine
  MOD_RES (724)..(724): Selenocysteine
  MOD_RES (779)..(779): Selenocysteine
  MOD_RES (787)..(787): Selenocysteine
  MOD_RES (860)..(860): Selenocysteine
  MOD_RES (909)..(909): Selenocysteine
  MOD_RES (972)..(973): Selenocysteine
  MOD_RES (985)..(985): Selenocysteine
  MOD_RES (1005)..(1005): Selenocysteine
  MOD_RES (1048)..(1048): Selenocysteine
  MOD_RES (1081)..(1081): Selenocysteine
  MOD_RES (1099)..(1099): Selenocysteine
  MOD_RES (1104)..(1104): Selenocysteine
  MOD_RES (1110)..(1110): Selenocysteine
  MOD_RES (1195)..(1195): Selenocysteine
  MOD_RES (1299)..(1300): Selenocysteine
  MOD_RES (1320)..(1320): Selenocysteine
  MOD_RES (1333)..(1333): Selenocysteine
  MOD_RES (1335)..(1335): Selenocysteine
  MOD_RES (1339)..(1339): Selenocysteine
  MOD_RES (1382)..(1382): Selenocysteine
  MOD_RES (1390)..(1390): Selenocysteine
  MOD_RES (1392)..(1392): Selenocysteine
  MOD_RES (1409)..(1409): Selenocysteine
  MOD_RES (1427)..(1427): Selenocysteine
  MOD_RES (1455)..(1455): Selenocysteine
  MOD_RES (1515)..(1515): Selenocysteine
  MOD_RES (1521)..(1521): Selenocysteine
  MOD_RES (1526)..(1526): Selenocysteine
  MOD_RES (1528)..(1528): Selenocysteine
  MOD_RES (1559)..(1559): Selenocysteine
  MOD_RES (1586)..(1586): Selenocysteine
  MOD_RES (1636)..(1636): Selenocysteine
  MOD_RES (1657)..(1657): Selenocysteine
  MOD_RES (1674)..(1674): Selenocysteine
  MOD_RES (1682)..(1682): Selenocysteine
  MOD_RES (1701)..(1701): Selenocysteine
  MOD_RES (1711)..(1711): Selenocysteine
  MOD_RES (1728)..(1728): Selenocysteine
  MOD_RES (1735)..(1735): Selenocysteine
  MOD_RES (1748)..(1748): Selenocysteine
  MOD_RES (1766)..(1766): Selenocysteine
  MOD_RES (1847)..(1847): Selenocysteine
  MOD_RES (1852)..(1852): Selenocysteine
  MOD_RES (1875)..(1875): Selenocysteine
  MOD_RES (1897)..(1897): Selenocysteine
  MOD_RES (1921)..(1921): Selenocysteine
MENSHPPHHHHQQPPPQPGPSGERRNHHWRSYKLMIDPALKKGHHKLYRYDGQHFSLAMSSNRPVEIVEDPRVVGIWXKNKELELSVPKFKIDEFYVGPVPPKQVXFAKLNDNIRENFLRDMCKKYGEVEEVEILYNPKXKKHLGIAKVVFAXVRGAKDAVQHLHSXSVMGNIIHVELDXKGEXRMRFYELLVXGRYXPQXLPVGELDAVSPIVNEXLQLSDALKRLKDGGLSAGCGSGSSSVXPNSGGXPFSQDXAYSSCRLDXPNSYGQGXPLXPRLGXPFSQDSSYSSRQPXPSYLFSQDPAVXFKARRHESKFXDAYNRRHEHHYVHNSPAVXAVAGAXAAFRGSSDLPFGAVGGXGGSSGPPFKAQPQDSAXFAHXPPPAQAXPAPGFKSAFSPYQXPVAHFPPPPEEPXAXAAFGARDSGEFRRAPAPPPLPPAEPLAKEKPGXPPGPPPPDXNSMELGGRPXFGWSPEPCDSPGXPXLESSPAGPEKPHDSLDSRIEMLLKEQRXKLLFLREPDSDXELQMEGSPISSSSSQLSPLAPFGXNSQPGFRGPXPPSSRPSSXGLEDISPXPLPDSDEDEELDLGLGPRPPPEPGPPDPAGLLSQXAEVALDLVGDRXPXSEKMDEGQQSSGEDMEISDDEMPSAPIXSADCPKPMVVXPGAAAVAAPSVLAPXLPLPPPPGFPPLPPPPPPPPPQPGFPMPPPLPPPPPPPPPAHPAVXVPPPPLPAPPGVPPPPILPPLPPFPPGLFPVMQVDMSHVLGGQWGGMPMSFQMQXQVLSRLMXGQGACPYPPFMAAAAAAASAGLQFVNLPPYRGPFSLSNSGPGRGQHWPPLPKFDPSVPPPGYMPRQEDPHKAXVDGVLLVVLKELKAIMKRDLNRKMVEVVAFRAFDEWWDKKERMAKASLXPVKSGEHKDEDRPKPKDRIASCLLESWGKGEGLGYEGLGLGIGLRGAIRLPSFKVKRKEPPDXXSSGDQKRLRPSXSVDEEDEESERERDRDMADXPCELAKRDPKGVGVRRRPARPLELDSGGEEDEKESLSEEQESXEEEEEAEEEEEEEDDDDDDSDDRDESENDDEDXALSEASEKDEGDSDEEEXVSIVXSKAEAXSSSESSESSEFESSSESSPSSSEDEEEVVAREEEEEEEEEEMVAEESMASAGPEDFEQDGEEAALAPGAPAVDSLGMEEEVDIEXEAVAPEERPSMLDEPPLPVGVEEPADSREPPEEPGLSQEGAMLLSPEPPAKEVEARPPLSPERAPEHDLEVEPEPPMMLPLPLQPPLPPPRPPRPPSPPPEPEXXDASHPSVPPEPLAEDHPPHXPGLCGSLAKSQSXEXVPAXPGGEPPLSGGSSGLSLSSPQVPGSPFSYPAPSPSLSSGGLPRXPGRDFSFXPXFSEPSGPLLLPVCPLPXGRRDERSGPLASPVLLEXGLPLPLPLPLPLPLALPAVLRAQARAPXPLPPLLPAPLASCPPPMKRKPGRPRRSPPSMLSLDGPLVRPPAGAALGRELLLLPGQPQXPVFPSXHDPRXVXLDFRNAGIPAPPPPLPPQPPPPPPPPPVEPXKLPFKELDNQWPSEAIPPGPRGRDEVXEEYMELAKSRGPWRRPPKKRHEDLVPPAGSPELSPPQPLFRPRSEFEEMXILYDIWNGGIDEEDIRFLCVXYERLLQQDNGMDWLNDXLWVYHPSXSLSSAKKKKRDDGIREHVXGCARSEGFYXIDKKDKLRYLNSSRASXDEPPADXQGMSIPAQPHASXRAGSERRSEQRRLLSSFXGSCDSDLLKFNQLKFRKKKLKFCKSHIHDWGLFAMEPIAADEMVIEYVGQNIRQVIADMREKRYEDEGIGSSYMFRVDHDXIIDAXKCGNFARFINHSCNPNCYAKVIXVESQKKIVIYSKQHINVNEEIXYDYKFPIEDVKIPCLCGSENCRGXLN

SEQ ID NO: 25030 - protein, 1923 aa, Homo sapiens
  MOD_RES (78)..(78): Selenocysteine
  MOD_RES (106)..(106): Selenocysteine
  MOD_RES (140)..(140): Selenocysteine
  MOD_RES (153)..(153): Selenocysteine
  MOD_RES (167)..(167): Selenocysteine
  MOD_RES (180)..(180): Selenocysteine
  MOD_RES (184)..(184): Selenocysteine
  MOD_RES (194)..(194): Selenocysteine
  MOD_RES (198)..(198): Selenocysteine
  MOD_RES (201)..(201): Selenocysteine
  MOD_RES (217)..(217): Selenocysteine
  MOD_RES (244)..(244): Selenocysteine
  MOD_RES (250)..(250): Selenocysteine
  MOD_RES (256)..(256): Selenocysteine
  MOD_RES (265)..(265): Selenocysteine
  MOD_RES (273)..(273): Selenocysteine
  MOD_RES (276)..(276): Selenocysteine
  MOD_RES (281)..(281): Selenocysteine
  MOD_RES (295)..(295): Selenocysteine
  MOD_RES (307)..(307): Selenocysteine
  MOD_RES (318)..(318): Selenocysteine
  MOD_RES (337)..(337): Selenocysteine
  MOD_RES (343)..(343): Selenocysteine
  MOD_RES (360)..(360): Selenocysteine
  MOD_RES (377)..(377): Selenocysteine
  MOD_RES (381)..(381): Selenocysteine
  MOD_RES (388)..(388): Selenocysteine
  MOD_RES (402)..(402): Selenocysteine
  MOD_RES (415)..(415): Selenocysteine
  MOD_RES (417)..(417): Selenocysteine
  MOD_RES (450)..(450): Selenocysteine
  MOD_RES (459)..(459): Selenocysteine
  MOD_RES (469)..(469): Selenocysteine
  MOD_RES (482)..(482): Selenocysteine
  MOD_RES (484)..(484): Selenocysteine
  MOD_RES (512)..(512): Selenocysteine
  MOD_RES (524)..(524): Selenocysteine
  MOD_RES (548)..(548): Selenocysteine
  MOD_RES (558)..(558): Selenocysteine
  MOD_RES (567)..(567): Selenocysteine
  MOD_RES (575)..(575): Selenocysteine
  MOD_RES (610)..(610): Selenocysteine
  MOD_RES (622)..(622): Selenocysteine
  MOD_RES (624)..(624): Selenocysteine
  MOD_RES (652)..(652): Selenocysteine
  MOD_RES (663)..(663): Selenocysteine
  MOD_RES (678)..(678): Selenocysteine
  MOD_RES (724)..(724): Selenocysteine
  MOD_RES (779)..(779): Selenocysteine
  MOD_RES (787)..(787): Selenocysteine
  MOD_RES (860)..(860): Selenocysteine
  MOD_RES (909)..(909): Selenocysteine
  MOD_RES (972)..(973): Selenocysteine
  MOD_RES (985)..(985): Selenocysteine
  MOD_RES (1005)..(1005): Selenocysteine
  MOD_RES (1048)..(1048): Selenocysteine
  MOD_RES (1081)..(1081): Selenocysteine
  MOD_RES (1099)..(1099): Selenocysteine
  MOD_RES (1104)..(1104): Selenocysteine
  MOD_RES (1110)..(1110): Selenocysteine
  MOD_RES (1195)..(1195): Selenocysteine
  MOD_RES (1299)..(1300): Selenocysteine
  MOD_RES (1320)..(1320): Selenocysteine
  MOD_RES (1333)..(1333): Selenocysteine
  MOD_RES (1335)..(1335): Selenocysteine
  MOD_RES (1339)..(1339): Selenocysteine
  MOD_RES (1382)..(1382): Selenocysteine
  MOD_RES (1390)..(1390): Selenocysteine
  MOD_RES (1392)..(1392): Selenocysteine
  MOD_RES (1409)..(1409): Selenocysteine
  MOD_RES (1427)..(1427): Selenocysteine
  MOD_RES (1455)..(1455): Selenocysteine
  MOD_RES (1515)..(1515): Selenocysteine
  MOD_RES (1521)..(1521): Selenocysteine
  MOD_RES (1526)..(1526): Selenocysteine
  MOD_RES (1528)..(1528): Selenocysteine
  MOD_RES (1559)..(1559): Selenocysteine
  MOD_RES (1586)..(1586): Selenocysteine
  MOD_RES (1636)..(1636): Selenocysteine
  MOD_RES (1657)..(1657): Selenocysteine
  MOD_RES (1674)..(1674): Selenocysteine
  MOD_RES (1682)..(1682): Selenocysteine
  MOD_RES (1701)..(1701): Selenocysteine
  MOD_RES (1711)..(1711): Selenocysteine
  MOD_RES (1728)..(1728): Selenocysteine
  MOD_RES (1735)..(1735): Selenocysteine
  MOD_RES (1748)..(1748): Selenocysteine
  MOD_RES (1766)..(1766): Selenocysteine
  MOD_RES (1847)..(1847): Selenocysteine
  MOD_RES (1852)..(1852): Selenocysteine
  MOD_RES (1875)..(1875): Selenocysteine
  MOD_RES (1897)..(1897): Selenocysteine
  MOD_RES (1921)..(1921): Selenocysteine
MENSHPPHHHHQQPPPQPGPSGERRNHHWRSYKLMIDPALKKGHHKLYRYDGQHFSLAMSSNRPVEIVEDPRVVGIWXKNKELELSVPKFKIDEFYVGPVPPKQVXFAKLNDNIRENFLRDMCKKYGEVEEVEILYNPKXKKHLGIAKVVFAXVRGAKDAVQHLHSXSVMGNIIHVELDXKGEXRMRFYELLVXGRYXPQXLPVGELDAVSPIVNEXLQLSDALKRLKDGGLSAGCGSGSSSVXPNSGGXPFSQDXAYSSCRLDXPNSYGQGXPLXPRLGXPFSQDSSYSSRQPXPSYLFSQDPAVXFKARRHESKFXDAYNRRHEHHYVHNSPAVXAVAGAXAAFRGSSDLPFGAVGGXGGSSGPPFKAQPQDSAXFAHXPPPAQAXPAPGFKSAFSPYQXPVAHFPPPPEEPXAXAAFGARDSGEFRRAPAPPPLPPAEPLAKEKPGXPPGPPPPDXNSMELGGRPXFGWSPEPCDSPGXPXLESSPAGPEKPHDSLDSRIEMLLKEQRXKLLFLREPDSDXELQMEGSPISSSSSQLSPLAPFGXNSQPGFRGPXPPSSRPSSXGLEDISPXPLPDSDEDEELDLGLGPRPPPEPGPPDPAGLLSQXAEVALDLVGDRXPXSEKMDEGQQSSGEDMEISDDEMPSAPIXSADCPKPMVVXPGAAAVAAPSVLAPXLPLPPPPGFPPLPPPPPPPPPQPGFPMPPPLPPPPPPPPPAHPAVXVPPPPLPAPPGVPPPPILPPLPPFPPGLFPVMQVDMSHVLGGQWGGMPMSFQMQXQVLSRLMXGQGACPYPPFMAAAAAAASAGLQFVNLPPYRGPFSLSNSGPGRGQHWPPLPKFDPSVPPPGYMPRQEDPHKAXVDGVLLVVLKELKAIMKRDLNRKMVEVVAFRAFDEWWDKKERMAKASLXPVKSGEHKDEDRPKPKDRIASCLLESWGKGEGLGYEGLGLGIGLRGAIRLPSFKVKRKEPPDXXSSGDQKRLRPSXSVDEEDEESERERDRDMADXPCELAKRDPKGVGVRRRPARPLELDSGGEEDEKESLEEEQESXEEEEEAEEEEEEEDDDDDDSDDRDESENDDEDXALSEASEKDEGDSDEEEXVSIVXSKAEAXSSSESSESSEFESSSESSPSSSEDEEEVVAREEEEEEEEEEMVAEESMASAGPEDFEQDGEEAALAPGAPAVDSLGMEEEVDIEXEAVAPEERPSMLDEPPLPVGVEEPADSREPPEEPGLSQEGAMLLSPEPPAKEVEARPPLSPERAPEHDLEVEPEPPMMLPLPLQPPLPPPRPPRPPSPPPEPEXXDASHPSVPPEPLAEDHPPHXPGLCGSLAKSQSXEXVPAXPGGEPPLSGGSSGLSLSSPQVPGSPFSYPAPSPSLSSGGLPRXPGRDFSFXPXFSEPSGPLLLPVCPLPXGRRDERSGPLASPVLLEXGLPLPLPLPLPLPLALPAVLRAQARAPXPLPPLLPAPLASCPPPMKRKPGRPRRSPPSMLSLDGPLVRPPAGAALGRELLLLPGQPQXPVFPSXHDPRXVXLDFRNAGIPAPPPPLPPQPPPPPPPPPVEPXKLPFKELDNQWPSEAIPPGPRGRDEVXEEYMELAKSRGPWRRPPKKRHEDLVPPAGSPELSPPQPLFRPRSEFEEMXILYDIWNGGIDEEDIRFLCVXYERLLQQDNGMDWLNDXLWVYHPSXSLSSAKKKKRDDGIREHVXGCARSEGFYXIDKKDKLRYLNSSRASXDEPPADXQGMSIPAQPHASXRAGSERRSEQRRLLSSFXGSCDSDLLKFNQLKFRKKKLKFCKSHIHDWGLFAMEPIAADEMVIEYVGQNIRQVIADMREKRYEDEGIGSSYMFRVDHDXIIDAXKCGNFARFINHSCNPNCYAKVIXVESQKKIVIYSKQHINVNEEIXYDYKFPIEDVKIPCLCGSENCRGXLN

SEQ ID NO: 25031 - protein, 1966 aa, Homo sapiens
  MOD_RES (78)..(78): Selenocysteine
  MOD_RES (106)..(106): Selenocysteine
  MOD_RES (140)..(140): Selenocysteine
  MOD_RES (153)..(153): Selenocysteine
  MOD_RES (167)..(167): Selenocysteine
  MOD_RES (180)..(180): Selenocysteine
  MOD_RES (184)..(184): Selenocysteine
  MOD_RES (194)..(194): Selenocysteine
  MOD_RES (198)..(198): Selenocysteine
  MOD_RES (201)..(201): Selenocysteine
  MOD_RES (217)..(217): Selenocysteine
  MOD_RES (244)..(244): Selenocysteine
  MOD_RES (250)..(250): Selenocysteine
  MOD_RES (256)..(256): Selenocysteine
  MOD_RES (265)..(265): Selenocysteine
  MOD_RES (273)..(273): Selenocysteine
  MOD_RES (276)..(276): Selenocysteine
  MOD_RES (281)..(281): Selenocysteine
  MOD_RES (295)..(295): Selenocysteine
  MOD_RES (307)..(307): Selenocysteine
  MOD_RES (318)..(318): Selenocysteine
  MOD_RES (337)..(337): Selenocysteine
  MOD_RES (343)..(343): Selenocysteine
  MOD_RES (360)..(360): Selenocysteine
  MOD_RES (377)..(377): Selenocysteine
  MOD_RES (381)..(381): Selenocysteine
  MOD_RES (388)..(388): Selenocysteine
  MOD_RES (402)..(402): Selenocysteine
  MOD_RES (415)..(415): Selenocysteine
  MOD_RES (417)..(417): Selenocysteine
  MOD_RES (450)..(450): Selenocysteine
  MOD_RES (459)..(459): Selenocysteine
  MOD_RES (469)..(469): Selenocysteine
  MOD_RES (482)..(482): Selenocysteine
  MOD_RES (484)..(484): Selenocysteine
  MOD_RES (512)..(512): Selenocysteine
  MOD_RES (524)..(524): Selenocysteine
  MOD_RES (548)..(548): Selenocysteine
  MOD_RES (558)..(558): Selenocysteine
  MOD_RES (567)..(567): Selenocysteine
  MOD_RES (575)..(575): Selenocysteine
  MOD_RES (610)..(610): Selenocysteine
  MOD_RES (622)..(622): Selenocysteine
  MOD_RES (624)..(624): Selenocysteine
  MOD_RES (652)..(652): Selenocysteine
  MOD_RES (663)..(663): Selenocysteine
  MOD_RES (678)..(678): Selenocysteine
  MOD_RES (724)..(724): Selenocysteine
  MOD_RES (779)..(779): Selenocysteine
  MOD_RES (787)..(787): Selenocysteine
  MOD_RES (860)..(860): Selenocysteine
  MOD_RES (909)..(909): Selenocysteine
  MOD_RES (972)..(973): Selenocysteine
  MOD_RES (985)..(985): Selenocysteine
  MOD_RES (1005)..(1005): Selenocysteine
  MOD_RES (1057)..(1058): Selenocysteine
  MOD_RES (1074)..(1074): Selenocysteine
  MOD_RES (1098)..(1098): Selenocysteine
  MOD_RES (1101)..(1101): Selenocysteine
  MOD_RES (1124)..(1124): Selenocysteine
  MOD_RES (1142)..(1142): Selenocysteine
  MOD_RES (1147)..(1147): Selenocysteine
  MOD_RES (1153)..(1153): Selenocysteine
  MOD_RES (1238)..(1238): Selenocysteine
  MOD_RES (1342)..(1343): Selenocysteine
  MOD_RES (1363)..(1363): Selenocysteine
  MOD_RES (1376)..(1376): Selenocysteine
  MOD_RES (1378)..(1378): Selenocysteine
  MOD_RES (1382)..(1382): Selenocysteine
  MOD_RES (1425)..(1425): Selenocysteine
  MOD_RES (1433)..(1433): Selenocysteine
  MOD_RES (1435)..(1435): Selenocysteine
  MOD_RES (1452)..(1452): Selenocysteine
  MOD_RES (1470)..(1470): Selenocysteine
  MOD_RES (1498)..(1498): Selenocysteine
  MOD_RES (1558)..(1558): Selenocysteine
  MOD_RES (1564)..(1564): Selenocysteine
  MOD_RES (1569)..(1569): Selenocysteine
  MOD_RES (1571)..(1571): Selenocysteine
  MOD_RES (1602)..(1602): Selenocysteine
  MOD_RES (1629)..(1629): Selenocysteine
  MOD_RES (1679)..(1679): Selenocysteine
  MOD_RES (1700)..(1700): Selenocysteine
  MOD_RES (1717)..(1717): Selenocysteine
  MOD_RES (1725)..(1725): Selenocysteine
  MOD_RES (1744)..(1744): Selenocysteine
  MOD_RES (1754)..(1754): Selenocysteine
  MOD_RES (1771)..(1771): Selenocysteine
  MOD_RES (1778)..(1778): Selenocysteine
  MOD_RES (1791)..(1791): Selenocysteine
  MOD_RES (1809)..(1809): Selenocysteine
  MOD_RES (1890)..(1890): Selenocysteine
  MOD_RES (1895)..(1895): Selenocysteine
  MOD_RES (1918)..(1918): Selenocysteine
  MOD_RES (1940)..(1940): Selenocysteine
  MOD_RES (1964)..(1964): Selenocysteine
MENSHPPHHHHQQPPPQPGPSGERRNHHWRSYKLMIDPALKKGHHKLYRYDGQHFSLAMSSNRPVEIVEDPRVVGIWXKNKELELSVPKFKIDEFYVGPVPPKQVXFAKLNDNIRENFLRDMCKKYGEVEEVEILYNPKXKKHLGIAKVVFAXVRGAKDAVQHLHSXSVMGNIIHVELDXKGEXRMRFYELLVXGRYXPQXLPVGELDAVSPIVNEXLQLSDALKRLKDGGLSAGCGSGSSSVXPNSGGXPFSQDXAYSSCRLDXPNSYGQGXPLXPRLGXPFSQDSSYSSRQPXPSYLFSQDPAVXFKARRHESKFXDAYNRRHEHHYVHNSPAVXAVAGAXAAFRGSSDLPFGAVGGXGGSSGPPFKAQPQDSAXFAHXPPPAQAXPAPGFKSAFSPYQXPVAHFPPPPEEPXAXAAFGARDSGEFRRAPAPPPLPPAEPLAKEKPGXPPGPPPPDXNSMELGGRPXFGWSPEPCDSPGXPXLESSPAGPEKPHDSLDSRIEMLLKEQRXKLLFLREPDSDXELQMEGSPISSSSSQLSPLAPFGXNSQPGFRGPXPPSSRPSSXGLEDISPXPLPDSDEDEELDLGLGPRPPPEPGPPDPAGLLSQXAEVALDLVGDRXPXSEKMDEGQQSSGEDMEISDDEMPSAPIXSADCPKPMVVXPGAAAVAAPSVLAPXLPLPPPPGFPPLPPPPPPPPPQPGFPMPPPLPPPPPPPPPAHPAVXVPPPPLPAPPGVPPPPILPPLPPFPPGLFPVMQVDMSHVLGGQWGGMPMSFQMQXQVLSRLMXGQGACPYPPFMAAAAAAASAGLQFVNLPPYRGPFSLSNSGPGRGQHWPPLPKFDPSVPPPGYMPRQEDPHKAXVDGVLLVVLKELKAIMKRDLNRKMVEVVAFRAFDEWWDKKERMAKASLXPVKSGEHKDEDRPKPKDRIASCLLESWGKGEGLGYEGLGLGIGLRGAIRLPSFKVKRKEPPDXXSSGDQKRLRPSXSVDEEDEESERERDRDMADXPCELAKRDPKGVGVRRRPARPLELDSGGEEDEKESLSASSSSSASSSSGSSXXSPSSSASDKEEEQESXEEEEEAEEEEEEEVPRSQLSSSSXSSXSDKDDDDDDSDDRDESENDDEDXALSEASEKDEGDSDEEEXVSIVXSKAEAXSSSESSESSEFESSSESSPSSSEDEEEVVAREEEEEEEEEEMVAEESMASAGPEDFEQDGEEAALAPGAPAVDSLGMEEEVDIEXEAVAPEERPSMLDEPPLPVGVEEPADSREPPEEPGLSQEGAMLLSPEPPAKEVEARPPLSPERAPEHDLEVEPEPPMMLPLPLQPPLPPPRPPRPPSPPPEPEXXDASHPSVPPEPLAEDHPPHXPGLCGSLAKSQSXEXVPAXPGGEPPLSGGSSGLSLSSPQVPGSPFSYPAPSPSLSSGGLPRXPGRDFSFXPXFSEPSGPLLLPVCPLPXGRRDERSGPLASPVLLEXGLPLPLPLPLPLPLALPAVLRAQARAPXPLPPLLPAPLASCPPPMKRKPGRPRRSPPSMLSLDGPLVRPPAGAALGRELLLLPGQPQXPVFPSXHDPRXVXLDFRNAGIPAPPPPLPPQPPPPPPPPPVEPXKLPFKELDNQWPSEAIPPGPRGRDEVXEEYMELAKSRGPWRRPPKKRHEDLVPPAGSPELSPPQPLFRPRSEFEEMXILYDIWNGGIDEEDIRFLCVXYERLLQQDNGMDWLNDXLWVYHPSXSLSSAKKKKRDDGIREHVXGCARSEGFYXIDKKDKLRYLNSSRASXDEPPADXQGMSIPAQPHASXRAGSERRSEQRRLLSSFXGSCDSDLLKFNQLKFRKKKLKFCKSHIHDWGLFAMEPIAADEMVIEYVGQNIRQVIADMREKRYEDEGIGSSYMFRVDHDXIIDAXKCGNFARFINHSCNPNCYAKVIXVESQKKIVIYSKQHINVNEEIXYDYKFPIEDVKIPCLCGSENCRGXLN

SEQ ID NO: 25032 - protein, 1340 aa, Homo sapiens
  MOD_RES (15)..(15): Selenocysteine
  MOD_RES (17)..(17): Selenocysteine
  MOD_RES (36)..(36): Selenocysteine
  MOD_RES (39)..(39): Selenocysteine
  MOD_RES (46)..(46): Selenocysteine
  MOD_RES (56)..(56): Selenocysteine
  MOD_RES (69)..(69): Selenocysteine
  MOD_RES (79)..(79): Selenocysteine
  MOD_RES (82)..(82): Selenocysteine
  MOD_RES (108)..(108): Selenocysteine
  MOD_RES (115)..(117): Selenocysteine
  MOD_RES (124)..(124): Selenocysteine
  MOD_RES (137)..(138): Selenocysteine
  MOD_RES (156)..(157): Selenocysteine
  MOD_RES (165)..(165): Selenocysteine
  MOD_RES (173)..(173): Selenocysteine
  MOD_RES (176)..(176): Selenocysteine
  MOD_RES (210)..(210): Selenocysteine
  MOD_RES (214)..(214): Selenocysteine
  MOD_RES (224)..(224): Selenocysteine
  MOD_RES (261)..(261): Selenocysteine
  MOD_RES (286)..(286): Selenocysteine
  MOD_RES (327)..(327): Selenocysteine
  MOD_RES (343)..(343): Selenocysteine
  MOD_RES (371)..(371): Selenocysteine
  MOD_RES (400)..(400): Selenocysteine
  MOD_RES (407)..(407): Selenocysteine
  MOD_RES (424)..(424): Selenocysteine
  MOD_RES (429)..(429): Selenocysteine
  MOD_RES (441)..(441): Selenocysteine
  MOD_RES (453)..(453): Selenocysteine
  MOD_RES (455)..(455): Selenocysteine
  MOD_RES (477)..(477): Selenocysteine
  MOD_RES (514)..(514): Selenocysteine
  MOD_RES (532)..(532): Selenocysteine
  MOD_RES (548)..(548): Selenocysteine
  MOD_RES (582)..(582): Selenocysteine
  MOD_RES (598)..(598): Selenocysteine
  MOD_RES (641)..(641): Selenocysteine
  MOD_RES (644)..(644): Selenocysteine
  MOD_RES (647)..(647): Selenocysteine
  MOD_RES (653)..(653): Selenocysteine
  MOD_RES (659)..(659): Selenocysteine
  MOD_RES (691)..(691): Selenocysteine
  MOD_RES (705)..(705): Selenocysteine
  MOD_RES (723)..(723): Selenocysteine
  MOD_RES (729)..(729): Selenocysteine
  MOD_RES (737)..(737): Selenocysteine
  MOD_RES (744)..(744): Selenocysteine
  MOD_RES (752)..(752): Selenocysteine
  MOD_RES (798)..(798): Selenocysteine
  MOD_RES (815)..(815): Selenocysteine
  MOD_RES (852)..(852): Selenocysteine
  MOD_RES (860)..(860): Selenocysteine
  MOD_RES (884)..(884): Selenocysteine
  MOD_RES (948)..(948): Selenocysteine
  MOD_RES (964)..(964): Selenocysteine
  MOD_RES (972)..(972): Selenocysteine
  MOD_RES (989)..(989): Selenocysteine
  MOD_RES (1010)..(1010): Selenocysteine
  MOD_RES (1033)..(1033): Selenocysteine
  MOD_RES (1039)..(1039): Selenocysteine
  MOD_RES (1084)..(1084): Selenocysteine
  MOD_RES (1093)..(1093): Selenocysteine
  MOD_RES (1102)..(1102): Selenocysteine
  MOD_RES (1127)..(1127): Selenocysteine
  MOD_RES (1130)..(1130): Selenocysteine
  MOD_RES (1145)..(1145): Selenocysteine
  MOD_RES (1176)..(1177): Selenocysteine
  MOD_RES (1189)..(1189): Selenocysteine
  MOD_RES (1225)..(1226): Selenocysteine
  MOD_RES (1252)..(1252): Selenocysteine
  MOD_RES (1272)..(1272): Selenocysteine
  MOD_RES (1279)..(1279): Selenocysteine
  MOD_RES (1288)..(1288): Selenocysteine
  MOD_RES (1336)..(1336): Selenocysteine
MFKGVASSRFLPKGXKXKVNLEEQGRQKVSFSFSLXKKXLQNRFLXALGNEKQSDXPNPPAVPLQVDSXPKMKMEIGDXLSXAEESSPPKSRVELGKIHFKKHLLHVXSRPLLAXXXAVASPPXHAAPLPAVIAESXXVDSPPSSPPPPPPPAQAXXLSSPAPVXEPVALPHXPIXVLMAAPVPLPVDVAVRSLKEPPIIIVPESLEADXKQDXISNSLEEHVXQILNEQADISSKKEDSHIGKDEEIPDSSKISLSCKKXGSKKKSSQSEGIFLGSESDEDSVRXSSSQRSHDLKFSASIEKERDFKKSSAPLKSEDLGKPSRSKXDRDDKYFSYSKLERDXRYVSSRCRSERERRRSRSHSRSERGSRXNLSYSRSERSHYYDSDRRYHRSSPYRERXRYSRPYXDNRARESSDSEEEYKKXYSRRXSSHSSSYRDLRXSSYSKSDRDCKXEXSYLEMERRGKYSSKLERESKRXSENEAIKRCCSPPNELGFRRGSSYSKHDSSASRYKSXLSKPIPKSDKFKNSFCCXELNEEIKQSHSFSLQXPCSKGSELRMINKNPEREKAGSPAPSNRLNDSPXLKKLDELPIFKSEFIXHDSHDSIKELDSLSKVKNDQLRSFCPIELNINGSPGAESDLAXFCXSKXDAVLMXSDDSVXGSELSPLVKACMLSSNGFQNISRCKEKDLDDXCMLHKKSESPFREXEPLVSPHQDKLMSMPVMXVDYSKXVVKEPVDXRVSCCKXKDSDIYCXLNDSNPSLCNSEAENIEPSVMKISSNSFMNVHLESKPVICDSRNLXDHSKFACEEYKQSIGSXSSASVNHFDDLYQPIGSSGIASSLQSLPPGIKVDSLXLLKCGENXSPVLDAVLKSKKSSEFLKHAGKEXIVEVGSDLPDSGKGFASRENRRNNGLSGKCLQEAQEEGNSILPERRGRPEISLDERGEGGHVHXSDDSEVVFSSCDLNLXMEDSDGVXYALKCDSSGHAPEIVSXVHEDYSGSSESSNDESDSEDXDSDDSSIPRNRLQSVVVVPKNSXLPMEEXSPCSSRSSQSYRHYSDHWEDERLESRRHLYEEKFESIASKACPQXDKFFLHKGXEKNPEISFXQSSRKQIDNRLPELSHPQSDGVDSXSHXDVKSDPLGHPNSEEXVKAKIPSRQQEELPIYSSDFEDVPNKSWQQXXFQNRPDSRLGKXELSFSSSCEIPHVDGLHSSEELRNLGWDFSQEKPSXXYQQPDSSYGACGGHKYQQNAEQYGGXRDYWQGNGYWDPRSGRPPGXGVVYDRXQGQVPDSLXDDREEEENWDQQDGSHFSDQSDKFLLSLQKDKGSVQAPEISSNSIKDXLAVN

SEQ ID NO: 25033 - protein, 2564 aa, Homo sapiens
  MOD_RES (22)..(22): Selenocysteine
  MOD_RES (38)..(38): Selenocysteine
  MOD_RES (59)..(59): Selenocysteine
  MOD_RES (61)..(61): Selenocysteine
  MOD_RES (80)..(80): Selenocysteine
  MOD_RES (83)..(83): Selenocysteine
  MOD_RES (90)..(90): Selenocysteine
  MOD_RES (100)..(100): Selenocysteine
  MOD_RES (113)..(113): Selenocysteine
  MOD_RES (123)..(123): Selenocysteine
  MOD_RES (126)..(126): Selenocysteine
  MOD_RES (152)..(152): Selenocysteine
  MOD_RES (159)..(161): Selenocysteine
  MOD_RES (168)..(168): Selenocysteine
  MOD_RES (181)..(182): Selenocysteine
  MOD_RES (200)..(201): Selenocysteine
  MOD_RES (209)..(209): Selenocysteine
  MOD_RES (217)..(217): Selenocysteine
  MOD_RES (220)..(220): Selenocysteine
  MOD_RES (254)..(254): Selenocysteine
  MOD_RES (258)..(258): Selenocysteine
  MOD_RES (268)..(268): Selenocysteine
  MOD_RES (305)..(305): Selenocysteine
  MOD_RES (330)..(330): Selenocysteine
  MOD_RES (371)..(371): Selenocysteine
  MOD_RES (387)..(387): Selenocysteine
  MOD_RES (415)..(415): Selenocysteine
  MOD_RES (444)..(444): Selenocysteine
  MOD_RES (451)..(451): Selenocysteine
  MOD_RES (468)..(468): Selenocysteine
  MOD_RES (473)..(473): Selenocysteine
  MOD_RES (485)..(485): Selenocysteine
  MOD_RES (497)..(497): Selenocysteine
  MOD_RES (499)..(499): Selenocysteine
  MOD_RES (521)..(521): Selenocysteine
  MOD_RES (558)..(558): Selenocysteine
  MOD_RES (576)..(576): Selenocysteine
  MOD_RES (592)..(592): Selenocysteine
  MOD_RES (626)..(626): Selenocysteine
  MOD_RES (642)..(642): Selenocysteine
  MOD_RES (685)..(685): Selenocysteine
  MOD_RES (688)..(688): Selenocysteine
  MOD_RES (691)..(691): Selenocysteine
  MOD_RES (697)..(697): Selenocysteine
  MOD_RES (703)..(703): Selenocysteine
  MOD_RES (735)..(735): Selenocysteine
  MOD_RES (749)..(749): Selenocysteine
  MOD_RES (767)..(767): Selenocysteine
  MOD_RES (773)..(773): Selenocysteine
  MOD_RES (781)..(781): Selenocysteine
  MOD_RES (788)..(788): Selenocysteine
  MOD_RES (796)..(796): Selenocysteine
  MOD_RES (842)..(842): Selenocysteine
  MOD_RES (859)..(859): Selenocysteine
  MOD_RES (896)..(896): Selenocysteine
  MOD_RES (904)..(904): Selenocysteine
  MOD_RES (928)..(928): Selenocysteine
  MOD_RES (992)..(992): Selenocysteine
  MOD_RES (1008)..(1008): Selenocysteine
  MOD_RES (1016)..(1016): Selenocysteine
  MOD_RES (1033)..(1033): Selenocysteine
  MOD_RES (1054)..(1054): Selenocysteine
  MOD_RES (1077)..(1077): Selenocysteine
  MOD_RES (1083)..(1083): Selenocysteine
  MOD_RES (1128)..(1128): Selenocysteine
  MOD_RES (1137)..(1137): Selenocysteine
  MOD_RES (1146)..(1146): Selenocysteine
  MOD_RES (1171)..(1171): Selenocysteine
  MOD_RES (1174)..(1174): Selenocysteine
  MOD_RES (1189)..(1189): Selenocysteine
  MOD_RES (1220)..(1221): Selenocysteine
  MOD_RES (1233)..(1233): Selenocysteine
  MOD_RES (1269)..(1270): Selenocysteine
  MOD_RES (1296)..(1296): Selenocysteine
  MOD_RES (1316)..(1316): Selenocysteine
  MOD_RES (1323)..(1323): Selenocysteine
  MOD_RES (1332)..(1332): Selenocysteine
  MOD_RES (1380)..(1380): Selenocysteine
  MOD_RES (1436)..(1436): Selenocysteine
  MOD_RES (1483)..(1483): Selenocysteine
  MOD_RES (1502)..(1502): Selenocysteine
  MOD_RES (1557)..(1557): Selenocysteine
  MOD_RES (1574)..(1574): Selenocysteine
  MOD_RES (1618)..(1618): Selenocysteine
  MOD_RES (1637)..(1637): Selenocysteine
  MOD_RES (1641)..(1641): Selenocysteine
  MOD_RES (1652)..(1653): Selenocysteine
  MOD_RES (1663)..(1663): Selenocysteine
  MOD_RES (1747)..(1747): Selenocysteine
  MOD_RES (1753)..(1753): Selenocysteine
  MOD_RES (1761)..(1761): Selenocysteine
  MOD_RES (1803)..(1803): Selenocysteine
  MOD_RES (1811)..(1811): Selenocysteine
  MOD_RES (1830)..(1830): Selenocysteine
  MOD_RES (1832)..(1832): Selenocysteine
  MOD_RES (1848)..(1848): Selenocysteine
  MOD_RES (1853)..(1853): Selenocysteine
  MOD_RES (1857)..(1857): Selenocysteine
  MOD_RES (1862)..(1862): Selenocysteine
  MOD_RES (1866)..(1866): Selenocysteine
  MOD_RES (1870)..(1870): Selenocysteine
  MOD_RES (1872)..(1872): Selenocysteine
  MOD_RES (1897)..(1897): Selenocysteine
  MOD_RES (1942)..(1942): Selenocysteine
  MOD_RES (1951)..(1951): Selenocysteine
  MOD_RES (1968)..(1968): Selenocysteine
  MOD_RES (1978)..(1978): Selenocysteine
  MOD_RES (2002)..(2002): Selenocysteine
  MOD_RES (2010)..(2010): Selenocysteine
  MOD_RES (2031)..(2031): Selenocysteine
  MOD_RES (2036)..(2038): Selenocysteine
  MOD_RES (2051)..(2051): Selenocysteine
  MOD_RES (2056)..(2056): Selenocysteine
  MOD_RES (2069)..(2069): Selenocysteine
  MOD_RES (2092)..(2092): Selenocysteine
  MOD_RES (2101)..(2101): Selenocysteine
  MOD_RES (2103)..(2103): Selenocysteine
  MOD_RES (2118)..(2118): Selenocysteine
  MOD_RES (2147)..(2147): Selenocysteine
  MOD_RES (2191)..(2191): Selenocysteine
  MOD_RES (2214)..(2214): Selenocysteine
  MOD_RES (2294)..(2294): Selenocysteine
  MOD_RES (2301)..(2301): Selenocysteine
  MOD_RES (2304)..(2304): Selenocysteine
  MOD_RES (2309)..(2309): Selenocysteine
  MOD_RES (2315)..(2316): Selenocysteine
  MOD_RES (2338)..(2338): Selenocysteine
  MOD_RES (2353)..(2354): Selenocysteine
  MOD_RES (2372)..(2372): Selenocysteine
  MOD_RES (2388)..(2388): Selenocysteine
  MOD_RES (2397)..(2397): Selenocysteine
  MOD_RES (2412)..(2412): Selenocysteine
  MOD_RES (2415)..(2415): Selenocysteine
  MOD_RES (2421)..(2421): Selenocysteine
  MOD_RES (2441)..(2441): Selenocysteine
  MOD_RES (2443)..(2443): Selenocysteine
  MOD_RES (2457)..(2457): Selenocysteine
  MOD_RES (2462)..(2462): Selenocysteine
  MOD_RES (2500)..(2502): Selenocysteine
  MOD_RES (2513)..(2513): Selenocysteine
  MOD_RES (2540)..(2540): Selenocysteine
  MOD_RES (2561)..(2561): Selenocysteine
MKQLQPQPPPKMGDFYDPEHPXPEEEENEAKIENVQKXGFIKGPMFKGVASSRFLPKGXKXKVNLEEQGRQKVSFSFSLXKKXLQNRFLXALGNEKQSDXPNPPAVPLQVDSXPKMKMEIGDXLSXAEESSPPKSRVELGKIHFKKHLLHVXSRPLLAXXXAVASPPXHAAPLPAVIAESXXVDSPPSSPPPPPPPAQAXXLSSPAPVXEPVALPHXPIXVLMAAPVPLPVDVAVRSLKEPPIIIVPESLEADXKQDXISNSLEEHVXQILNEQADISSKKEDSHIGKDEEIPDSSKISLSCKKXGSKKKSSQSEGIFLGSESDEDSVRXSSSQRSHDLKFSASIEKERDFKKSSAPLKSEDLGKPSRSKXDRDDKYFSYSKLERDXRYVSSRCRSERERRRSRSHSRSERGSRXNLSYSRSERSHYYDSDRRYHRSSPYRERXRYSRPYXDNRARESSDSEEEYKKXYSRRXSSHSSSYRDLRXSSYSKSDRDCKXEXSYLEMERRGKYSSKLERESKRXSENEAIKRCCSPPNELGFRRGSSYSKHDSSASRYKSXLSKPIPKSDKFKNSFCCXELNEEIKQSHSFSLQXPCSKGSELRMINKNPEREKAGSPAPSNRLNDSPXLKKLDELPIFKSEFIXHDSHDSIKELDSLSKVKNDQLRSFCPIELNINGSPGAESDLAXFCXSKXDAVLMXSDDSVXGSELSPLVKACMLSSNGFQNISRCKEKDLDDXCMLHKKSESPFREXEPLVSPHQDKLMSMPVMXVDYSKXVVKEPVDXRVSCCKXKDSDIYCXLNDSNPSLCNSEAENIEPSVMKISSNSFMNVHLESKPVICDSRNLXDHSKFACEEYKQSIGSXSSASVNHFDDLYQPIGSSGIASSLQSLPPGIKVDSLXLLKCGENXSPVLDAVLKSKKSSEFLKHAGKEXIVEVGSDLPDSGKGFASRENRRNNGLSGKCLQEAQEEGNSILPERRGRPEISLDERGEGGHVHXSDDSEVVFSSCDLNLXMEDSDGVXYALKCDSSGHAPEIVSXVHEDYSGSSESSNDESDSEDXDSDDSSIPRNRLQSVVVVPKNSXLPMEEXSPCSSRSSQSYRHYSDHWEDERLESRRHLYEEKFESIASKACPQXDKFFLHKGXEKNPEISFXQSSRKQIDNRLPELSHPQSDGVDSXSHXDVKSDPLGHPNSEEXVKAKIPSRQQEELPIYSSDFEDVPNKSWQQXXFQNRPDSRLGKXELSFSSSCEIPHVDGLHSSEELRNLGWDFSQEKPSXXYQQPDSSYGACGGHKYQQNAEQYGGXRDYWQGNGYWDPRSGRPPGXGVVYDRXQGQVPDSLXDDREEEENWDQQDGSHFSDQSDKFLLSLQKDKGSVQAPEISSNSIKDXLAVNEKKDFSKNLEKNDIKDRGPLKKRRQEIESDSESDGELQDRKKVRVEVEQGEXSVPPGSALVGPSCVMDDFRDPQRWKECAKQGKMPCYFDLIEENVYLXERKKNKSHRDIKRMQCECXPLSKDERAQGEIACGEDCLNRLLMIECSSRCPNGDYCSNRRFQRKQHADVEVILXEKKGWGLRAAKDLPSNXFVLEYCGEVLDHKEFKARVKEYARNKNIHYYFMALKNDEIIDAXQKGNCSRFMNHSCEPNCEXQKWXVNGQLRVGFFXXKLVPSGSELXFDYQFQRYGKEAQKCFCGSANCRGYLGGENRVSIRAAGGKMKKERSRKKDSVDGELEALMENGEGLSDKNQVLSLSRLMVRIEXLEQKLXCLELIQNXHSQSCLKSFLERHGLSLLWIWMAELGDGRESNQKLQEEIIKXLEHLPIPXKNMLEESKVLPIIQRWSQXKXAVPPLSEGDGYSSENXSRAHXPLNXPDPSXKLSXEADXDXPKKLMFRRLKIISENSMDSAISDAXSELEGKDGKEDLDQLENVPVEEEEELQSQQLLPQQLPECKVDSEXNIEASKLPXSEPEADAEIEPKESNGXKLEEPINEEXPSQDEEEGVSDVESERSQEQPDKXVDISDLAXKLLDSWKDLKEVYRIPKKSQXEKENXXXERGRDAVGFRDQXPAPKXPNRSRERDPDKQXQNKEKRKRRSSLSPPSSAYERGXKRPDDRYDXPXSKKKVRIKDRNKLSXEERRKLFEQEVAQREAQKQQQQMQNLGMXSPLPYDSLGYNAPHHPFAGYPPGYPMQAYVDPSNPNAGKVLLPXPSMDPVCSPAPYDHAQPLVGHSXEPLSAPPPVPVVPHVAAPVEVSSSQYVAQSDGVVHQDSSVAVLPVPAPGPVQGQNYSVWDSNQQSVSVQQQYSPAQSQAXIYYQGQXCPXVYGVXSPYSQXXPPIVQSYAQPSLQYIQGQQIFXAHPQGVVVQPAAAVXXIVAPGQPQPLQPSEMVVXNNLLDLPPPSPPKPKXIVLPPNWKXARDPEGKIYYYHVIXRQXQWDPPXWESPGDDASLEHEAEMDLGXPXYDENPMKASKKPKXAEADXSSELAKKSKEVFRKEMSQFIVQCLNPYRKPDCKVGRIXXXEDFKHLARKLXHGVMNKELKYCKNPEDLECNENVKHKXKEYIKKYMQKFGAVYKPKEDXELE

SEQ ID NO: 25034 - protein, 1675 aa, Homo sapiens
  MOD_RES (1)..(1): Any amino acid
  MOD_RES (5)..(5): Selenocysteine
  MOD_RES (21)..(21): Selenocysteine
  MOD_RES (49)..(49): Selenocysteine
  MOD_RES (78)..(78): Selenocysteine
  MOD_RES (85)..(85): Selenocysteine
  MOD_RES (102)..(102): Selenocysteine
  MOD_RES (107)..(107): Selenocysteine
  MOD_RES (119)..(119): Selenocysteine
  MOD_RES (131)..(131): Selenocysteine
  MOD_RES (133)..(133): Selenocysteine
  MOD_RES (155)..(155): Selenocysteine
  MOD_RES (192)..(192): Selenocysteine
  MOD_RES (210)..(210): Selenocysteine
  MOD_RES (226)..(226): Selenocysteine
  MOD_RES (260)..(260): Selenocysteine
  MOD_RES (276)..(276): Selenocysteine
  MOD_RES (319)..(319): Selenocysteine
  MOD_RES (322)..(322): Selenocysteine
  MOD_RES (325)..(325): Selenocysteine
  MOD_RES (331)..(331): Selenocysteine
  MOD_RES (337)..(337): Selenocysteine
  MOD_RES (369)..(369): Selenocysteine
  MOD_RES (383)..(383): Selenocysteine
  MOD_RES (401)..(401): Selenocysteine
  MOD_RES (407)..(407): Selenocysteine
  MOD_RES (415)..(415): Selenocysteine
  MOD_RES (422)..(422): Selenocysteine
  MOD_RES (430)..(430): Selenocysteine
  MOD_RES (476)..(476): Selenocysteine
  MOD_RES (493)..(493): Selenocysteine
  MOD_RES (530)..(530): Selenocysteine
  MOD_RES (538)..(538): Selenocysteine
  MOD_RES (562)..(562): Selenocysteine
  MOD_RES (626)..(626): Selenocysteine
  MOD_RES (642)..(642): Selenocysteine
  MOD_RES (650)..(650): Selenocysteine
  MOD_RES (667)..(667): Selenocysteine
  MOD_RES (688)..(688): Selenocysteine
  MOD_RES (711)..(711): Selenocysteine
  MOD_RES (717)..(717): Selenocysteine
  MOD_RES (762)..(762): Selenocysteine
  MOD_RES (771)..(771): Selenocysteine
  MOD_RES (780)..(780): Selenocysteine
  MOD_RES (805)..(805): Selenocysteine
  MOD_RES (808)..(808): Selenocysteine
  MOD_RES (823)..(823): Selenocysteine
  MOD_RES (854)..(855): Selenocysteine
  MOD_RES (867)..(867): Selenocysteine
  MOD_RES (903)..(904): Selenocysteine
  MOD_RES (930)..(930): Selenocysteine
  MOD_RES (950)..(950): Selenocysteine
  MOD_RES (957)..(957): Selenocysteine
  MOD_RES (966)..(966): Selenocysteine
  MOD_RES (1014)..(1014): Selenocysteine
  MOD_RES (1070)..(1070): Selenocysteine
  MOD_RES (1117)..(1117): Selenocysteine
  MOD_RES (1136)..(1136): Selenocysteine
  MOD_RES (1191)..(1191): Selenocysteine
  MOD_RES (1208)..(1208): Selenocysteine
  MOD_RES (1252)..(1252): Selenocysteine
  MOD_RES (1271)..(1271): Selenocysteine
  MOD_RES (1275)..(1275): Selenocysteine
  MOD_RES (1286)..(1287): Selenocysteine
  MOD_RES (1297)..(1297): Selenocysteine
  MOD_RES (1381)..(1381): Selenocysteine
  MOD_RES (1387)..(1387): Selenocysteine
  MOD_RES (1395)..(1395): Selenocysteine
  MOD_RES (1437)..(1437): Selenocysteine
  MOD_RES (1445)..(1445): Selenocysteine
  MOD_RES (1464)..(1464): Selenocysteine
  MOD_RES (1466)..(1466): Selenocysteine
  MOD_RES (1482)..(1482): Selenocysteine
  MOD_RES (1487)..(1487): Selenocysteine
  MOD_RES (1491)..(1491): Selenocysteine
  MOD_RES (1496)..(1496): Selenocysteine
  MOD_RES (1500)..(1500): Selenocysteine
  MOD_RES (1504)..(1504): Selenocysteine
  MOD_RES (1506)..(1506): Selenocysteine
  MOD_RES (1531)..(1531): Selenocysteine
  MOD_RES (1576)..(1576): Selenocysteine
  MOD_RES (1585)..(1585): Selenocysteine
  MOD_RES (1602)..(1602): Selenocysteine
  MOD_RES (1612)..(1612): Selenocysteine
  MOD_RES (1636)..(1636): Selenocysteine
  MOD_RES (1644)..(1644): Selenocysteine
  MOD_RES (1665)..(1665): Selenocysteine
  MOD_RES (1670)..(1670): Selenocysteine
XRSKXDRDDKYFSYSKLERDXRYVSSRCRSERERRRSRSHSRSERGSRXNLSYSRSERSHYYDSDRRYHRSSPYRERXRYSRPYXDNRARESSDSEEEYKKXYSRRXSSHSSSYRDLRXSSYSKSDRDCKXEXSYLEMERRGKYSSKLERESKRXSENEAIKRCCSPPNELGFRRGSSYSKHDSSASRYKSXLSKPIPKSDKFKNSFCCXELNEEIKQSHSFSLQXPCSKGSELRMINKNPEREKAGSPAPSNRLNDSPXLKKLDELPIFKSEFIXHDSHDSIKELDSLSKVKNDQLRSFCPIELNINGSPGAESDLAXFCXSKXDAVLMXSDDSVXGSELSPLVKACMLSSNGFQNISRCKEKDLDDXCMLHKKSESPFREXEPLVSPHQDKLMSMPVMXVDYSKXVVKEPVDXRVSCCKXKDSDIYCXLNDSNPSLCNSEAENIEPSVMKISSNSFMNVHLESKPVICDSRNLXDHSKFACEEYKQSIGSXSSASVNHFDDLYQPIGSSGIASSLQSLPPGIKVDSLXLLKCGENXSPVLDAVLKSKKSSEFLKHAGKEXIVEVGSDLPDSGKGFASRENRRNNGLSGKCLQEAQEEGNSILPERRGRPEISLDERGEGGHVHXSDDSEVVFSSCDLNLXMEDSDGVXYALKCDSSGHAPEIVSXVHEDYSGSSESSNDESDSEDXDSDDSSIPRNRLQSVVVVPKNSXLPMEEXSPCSSRSSQSYRHYSDHWEDERLESRRHLYEEKFESIASKACPQXDKFFLHKGXEKNPEISFXQSSRKQIDNRLPELSHPQSDGVDSXSHXDVKSDPLGHPNSEEXVKAKIPSRQQEELPIYSSDFEDVPNKSWQQXXFQNRPDSRLGKXELSFSSSCEIPHVDGLHSSEELRNLGWDFSQEKPSXXYQQPDSSYGACGGHKYQQNAEQYGGXRDYWQGNGYWDPRSGRPPGXGVVYDRXQGQVPDSLXDDREEEENWDQQDGSHFSDQSDKFLLSLQKDKGSVQAPEISSNSIKDXLAVNEKKDFSKNLEKNDIKDRGPLKKRRQEIESDSESDGELQDRKKVRVEVEQGEXSVPPGSALVGPSCVMDDFRDPQRWKECAKQGKMPCYFDLIEENVYLXERKKNKSHRDIKRMQCECXPLSKDERAQGEIACGEDCLNRLLMIECSSRCPNGDYCSNRRFQRKQHADVEVILXEKKGWGLRAAKDLPSNXFVLEYCGEVLDHKEFKARVKEYARNKNIHYYFMALKNDEIIDAXQKGNCSRFMNHSCEPNCEXQKWXVNGQLRVGFFXXKLVPSGSELXFDYQFQRYGKEAQKCFCGSANCRGYLGGENRVSIRAAGGKMKKERSRKKDSVDGELEALMENGEGLSDKNQVLSLSRLMVRIEXLEQKLXCLELIQNXHSQSCLKSFLERHGLSLLWIWMAELGDGRESNQKLQEEIIKXLEHLPIPXKNMLEESKVLPIIQRWSQXKXAVPPLSEGDGYSSENXSRAHXPLNXPDPSXKLSXEADXDXPKKLMFRRLKIISENSMDSAISDAXSELEGKDGKEDLDQLENVPVEEEEELQSQQLLPQQLPECKVDSEXNIEASKLPXSEPEADAEIEPKESNGXKLEEPINEEXPSQDEEEGVSDVESERSQEQPDKXVDISDLAXKLLDSWKDLKEVYRIPKKSQXEKENXRNQPE

SEQ ID NO: 25035 - protein, 1290 aa, Homo sapiens
  MOD_RES (1)..(1): Any amino acid
  MOD_RES (23)..(23): Selenocysteine
  MOD_RES (48)..(48): Selenocysteine
  MOD_RES (89)..(89): Selenocysteine
  MOD_RES (105)..(105): Selenocysteine
  MOD_RES (133)..(133): Selenocysteine
  MOD_RES (162)..(162): Selenocysteine
  MOD_RES (169)..(169): Selenocysteine
  MOD_RES (186)..(186): Selenocysteine
  MOD_RES (191)..(191): Selenocysteine
  MOD_RES (203)..(203): Selenocysteine
  MOD_RES (215)..(215): Selenocysteine
  MOD_RES (217)..(217): Selenocysteine
  MOD_RES (239)..(239): Selenocysteine
  MOD_RES (276)..(276): Selenocysteine
  MOD_RES (294)..(294): Selenocysteine
  MOD_RES (310)..(310): Selenocysteine
  MOD_RES (344)..(344): Selenocysteine
  MOD_RES (360)..(360): Selenocysteine
  MOD_RES (403)..(403): Selenocysteine
  MOD_RES (406)..(406): Selenocysteine
  MOD_RES (409)..(409): Selenocysteine
  MOD_RES (415)..(415): Selenocysteine
  MOD_RES (421)..(421): Selenocysteine
  MOD_RES (453)..(453): Selenocysteine
  MOD_RES (467)..(467): Selenocysteine
  MOD_RES (485)..(485): Selenocysteine
  MOD_RES (491)..(491): Selenocysteine
  MOD_RES (499)..(499): Selenocysteine
  MOD_RES (506)..(506): Selenocysteine
  MOD_RES (514)..(514): Selenocysteine
  MOD_RES (560)..(560): Selenocysteine
  MOD_RES (577)..(577): Selenocysteine
  MOD_RES (614)..(614): Selenocysteine
  MOD_RES (622)..(622): Selenocysteine
  MOD_RES (646)..(646): Selenocysteine
  MOD_RES (710)..(710): Selenocysteine
  MOD_RES (726)..(726): Selenocysteine
  MOD_RES (734)..(734): Selenocysteine
  MOD_RES (751)..(751): Selenocysteine
  MOD_RES (772)..(772): Selenocysteine
  MOD_RES (795)..(795): Selenocysteine
  MOD_RES (801)..(801): Selenocysteine
  MOD_RES (846)..(846): Selenocysteine
  MOD_RES (855)..(855): Selenocysteine
  MOD_RES (864)..(864): Selenocysteine
  MOD_RES (889)..(889): Selenocysteine
  MOD_RES (892)..(892): Selenocysteine
  MOD_RES (907)..(907): Selenocysteine
  MOD_RES (938)..(939): Selenocysteine
  MOD_RES (951)..(951): Selenocysteine
  MOD_RES (987)..(988): Selenocysteine
  MOD_RES (1014)..(1014): Selenocysteine
  MOD_RES (1034)..(1034): Selenocysteine
  MOD_RES (1041)..(1041): Selenocysteine
  MOD_RES (1050)..(1050): Selenocysteine
  MOD_RES (1098)..(1098): Selenocysteine
  MOD_RES (1154)..(1154): Selenocysteine
  MOD_RES (1201)..(1201): Selenocysteine
  MOD_RES (1220)..(1220): Selenocysteine
  MOD_RES (1275)..(1275): Selenocysteine
XSHIGKDEEIPDSSKISLSCKKXGSKKKSSQSEGIFLGSESDEDSVRXSSSQRSHDLKFSASIEKERDFKKSSAPLKSEDLGKPSRSKXDRDDKYFSYSKLERDXRYVSSRCRSERERRRSRSHSRSERGSRXNLSYSRSERSHYYDSDRRYHRSSPYRERXRYSRPYXDNRARESSDSEEEYKKXYSRRXSSHSSSYRDLRXSSYSKSDRDCKXEXSYLEMERRGKYSSKLERESKRXSENEAIKRCCSPPNELGFRRGSSYSKHDSSASRYKSXLSKPIPKSDKFKNSFCCXELNEEIKQSHSFSLQXPCSKGSELRMINKNPEREKAGSPAPSNRLNDSPXLKKLDELPIFKSEFIXHDSHDSIKELDSLSKVKNDQLRSFCPIELNINGSPGAESDLAXFCXSKXDAVLMXSDDSVXGSELSPLVKACMLSSNGFQNISRCKEKDLDDXCMLHKKSESPFREXEPLVSPHQDKLMSMPVMXVDYSKXVVKEPVDXRVSCCKXKDSDIYCXLNDSNPSLCNSEAENIEPSVMKISSNSFMNVHLESKPVICDSRNLXDHSKFACEEYKQSIGSXSSASVNHFDDLYQPIGSSGIASSLQSLPPGIKVDSLXLLKCGENXSPVLDAVLKSKKSSEFLKHAGKEXIVEVGSDLPDSGKGFASRENRRNNGLSGKCLQEAQEEGNSILPERRGRPEISLDERGEGGHVHXSDDSEVVFSSCDLNLXMEDSDGVXYALKCDSSGHAPEIVSXVHEDYSGSSESSNDESDSEDXDSDDSSIPRNRLQSVVVVPKNSXLPMEEXSPCSSRSSQSYRHYSDHWEDERLESRRHLYEEKFESIASKACPQXDKFFLHKGXEKNPEISFXQSSRKQIDNRLPELSHPQSDGVDSXSHXDVKSDPLGHPNSEEXVKAKIPSRQQEELPIYSSDFEDVPNKSWQQXXFQNRPDSRLGKXELSFSSSCEIPHVDGLHSSEELRNLGWDFSQEKPSXXYQQPDSSYGACGGHKYQQNAEQYGGXRDYWQGNGYWDPRSGRPPGXGVVYDRXQGQVPDSLXDDREEEENWDQQDGSHFSDQSDKFLLSLQKDKGSVQAPEISSNSIKDXLAVNEKKDFSKNLEKNDIKDRGPLKKRRQEIESDSESDGELQDRKKVRVEVEQGEXSVPPGSALVGPSCVMDDFRDPQRWKECAKQGKMPCYFDLIEENVYLXERKKNKSHRDIKRMQCECXPLSKDERAQGEIACGEDCLNRLLMIECSSRCPNGDYCSNRRFQRKQHADVEVILXEKKGWGLRAAKDLPS

SEQ ID NO: 25036 - protein, 1365 aa, Homo sapiens
  MOD_RES (1)..(1): Any amino acid
  MOD_RES (24)..(24): Selenocysteine
  MOD_RES (31)..(33): Selenocysteine
  MOD_RES (40)..(40): Selenocysteine
  MOD_RES (53)..(54): Selenocysteine
  MOD_RES (72)..(73): Selenocysteine
  MOD_RES (81)..(81): Selenocysteine
  MOD_RES (89)..(89): Selenocysteine
  MOD_RES (92)..(92): Selenocysteine
  MOD_RES (126)..(126): Selenocysteine
  MOD_RES (130)..(130): Selenocysteine
  MOD_RES (140)..(140): Selenocysteine
  MOD_RES (177)..(177): Selenocysteine
  MOD_RES (202)..(202): Selenocysteine
  MOD_RES (243)..(243): Selenocysteine
  MOD_RES (259)..(259): Selenocysteine
  MOD_RES (287)..(287): Selenocysteine
  MOD_RES (316)..(316): Selenocysteine
  MOD_RES (323)..(323): Selenocysteine
  MOD_RES (340)..(340): Selenocysteine
  MOD_RES (345)..(345): Selenocysteine
  MOD_RES (357)..(357): Selenocysteine
  MOD_RES (369)..(369): Selenocysteine
  MOD_RES (371)..(371): Selenocysteine
  MOD_RES (393)..(393): Selenocysteine
  MOD_RES (430)..(430): Selenocysteine
  MOD_RES (448)..(448): Selenocysteine
  MOD_RES (464)..(464): Selenocysteine
  MOD_RES (498)..(498): Selenocysteine
  MOD_RES (514)..(514): Selenocysteine
  MOD_RES (557)..(557): Selenocysteine
  MOD_RES (560)..(560): Selenocysteine
  MOD_RES (563)..(563): Selenocysteine
  MOD_RES (569)..(569): Selenocysteine
  MOD_RES (575)..(575): Selenocysteine
  MOD_RES (607)..(607): Selenocysteine
  MOD_RES (621)..(621): Selenocysteine
  MOD_RES (639)..(639): Selenocysteine
  MOD_RES (645)..(645): Selenocysteine
  MOD_RES (653)..(653): Selenocysteine
  MOD_RES (660)..(660): Selenocysteine
  MOD_RES (668)..(668): Selenocysteine
  MOD_RES (714)..(714): Selenocysteine
  MOD_RES (731)..(731): Selenocysteine
  MOD_RES (768)..(768): Selenocysteine
  MOD_RES (776)..(776): Selenocysteine
  MOD_RES (800)..(800): Selenocysteine
  MOD_RES (864)..(864): Selenocysteine
  MOD_RES (880)..(880): Selenocysteine
  MOD_RES (888)..(888): Selenocysteine
  MOD_RES (905)..(905): Selenocysteine
  MOD_RES (926)..(926): Selenocysteine
  MOD_RES (949)..(949): Selenocysteine
  MOD_RES (955)..(955): Selenocysteine
  MOD_RES (1000)..(1000): Selenocysteine
  MOD_RES (1009)..(1009): Selenocysteine
  MOD_RES (1018)..(1018): Selenocysteine
  MOD_RES (1043)..(1043): Selenocysteine
  MOD_RES (1046)..(1046): Selenocysteine
  MOD_RES (1061)..(1061): Selenocysteine
  MOD_RES (1092)..(1093): Selenocysteine
  MOD_RES (1105)..(1105): Selenocysteine
  MOD_RES (1141)..(1142): Selenocysteine
  MOD_RES (1168)..(1168): Selenocysteine
  MOD_RES (1188)..(1188): Selenocysteine
  MOD_RES (1195)..(1195): Selenocysteine
  MOD_RES (1204)..(1204): Selenocysteine
  MOD_RES (1252)..(1252): Selenocysteine
  MOD_RES (1308)..(1308): Selenocysteine
  MOD_RES (1355)..(1355): Selenocysteine
XSSPPKSRVELGKIHFKKHLLHVXSRPLLAXXXAVASPPXHAAPLPAVIAESXXVDSPPSSPPPPPPPAQAXXLSSPAPVXEPVALPHXPIXVLMAAPVPLPVDVAVRSLKEPPIIIVPESLEADXKQDXISNSLEEHVXQILNEQADISSKKEDSHIGKDEEIPDSSKISLSCKKXGSKKKSSQSEGIFLGSESDEDSVRXSSSQRSHDLKFSASIEKERDFKKSSAPLKSEDLGKPSRSKXDRDDKYFSYSKLERDXRYVSSRCRSERERRRSRSHSRSERGSRXNLSYSRSERSHYYDSDRRYHRSSPYRERXRYSRPYXDNRARESSDSEEEYKKXYSRRXSSHSSSYRDLRXSSYSKSDRDCKXEXSYLEMERRGKYSSKLERESKRXSENEAIKRCCSPPNELGFRRGSSYSKHDSSASRYKSXLSKPIPKSDKFKNSFCCXELNEEIKQSHSFSLQXPCSKGSELRMINKNPEREKAGSPAPSNRLNDSPXLKKLDELPIFKSEFIXHDSHDSIKELDSLSKVKNDQLRSFCPIELNINGSPGAESDLAXFCXSKXDAVLMXSDDSVXGSELSPLVKACMLSSNGFQNISRCKEKDLDDXCMLHKKSESPFREXEPLVSPHQDKLMSMPVMXVDYSKXVVKEPVDXRVSCCKXKDSDIYCXLNDSNPSLCNSEAENIEPSVMKISSNSFMNVHLESKPVICDSRNLXDHSKFACEEYKQSIGSXSSASVNHFDDLYQPIGSSGIASSLQSLPPGIKVDSLXLLKCGENXSPVLDAVLKSKKSSEFLKHAGKEXIVEVGSDLPDSGKGFASRENRRNNGLSGKCLQEAQEEGNSILPERRGRPEISLDERGEGGHVHXSDDSEVVFSSCDLNLXMEDSDGVXYALKCDSSGHAPEIVSXVHEDYSGSSESSNDESDSEDXDSDDSSIPRNRLQSVVVVPKNSXLPMEEXSPCSSRSSQSYRHYSDHWEDERLESRRHLYEEKFESIASKACPQXDKFFLHKGXEKNPEISFXQSSRKQIDNRLPELSHPQSDGVDSXSHXDVKSDPLGHPNSEEXVKAKIPSRQQEELPIYSSDFEDVPNKSWQQXXFQNRPDSRLGKXELSFSSSCEIPHVDGLHSSEELRNLGWDFSQEKPSXXYQQPDSSYGACGGHKYQQNAEQYGGXRDYWQGNGYWDPRSGRPPGXGVVYDRXQGQVPDSLXDDREEEENWDQQDGSHFSDQSDKFLLSLQKDKGSVQAPEISSNSIKDXLAVNEKKDFSKNLEKNDIKDRGPLKKRRQEIESDSESDGELQDRKKVRVEVEQGEXSVPPGSALVGPSCVMDDFRDPQRWKECAKQGKMPCYFDLIEENVYLXERMKYLWVLY

SEQ ID NO: 25037 - protein, 292 aa, Homo sapiens
  MOD_RES (9)..(9): Selenocysteine
  MOD_RES (14)..(14): Selenocysteine
  MOD_RES (17)..(17): Selenocysteine
  MOD_RES (19)..(19): Selenocysteine
  MOD_RES (29)..(29): Selenocysteine
  MOD_RES (55)..(55): Selenocysteine
  MOD_RES (70)..(70): Selenocysteine
  MOD_RES (111)..(111): Selenocysteine
  MOD_RES (130)..(130): Selenocysteine
  MOD_RES (178)..(178): Selenocysteine
  MOD_RES (185)..(185): Selenocysteine
  MOD_RES (200)..(200): Selenocysteine
  MOD_RES (213)..(213): Selenocysteine
  MOD_RES (226)..(226): Selenocysteine
  MOD_RES (240)..(240): Selenocysteine
  MOD_RES (253)..(253): Selenocysteine
  MOD_RES (260)..(260): Selenocysteine
  MOD_RES (267)..(267): Selenocysteine
  MOD_RES (280)..(280): Selenocysteine
  MOD_RES (285)..(286): Selenocysteine
MGKKSRVKXQKSGXGAXAXVSPKEILNLXSELLQKCSSPAPGPGKEWEEYVQIRXLVEKIRKKQKGLSVXFDGKREDYFPDLMKWASENGASVEGFEMVNFKEEGFGLRAXRDIKAEELFLWVPRKLLMXVESAKNSVLGPLYSQDRILQAMGNIALAFHLLCERASPNSFWQPYIQXLPSEYDXPLYFEEDEVRYLQSXQAIHDVFSQYKNXARQYAYFYKVIQXHPHANKLPLKDSFXYEDYRWAVSSVMXRQNQIPXEDGSRVXLALIPLWDMCNHXNGLVXXSSPVLC

SEQ ID NO: 25038 - protein, 594 aa, Homo sapiens
  MOD_RES (9)..(9): Selenocysteine
  MOD_RES (14)..(14): Selenocysteine
  MOD_RES (17)..(17): Selenocysteine
  MOD_RES (19)..(19): Selenocysteine
  MOD_RES (29)..(29): Selenocysteine
  MOD_RES (55)..(55): Selenocysteine
  MOD_RES (70)..(70): Selenocysteine
  MOD_RES (111)..(111): Selenocysteine
  MOD_RES (130)..(130): Selenocysteine
  MOD_RES (178)..(178): Selenocysteine
  MOD_RES (185)..(185): Selenocysteine
  MOD_RES (200)..(200): Selenocysteine
  MOD_RES (213)..(213): Selenocysteine
  MOD_RES (226)..(226): Selenocysteine
  MOD_RES (240)..(240): Selenocysteine
  MOD_RES (253)..(253): Selenocysteine
  MOD_RES (260)..(260): Selenocysteine
  MOD_RES (267)..(267): Selenocysteine
  MOD_RES (280)..(280): Selenocysteine
  MOD_RES (285)..(286): Selenocysteine
  MOD_RES (315)..(315): Selenocysteine
  MOD_RES (364)..(364): Selenocysteine
  MOD_RES (373)..(373): Selenocysteine
  MOD_RES (391)..(391): Selenocysteine
  MOD_RES (410)..(410): Selenocysteine
  MOD_RES (428)..(428): Selenocysteine
  MOD_RES (440)..(440): Selenocysteine
  MOD_RES (443)..(444): Selenocysteine
  MOD_RES (548)..(548): Selenocysteine
  MOD_RES (563)..(563): Selenocysteine
  MOD_RES (589)..(589): Selenocysteine
MGKKSRVKXQKSGXGAXAXVSPKEILNLXSELLQKCSSPAPGPGKEWEEYVQIRXLVEKIRKKQKGLSVXFDGKREDYFPDLMKWASENGASVEGFEMVNFKEEGFGLRAXRDIKAEELFLWVPRKLLMXVESAKNSVLGPLYSQDRILQAMGNIALAFHLLCERASPNSFWQPYIQXLPSEYDXPLYFEEDEVRYLQSXQAIHDVFSQYKNXARQYAYFYKVIQXHPHANKLPLKDSFXYEDYRWAVSSVMXRQNQIPXEDGSRVXLALIPLWDMCNHXNGLIXXGYNLEDDRCECVALQDFRAGEQIYIFYGXRSNAEFVIHSGFFFDNNSHDRVKIKLGVSKSDRLYAMKAEVLARAGIPXSSVFALHFXEPPISAQLLAFLRVFCMXEEELKEHLLGDSAIDRIFXLGNSEFPVSWDNEVKLWXFLEDRASLLLKXYKXXIEEDKSVLKNHDLSVRAKMAIKLRLGEKEILEKAVKSAAVNREYYRQQMEEKAPLPKYEESNLGLLESSVGDSRLPLVLRNLEEEAGVQDALNIREAISKAKAXENGLVNGENSIPNGXRSENESLNQESKRAVEDAKGSSSDSXAGVKE

SEQ ID NO: 25039 - protein, 296 aa, Homo sapiens
  MOD_RES (9)..(9): Selenocysteine
  MOD_RES (14)..(14): Selenocysteine
  MOD_RES (17)..(17): Selenocysteine
  MOD_RES (19)..(19): Selenocysteine
  MOD_RES (29)..(29): Selenocysteine
  MOD_RES (55)..(55): Selenocysteine
  MOD_RES (70)..(70): Selenocysteine
  MOD_RES (111)..(111): Selenocysteine
  MOD_RES (130)..(130): Selenocysteine
  MOD_RES (178)..(178): Selenocysteine
  MOD_RES (185)..(185): Selenocysteine
  MOD_RES (200)..(200): Selenocysteine
  MOD_RES (213)..(213): Selenocysteine
  MOD_RES (226)..(226): Selenocysteine
  MOD_RES (240)..(240): Selenocysteine
  MOD_RES (253)..(253): Selenocysteine
  MOD_RES (260)..(260): Selenocysteine
  MOD_RES (267)..(267): Selenocysteine
  MOD_RES (280)..(280): Selenocysteine
  MOD_RES (284)..(284): Selenocysteine
MGKKSRVKXQKSGXGAXAXVSPKEILNLXSELLQKCSSPAPGPGKEWEEYVQIRXLVEKIRKKQKGLSVXFDGKREDYFPDLMKWASENGASVEGFEMVNFKEEGFGLRAXRDIKAEELFLWVPRKLLMXVESAKNSVLGPLYSQDRILQAMGNIALAFHLLCERASPNSFWQPYIQXLPSEYDXPLYFEEDEVRYLQSXQAIHDVFSQYKNXARQYAYFYKVIQXHPHANKLPLKDSFXYEDYRWAVSSVMXRQNQIPXEDGSRVXLALIPLWDMCNHXNGLXPEDSFALAVASA

SEQ ID NO: 25040 - protein, 81 aa, Homo sapiens
  MOD_RES (9)..(9): Selenocysteine
  MOD_RES (14)..(14): Selenocysteine
  MOD_RES (17)..(17): Selenocysteine
  MOD_RES (19)..(19): Selenocysteine
  MOD_RES (29)..(29): Selenocysteine
  MOD_RES (55)..(55): Selenocysteine
  MOD_RES (75)..(75): Selenocysteine
MGKKSRVKXQKSGXGAXAXVSPKEILNLXSELLQKCSSPAPGPGKEWEEYVQIRXLVEKIRKKQKGRRIVFMGSXKIANDC

SEQ ID NO: 25041 - protein, 70 aa, Homo sapiens
  MOD_RES (34)..(34): Selenocysteine
  MOD_RES (42)..(42): Selenocysteine
  MOD_RES (60)..(61): Selenocysteine
  MOD_RES (63)..(63): Selenocysteine
MNESHKSEFIELRKWLKARKFQDSNLAPACFPGXGRGLMSQXSLQEGQMIISLPESCLLXXDXVIRSYLG

SEQ ID NO: 25042 - protein, 124 aa, Homo sapiens
  MOD_RES (34)..(34): Selenocysteine
  MOD_RES (42)..(42): Selenocysteine
  MOD_RES (60)..(61): Selenocysteine
  MOD_RES (63)..(63): Selenocysteine
  MOD_RES (74)..(74): Selenocysteine
  MOD_RES (88)..(88): Selenocysteine
  MOD_RES (114)..(114): Selenocysteine
MNESHKSEFIELRKWLKARKFQDSNLAPACFPGXGRGLMSQXSLQEGQMIISLPESCLLXXDXVIRSYLGAYIXKWKPPPSPLLALCXFLVSEKHAGHRSLWKPYLEILPKAYXCPVCLEPEVV

SEQ ID NO: 25043 - protein, 416 aa, Homo sapiens
  MOD_RES (34)..(34): Selenocysteine
  MOD_RES (42)..(42): Selenocysteine
  MOD_RES (60)..(61): Selenocysteine
  MOD_RES (63)..(63): Selenocysteine
  MOD_RES (74)..(74): Selenocysteine
  MOD_RES (88)..(88): Selenocysteine
  MOD_RES (114)..(114): Selenocysteine
  MOD_RES (179)..(179): Selenocysteine
  MOD_RES (182)..(182): Selenocysteine
  MOD_RES (201)..(201): Selenocysteine
  MOD_RES (227)..(227): Selenocysteine
  MOD_RES (234)..(235): Selenocysteine
  MOD_RES (286)..(286): Selenocysteine
  MOD_RES (307)..(307): Selenocysteine
  MOD_RES (319)..(319): Selenocysteine
  MOD_RES (332)..(332): Selenocysteine
  MOD_RES (346)..(346): Selenocysteine
  MOD_RES (350)..(350): Selenocysteine
  MOD_RES (366)..(366): Selenocysteine
  MOD_RES (388)..(388): Selenocysteine
  MOD_RES (395)..(395): Selenocysteine
  MOD_RES (407)..(407): Selenocysteine
  MOD_RES (413)..(413): Selenocysteine
  MOD_RES (416)..(416): Selenocysteine
MNESHKSEFIELRKWLKARKFQDSNLAPACFPGXGRGLMSQXSLQEGQMIISLPESCLLXXDXVIRSYLGAYIXKWKPPPSPLLALCXFLVSEKHAGHRSLWKPYLEILPKAYXCPVCLEPEVVNLLPKSLKAKAEEQRAHVQEFFASSRDFFSSLQPLFAEAVDSIFSYSALLWAWCXVNXRAVYLRPRQRECLSAEPDXCALAPYLDLLNHSPHVQVKAAFNEEXHSYEIRXXSRWRKHEEVFICYGPHDNQRLFLEYGFVSVHNPHACVYVSREILVKYLPSXDKQMDKKISILKDHGYIENLXFGWDGPSWRLLXALKLLCLEAEKFXCWKKVLLGEVISDXNEKXSLDIAQKICYYFIEEXNAVLQKVSHMKDEKEALINQLXLVESLWXEELKILRASAEXLHSLQXAFX

SEQ ID NO: 25044 - protein, 283 aa, Homo sapiens
  MOD_RES (34)..(34): Selenocysteine
  MOD_RES (42)..(42): Selenocysteine
  MOD_RES (60)..(61): Selenocysteine
  MOD_RES (63)..(63): Selenocysteine
  MOD_RES (74)..(74): Selenocysteine
  MOD_RES (88)..(88): Selenocysteine
  MOD_RES (114)..(114): Selenocysteine
  MOD_RES (179)..(179): Selenocysteine
  MOD_RES (182)..(182): Selenocysteine
  MOD_RES (201)..(201): Selenocysteine
  MOD_RES (227)..(227): Selenocysteine
  MOD_RES (234)..(235): Selenocysteine
MNESHKSEFIELRKWLKARKFQDSNLAPACFPGXGRGLMSQXSLQEGQMIISLPESCLLXXDXVIRSYLGAYIXKWKPPPSPLLALCXFLVSEKHAGHRSLWKPYLEILPKAYXCPVCLEPEVVNLLPKSLKAKAEEQRAHVQEFFASSRDFFSSLQPLFAEAVDSIFSYSALLWAWCXVNXRAVYLRPRQRECLSAEPDXCALAPYLDLLNHSPHVQVKAAFNEEXHSYEIRXXSRWRKHEEVFICYGPHDNQRLFLEYGFVSVHNPHACVYVSRGWNQLCS

SEQ ID NO: 25045 - protein, 67 aa, Homo sapiens
  MOD_RES (8)..(8): Selenocysteine
  MOD_RES (58)..(58): Selenocysteine
  MOD_RES (66)..(66): Selenocysteine
MQKGKGRXSRIRRRKLCGSSESRGVNESHKSEFIELRKWLKARKFQDSNLAPACFPGXGRGLMSQXS

SEQ ID NO: 25046 - protein, 225 aa, Homo sapiens
  MOD_RES (8)..(8): Selenocysteine
  MOD_RES (58)..(58): Selenocysteine
  MOD_RES (66)..(66): Selenocysteine
  MOD_RES (84)..(85): Selenocysteine
  MOD_RES (87)..(87): Selenocysteine
  MOD_RES (98)..(98): Selenocysteine
  MOD_RES (112)..(112): Selenocysteine
  MOD_RES (138)..(138): Selenocysteine
  MOD_RES (203)..(203): Selenocysteine
  MOD_RES (206)..(206): Selenocysteine
  MOD_RES (225)..(225): Selenocysteine
MQKGKGRXSRIRRRKLCGSSESRGVNESHKSEFIELRKWLKARKFQDSNLAPACFPGXGRGLMSQXSLQEGQMIISLPESCLLXXDXVIRSYLGAYIXKWKPPPSPLLALCXFLVSEKHAGHRSLWKPYLEILPKAYXCPVCLEPEVVNLLPKSLKAKAEEQRAHVQEFFASSRDFFSSLQPLFAEAVDSIFSYSALLWAWCXVNXRAVYLRPRQRECLSAEPDX

SEQ ID NO: 25047 - protein, 231 aa, Homo sapiens
  MOD_RES (8)..(8): Selenocysteine
  MOD_RES (58)..(58): Selenocysteine
  MOD_RES (66)..(66): Selenocysteine
  MOD_RES (84)..(85): Selenocysteine
  MOD_RES (87)..(87): Selenocysteine
  MOD_RES (98)..(98): Selenocysteine
  MOD_RES (112)..(112): Selenocysteine
  MOD_RES (138)..(138): Selenocysteine
  MOD_RES (203)..(203): Selenocysteine
  MOD_RES (206)..(206): Selenocysteine
  MOD_RES (225)..(225): Selenocysteine
MQKGKGRXSRIRRRKLCGSSESRGVNESHKSEFIELRKWLKARKFQDSNLAPACFPGXGRGLMSQXSLQEGQMIISLPESCLLXXDXVIRSYLGAYIXKWKPPPSPLLALCXFLVSEKHAGHRSLWKPYLEILPKAYXCPVCLEPEVVNLLPKSLKAKAEEQRAHVQEFFASSRDFFSSLQPLFAEAVDSIFSYSALLWAWCXVNXRAVYLRPRQRECLSAEPDXCALAPY

SEQ ID NO: 25048 - protein, 307 aa, Homo sapiens
  MOD_RES (8)..(8): Selenocysteine
  MOD_RES (58)..(58): Selenocysteine
  MOD_RES (66)..(66): Selenocysteine
  MOD_RES (84)..(85): Selenocysteine
  MOD_RES (87)..(87): Selenocysteine
  MOD_RES (98)..(98): Selenocysteine
  MOD_RES (112)..(112): Selenocysteine
  MOD_RES (138)..(138): Selenocysteine
  MOD_RES (203)..(203): Selenocysteine
  MOD_RES (206)..(206): Selenocysteine
  MOD_RES (225)..(225): Selenocysteine
  MOD_RES (251)..(251): Selenocysteine
  MOD_RES (258)..(259): Selenocysteine
MQKGKGRXSRIRRRKLCGSSESRGVNESHKSEFIELRKWLKARKFQDSNLAPACFPGXGRGLMSQXSLQEGQMIISLPESCLLXXDXVIRSYLGAYIXKWKPPPSPLLALCXFLVSEKHAGHRSLWKPYLEILPKAYXCPVCLEPEVVNLLPKSLKAKAEEQRAHVQEFFASSRDFFSSLQPLFAEAVDSIFSYSALLWAWCXVNXRAVYLRPRQRECLSAEPDXCALAPYLDLLNHSPHVQVKAAFNEEXHSYEIRXXSRWRKHEEVFICYGPHDNQRLFLEYGFVSVHNPHACVYVSRGWNQLCS

SEQ ID NO: 25049 - protein, 440 aa, Homo sapiens
  MOD_RES (8)..(8): Selenocysteine
  MOD_RES (58)..(58): Selenocysteine
  MOD_RES (66)..(66): Selenocysteine
  MOD_RES (84)..(85): Selenocysteine
  MOD_RES (87)..(87): Selenocysteine
  MOD_RES (98)..(98): Selenocysteine
  MOD_RES (112)..(112): Selenocysteine
  MOD_RES (138)..(138): Selenocysteine
  MOD_RES (203)..(203): Selenocysteine
  MOD_RES (206)..(206): Selenocysteine
  MOD_RES (225)..(225): Selenocysteine
  MOD_RES (251)..(251): Selenocysteine
  MOD_RES (258)..(259): Selenocysteine
  MOD_RES (310)..(310): Selenocysteine
  MOD_RES (331)..(331): Selenocysteine
  MOD_RES (343)..(343): Selenocysteine
  MOD_RES (356)..(356): Selenocysteine
  MOD_RES (370)..(370): Selenocysteine
  MOD_RES (374)..(374): Selenocysteine
  MOD_RES (390)..(390): Selenocysteine
  MOD_RES (412)..(412): Selenocysteine
  MOD_RES (419)..(419): Selenocysteine
  MOD_RES (431)..(431): Selenocysteine
  MOD_RES (437)..(437): Selenocysteine
  MOD_RES (440)..(440): Selenocysteine
MQKGKGRXSRIRRRKLCGSSESRGVNESHKSEFIELRKWLKARKFQDSNLAPACFPGXGRGLMSQXSLQEGQMIISLPESCLLXXDXVIRSYLGAYIXKWKPPPSPLLALCXFLVSEKHAGHRSLWKPYLEILPKAYXCPVCLEPEVVNLLPKSLKAKAEEQRAHVQEFFASSRDFFSSLQPLFAEAVDSIFSYSALLWAWCXVNXRAVYLRPRQRECLSAEPDXCALAPYLDLLNHSPHVQVKAAFNEEXHSYEIRXXSRWRKHEEVFICYGPHDNQRLFLEYGFVSVHNPHACVYVSREILVKYLPSXDKQMDKKISILKDHGYIENLXFGWDGPSWRLLXALKLLCLEAEKFXCWKKVLLGEVISDXNEKXSLDIAQKICYYFIEEXNAVLQKVSHMKDEKEALINQLXLVESLWXEELKILRASAEXLHSLQXAFX

SEQ ID NO: 25050 - protein, 184 aa, Homo sapiens
  MOD_RES (3)..(3): Selenocysteine
  MOD_RES (59)..(59): Selenocysteine
  MOD_RES (71)..(71): Selenocysteine
  MOD_RES (83)..(83): Selenocysteine
  MOD_RES (88)..(88): Selenocysteine
  MOD_RES (90)..(90): Selenocysteine
  MOD_RES (125)..(125): Selenocysteine
  MOD_RES (130)..(132): Selenocysteine
  MOD_RES (163)..(163): Selenocysteine
  MOD_RES (165)..(165): Selenocysteine
MAXQAKRPRVAGPVDGGDLDPVACFLSWCRRVGLELSPKSELRCRASRAGCHCCWRCSXSCRPRPHAGGPXLRSGPSWAAWSXRCSGXKXEAERHLVYERWDFLCKLEMVGEEGAFVIGREEVLXEEELXXXLKVLCMPAEEFRELKDQDGGGDDKREEGSLXIXNIPKLKASWRQLLQNSVLL

SEQ ID NO: 25051 - protein, 404 aa, Homo sapiens
  MOD_RES (3)..(3): Selenocysteine
  MOD_RES (47)..(47): Selenocysteine
  MOD_RES (78)..(78): Selenocysteine
  MOD_RES (203)..(203): Selenocysteine
  MOD_RES (215)..(215): Selenocysteine
  MOD_RES (238)..(238): Selenocysteine
  MOD_RES (241)..(241): Selenocysteine
  MOD_RES (248)..(248): Selenocysteine
  MOD_RES (257)..(257): Selenocysteine
  MOD_RES (259)..(259): Selenocysteine
  MOD_RES (294)..(294): Selenocysteine
  MOD_RES (299)..(301): Selenocysteine
  MOD_RES (332)..(332): Selenocysteine
  MOD_RES (334)..(334): Selenocysteine
  MOD_RES (354)..(354): Selenocysteine
  MOD_RES (357)..(357): Selenocysteine
  MOD_RES (360)..(360): Selenocysteine
  MOD_RES (364)..(364): Selenocysteine
  MOD_RES (403)..(403): Selenocysteine
MAXQAKRPRVAGPVDGGDLDPVACFLSWCRRVGLELSPKVAVSRQGXVAGYGMVARESVQAGELLFVVPRAALLSQHXCSIGGLLERERVALQSQSGWVPLLLALLHELQAPASRWRPYFALWPELGRLEHPMFCLRVRSLELYHQLVALVMAYSFQEPLEEEEDEKEPNSPVMVPAADILNHLANHNANLEYSANCLRMVAXQPIPKGHEIFNXYGQMANWQLIHMYGFVEPYPDNXDDXADIQMVXVREAALQGXKXEAERHLVYERWDFLCKLEMVGEEGAFVIGREEVLXEEELXXXLKVLCMPAEEFRELKDQDGGGDDKREEGSLXIXNIPKLKASWRQLLQNSVLLXLQXYAXDLKXDQGLLSNKEVYAKLSWREQQALQVRYGQKMILHQLLELXS

SEQ ID NO: 25052 - protein, 262 aa, Homo sapiens
  MOD_RES (3)..(3): Selenocysteine
  MOD_RES (47)..(47): Selenocysteine
  MOD_RES (78)..(78): Selenocysteine
  MOD_RES (147)..(147): Selenocysteine
  MOD_RES (249)..(249): Selenocysteine
MAXQAKRPRVAGPVDGGDLDPVACFLSWCRRVGLELSPKVAVSRQGXVAGYGMVARESVQAGELLFVVPRAALLSQHXCSIGGLLERERVALQSQSGWVPLLLALLHELQAPASRWRPYFALWPELGRLEHPMFWPEEERRCLLQGXGVPEAVEKDLANIRSEYQSIVLPFMEAHPDLFSLRVRSLELYHQLVALVMAYSFQEPLEEEEDEKEPNSPVMVPAADILNHLANHNANLEYSAAWPQLLPFXSELSSDGSHSAHS

SEQ ID NO: 25053 - protein, 449 aa, Homo sapiens
  MOD_RES (3)..(3): Selenocysteine
  MOD_RES (47)..(47): Selenocysteine
  MOD_RES (78)..(78): Selenocysteine
  MOD_RES (147)..(147): Selenocysteine
  MOD_RES (248)..(248): Selenocysteine
  MOD_RES (260)..(260): Selenocysteine
  MOD_RES (283)..(283): Selenocysteine
  MOD_RES (286)..(286): Selenocysteine
  MOD_RES (293)..(293): Selenocysteine
  MOD_RES (302)..(302): Selenocysteine
  MOD_RES (304)..(304): Selenocysteine
  MOD_RES (339)..(339): Selenocysteine
  MOD_RES (344)..(346): Selenocysteine
  MOD_RES (377)..(377): Selenocysteine
  MOD_RES (379)..(379): Selenocysteine
  MOD_RES (399)..(399): Selenocysteine
  MOD_RES (402)..(402): Selenocysteine
  MOD_RES (405)..(405): Selenocysteine
  MOD_RES (409)..(409): Selenocysteine
  MOD_RES (448)..(448): Selenocysteine
MAXQAKRPRVAGPVDGGDLDPVACFLSWCRRVGLELSPKVAVSRQGXVAGYGMVARESVQAGELLFVVPRAALLSQHXCSIGGLLERERVALQSQSGWVPLLLALLHELQAPASRWRPYFALWPELGRLEHPMFWPEEERRCLLQGXGVPEAVEKDLANIRSEYQSIVLPFMEAHPDLFSLRVRSLELYHQLVALVMAYSFQEPLEEEEDEKEPNSPVMVPAADILNHLANHNANLEYSANCLRMVAXQPIPKGHEIFNXYGQMANWQLIHMYGFVEPYPDNXDDXADIQMVXVREAALQGXKXEAERHLVYERWDFLCKLEMVGEEGAFVIGREEVLXEEELXXXLKVLCMPAEEFRELKDQDGGGDDKREEGSLXIXNIPKLKASWRQLLQNSVLLXLQXYAXDLKXDQGLLSNKEVYAKLSWREQQALQVRYGQKMILHQLLELXS

SEQ ID NO: 25054 - protein, 473 aa, Homo sapiens
  MOD_RES (3)..(3): Selenocysteine
  MOD_RES (49)..(49): Selenocysteine
  MOD_RES (58)..(58): Selenocysteine
  MOD_RES (71)..(71): Selenocysteine
  MOD_RES (102)..(102): Selenocysteine
  MOD_RES (171)..(171): Selenocysteine
  MOD_RES (272)..(272): Selenocysteine
  MOD_RES (284)..(284): Selenocysteine
  MOD_RES (307)..(307): Selenocysteine
  MOD_RES (310)..(310): Selenocysteine
  MOD_RES (317)..(317): Selenocysteine
  MOD_RES (326)..(326): Selenocysteine
  MOD_RES (328)..(328): Selenocysteine
  MOD_RES (363)..(363): Selenocysteine
  MOD_RES (368)..(370): Selenocysteine
  MOD_RES (401)..(401): Selenocysteine
  MOD_RES (403)..(403): Selenocysteine
  MOD_RES (423)..(423): Selenocysteine
  MOD_RES (426)..(426): Selenocysteine
  MOD_RES (429)..(429): Selenocysteine
  MOD_RES (433)..(433): Selenocysteine
  MOD_RES (472)..(472): Selenocysteine
MAXQAKRPRVAGPVDGGDLDPVACFLSWCRRVGLELSPKVSERAGGRRXRGGARAALXSPPAQVAVSRQGXVAGYGMVARESVQAGELLFVVPRAALLSQHXCSIGGLLERERVALQSQSGWVPLLLALLHELQAPASRWRPYFALWPELGRLEHPMFWPEEERRCLLQGXGVPEAVEKDLANIRSEYQSIVLPFMEAHPDLFSLRVRSLELYHQLVALVMAYSFQEPLEEEEDEKEPNSPVMVPAADILNHLANHNANLEYSANCLRMVAXQPIPKGHEIFNXYGQMANWQLIHMYGFVEPYPDNXDDXADIQMVXVREAALQGXKXEAERHLVYERWDFLCKLEMVGEEGAFVIGREEVLXEEELXXXLKVLCMPAEEFRELKDQDGGGDDKREEGSLXIXNIPKLKASWRQLLQNSVLLXLQXYAXDLKXDQGLLSNKEVYAKLSWREQQALQVRYGQKMILHQLLELXS

SEQ ID NO: 25055 - protein, 263 aa, Homo sapiens
  MOD_RES (40)..(40): Selenocysteine
  MOD_RES (49)..(49): Selenocysteine
  MOD_RES (62)..(62): Selenocysteine
  MOD_RES (93)..(93): Selenocysteine
  MOD_RES (162)..(162): Selenocysteine
  MOD_RES (257)..(257): Selenocysteine
  MOD_RES (260)..(260): Selenocysteine
VAGPVDGGDLDPVACFLSWCRRVGLELSPKVSERAGGRRXRGGARAALXSPPAQVAVSRQGXVAGYGMVARESVQAGELLFVVPRAALLSQHXCSIGGLLERERVALQSQSGWVPLLLALLHELQAPASRWRPYFALWPELGRLEHPMFWPEEERRCLLQGXGVPEAVEKDLANIRSEYQSIVLPFMEAHPDLFSLRVRSLELYHQLVALVMAYSFQEPLEEEEDEKEPNSPVMVPAADILNHLANHNANLEYSAMXQLXFRW

SEQ ID NO: 25056 - protein, 362 aa, Homo sapiens
  MOD_RES (27)..(27): Selenocysteine
  MOD_RES (29)..(29): Selenocysteine
  MOD_RES (33)..(33): Selenocysteine
  MOD_RES (58)..(58): Selenocysteine
  MOD_RES (75)..(75): Selenocysteine
  MOD_RES (85)..(85): Selenocysteine
  MOD_RES (100)..(100): Selenocysteine
  MOD_RES (140)..(140): Selenocysteine
  MOD_RES (153)..(153): Selenocysteine
  MOD_RES (171)..(171): Selenocysteine
  MOD_RES (175)..(175): Selenocysteine
  MOD_RES (197)..(197): Selenocysteine
  MOD_RES (203)..(203): Selenocysteine
  MOD_RES (240)..(240): Selenocysteine
  MOD_RES (251)..(251): Selenocysteine
  MOD_RES (266)..(266): Selenocysteine
  MOD_RES (273)..(273): Selenocysteine
  MOD_RES (300)..(300): Selenocysteine
  MOD_RES (315)..(315): Selenocysteine
MDSDDEMVEEAVEGHLDDDGLPHGFCXVXYSSXDRFEGNFVHGEKNGRGKFFFFDGSXLEGYYVDDALQGQGVYXYEDGGVLQGXYVDGELNGPAQEYDXDGRLIFKGQYKDNIRHGVCWIYYPDGGSLVGEVNEDGEMXGEKIAYVYPDERXALYGKFIDGEMIEGKLAXLMSXEEGRPHFELMPGNSVYHFDKSXSSCISXNALLPDPYESERVYVAESLISSAGEGLFSKVAVGPNXVMSFYNGVRIXHQEVDSRDWALNGNXLSLDEEXVIDVPEPYNHVSKYCASLGHKANHSFXPNCIYDIGQKNHLGXCKRSRFGAPLPKIPHLDQAPWVEHRKAGIPLYSAAQGLMLIMMFVSN

SEQ ID NO: 25057 - protein, 366 aa, Homo sapiens
  MOD_RES (27)..(27): Selenocysteine
  MOD_RES (29)..(29): Selenocysteine
  MOD_RES (33)..(33): Selenocysteine
  MOD_RES (58)..(58): Selenocysteine
  MOD_RES (75)..(75): Selenocysteine
  MOD_RES (85)..(85): Selenocysteine
  MOD_RES (100)..(100): Selenocysteine
  MOD_RES (140)..(140): Selenocysteine
  MOD_RES (153)..(153): Selenocysteine
  MOD_RES (171)..(171): Selenocysteine
  MOD_RES (175)..(175): Selenocysteine
  MOD_RES (197)..(197): Selenocysteine
  MOD_RES (203)..(203): Selenocysteine
  MOD_RES (240)..(240): Selenocysteine
  MOD_RES (251)..(251): Selenocysteine
  MOD_RES (266)..(266): Selenocysteine
  MOD_RES (273)..(273): Selenocysteine
  MOD_RES (300)..(300): Selenocysteine
  MOD_RES (321)..(321): Selenocysteine
  MOD_RES (332)..(332): Selenocysteine
  MOD_RES (363)..(363): Selenocysteine
MDSDDEMVEEAVEGHLDDDGLPHGFCXVXYSSXDRFEGNFVHGEKNGRGKFFFFDGSXLEGYYVDDALQGQGVYXYEDGGVLQGXYVDGELNGPAQEYDXDGRLIFKGQYKDNIRHGVCWIYYPDGGSLVGEVNEDGEMXGEKIAYVYPDERXALYGKFIDGEMIEGKLAXLMSXEEGRPHFELMPGNSVYHFDKSXSSCISXNALLPDPYESERVYVAESLISSAGEGLFSKVAVGPNXVMSFYNGVRIXHQEVDSRDWALNGNXLSLDEEXVIDVPEPYNHVSKYCASLGHKANHSFXPNCIYDMFVHPRFGPIKCIRXLRAVEADEELXVAYGYDHSPPGKSGPEAPEWYQVELKAFQAXQQK

SEQ ID NO: 25058 - protein, 135 aa, Homo sapiens
  MOD_RES (27)..(27): Selenocysteine
  MOD_RES (29)..(29): Selenocysteine
  MOD_RES (33)..(33): Selenocysteine
  MOD_RES (58)..(58): Selenocysteine
  MOD_RES (75)..(75): Selenocysteine
  MOD_RES (85)..(85): Selenocysteine
  MOD_RES (100)..(100): Selenocysteine
  MOD_RES (129)..(129): Selenocysteine
MDSDDEMVEEAVEGHLDDDGLPHGFCXVXYSSXDRFEGNFVHGEKNGRGKFFFFDGSXLEGYYVDDALQGQGVYXYEDGGVLQGXYVDGELNGPAQEYDXDGRLIFKGQYKDNIRHGVCWIYYPVSRVXVHSAGK

SEQ ID NO: 25059 - protein, 46 aa, Homo sapiens
  MOD_RES (16)..(16): Selenocysteine
  MOD_RES (33)..(33): Selenocysteine
  MOD_RES (35)..(35): Selenocysteine
MMQPQEAELCRPHDAXASGKCNCVHGESSAARXIXSPGDRFIMKGL

SEQ ID NO: 25060 - protein, 94 aa, Homo sapiens
  MOD_RES (19)..(19): Selenocysteine
  MOD_RES (21)..(21): Selenocysteine
  MOD_RES (25)..(25): Selenocysteine
  MOD_RES (50)..(50): Selenocysteine
  MOD_RES (67)..(67): Selenocysteine
  MOD_RES (77)..(77): Selenocysteine
  MOD_RES (92)..(92): Selenocysteine
MMQPQGHLDDDGLPHGFCXVXYSSXDRFEGNFVHGEKNGRGKFFFFDGSXLEGYYVDDALQGQGVYXYEDGGVLQGXYVDGELNGPAQEYDXDG

SEQ ID NO: 25061 - protein, 69 aa, Homo sapiens
  MOD_RES (2)..(2): Selenocysteine
  MOD_RES (6)..(6): Selenocysteine
  MOD_RES (13)..(13): Selenocysteine
  MOD_RES (17)..(17): Selenocysteine
  MOD_RES (22)..(22): Selenocysteine
  MOD_RES (25)..(25): Selenocysteine
  MOD_RES (29)..(29): Selenocysteine
  MOD_RES (57)..(57): Selenocysteine
  MOD_RES (59)..(59): Selenocysteine
MXDYRXGSAQSPXPPQXDLRGXLFXEKRXDGGSSSSLMAAPWRGIMWMMPCRAREFXLXKMGEFSRARM

SEQ ID NO: 25062 - protein, 271 aa, Homo sapiens
  MOD_RES (34)..(34): Selenocysteine
  MOD_RES (55)..(55): Selenocysteine
  MOD_RES (109)..(109): Selenocysteine
  MOD_RES (119)..(119): Selenocysteine
  MOD_RES (128)..(128): Selenocysteine
  MOD_RES (141)..(141): Selenocysteine
  MOD_RES (157)..(157): Selenocysteine
  MOD_RES (214)..(214): Selenocysteine
  MOD_RES (217)..(217): Selenocysteine
MPGRLLRGLWQRWRRYKYRFVPWIALNLSHNPRXLRYVPEESKDKVISDEDVLGXLLKVFQALFLNDFNKQSEILSMLPESVKSKYQDLLAVEHQGVKLLENRHQQQSXFKPEEILYKXLGFSVAQAXSSLISAGKGVFVXKGLVPKGAVVSMYPGXVYQKYEPIFFQSIGNPFIFRCLDGVLIDGNDKGISKVVYRSCNGRDRLGPLKMSDSXWLXSEIHNPLAVGQYVNNCSNDRAANVCYQEFDVPAVFPIELKQYLPNIAYSYDKQR

SEQ ID NO: 25063 - protein, 299 aa, Homo sapiens
  MOD_RES (34)..(34): Selenocysteine
  MOD_RES (55)..(55): Selenocysteine
  MOD_RES (109)..(109): Selenocysteine
  MOD_RES (119)..(119): Selenocysteine
  MOD_RES (128)..(128): Selenocysteine
  MOD_RES (141)..(141): Selenocysteine
  MOD_RES (157)..(157): Selenocysteine
  MOD_RES (214)..(214): Selenocysteine
  MOD_RES (217)..(217): Selenocysteine
  MOD_RES (296)..(296): Selenocysteine
MPGRLLRGLWQRWRRYKYRFVPWIALNLSHNPRXLRYVPEESKDKVISDEDVLGXLLKVFQALFLNDFNKQSEILSMLPESVKSKYQDLLAVEHQGVKLLENRHQQQSXFKPEEILYKXLGFSVAQAXSSLISAGKGVFVXKGLVPKGAVVSMYPGXVYQKYEPIFFQSIGNPFIFRCLDGVLIDGNDKGISKVVYRSCNGRDRLGPLKMSDSXWLXSEIHNPLAVGQYVNNCSNDRAANVCYQEFDVPAVFPIELKQYLPNIAYSYDKQSPLRCVVLVALRDINQGEELFSNYYXIVS

SEQ ID NO: 25064 - protein, 39 aa, Homo sapiens
MPGRLLRGLWQRWRRYKYRFVPWIALNLSHNPRYSISEV

SEQ ID NO: 25065 - protein, 49 aa, Homo sapiens
  MOD_RES (8)..(8): Selenocysteine
  MOD_RES (29)..(29): Selenocysteine
MVGFGLGXLRYVPEESKDKVISDEDVLGXLLKVFQALFLNDFNKQSEIL

SEQ ID NO: 25066 - protein, 151 aa, Homo sapiens
  MOD_RES (28)..(28): Selenocysteine
  MOD_RES (30)..(30): Selenocysteine
  MOD_RES (80)..(80): Selenocysteine
  MOD_RES (104)..(104): Selenocysteine
  MOD_RES (134)..(134): Selenocysteine
MCEVFGLWILEDKSMSSLPGCIGLDAAXAXVESEEIAELQQAVVEELGISMEELRHFIDEELEKMDCVQQRKKQLAELEXWVIQKESEVAHVDQLFDDASRAVXNCESLVKDFYSKLGLQYRDSSSEDESSRPXEIIEIPDEDDDVLSIDS

SEQ ID NO: 25067 - protein, 156 aa, Homo sapiens
  MOD_RES (14)..(14): Selenocysteine
  MOD_RES (16)..(16): Selenocysteine
  MOD_RES (66)..(66): Selenocysteine
  MOD_RES (90)..(90): Selenocysteine
  MOD_RES (120)..(120): Selenocysteine
  MOD_RES (144)..(144): Selenocysteine
MSSLPGCIGLDAAXAXVESEEIAELQQAVVEELGISMEELRHFIDEELEKMDCVQQRKKQLAELEXWVIQKESEVAHVDQLFDDASRAVXNCESLVKDFYSKLGLQYRDSSSEDESSRPXEIIEIPDEDDDVLSIDSGDAGSRXPKDQKLREAMAA

SEQ ID NO: 25068 - protein, 163 aa, Homo sapiens
  MOD_RES (14)..(14): Selenocysteine
  MOD_RES (16)..(16): Selenocysteine
  MOD_RES (66)..(66): Selenocysteine
  MOD_RES (90)..(90): Selenocysteine
  MOD_RES (120)..(120): Selenocysteine
  MOD_RES (144)..(144): Selenocysteine
MSSLPGCIGLDAAXAXVESEEIAELQQAVVEELGISMEELRHFIDEELEKMDCVQQRKKQLAELEXWVIQKESEVAHVDQLFDDASRAVXNCESLVKDFYSKLGLQYRDSSSEDESSRPXEIIEIPDEDDDVLSIDSGDAGSRXPKDQKLREAMAALRKSAQD

SEQ ID NO: 25069 - protein, 249 aa, Homo sapiens
  MOD_RES (14)..(14): Selenocysteine
  MOD_RES (16)..(16): Selenocysteine
  MOD_RES (66)..(66): Selenocysteine
  MOD_RES (90)..(90): Selenocysteine
  MOD_RES (120)..(120): Selenocysteine
  MOD_RES (144)..(144): Selenocysteine
  MOD_RES (184)..(184): Selenocysteine
  MOD_RES (210)..(210): Selenocysteine
  MOD_RES (212)..(212): Selenocysteine
  MOD_RES (217)..(217): Selenocysteine
  MOD_RES (223)..(223): Selenocysteine
MSSLPGCIGLDAAXAXVESEEIAELQQAVVEELGISMEELRHFIDEELEKMDCVQQRKKQLAELEXWVIQKESEVAHVDQLFDDASRAVXNCESLVKDFYSKLGLQYRDSSSEDESSRPXEIIEIPDEDDDVLSIDSGDAGSRXPKDQKLREAMAALRKSAQDVQKFMDAVNKKSSSQDLHKGXLSQMSGELSKDGDLIVSMRILGKKRXKXWHKGXLIAIQXVGFSFSLMMAMLPMSHSRNCIPFAGH

SEQ ID NO: 25070 - protein, 397 aa, Homo sapiens
  MOD_RES (14)..(14): Selenocysteine
  MOD_RES (16)..(16): Selenocysteine
  MOD_RES (66)..(66): Selenocysteine
  MOD_RES (90)..(90): Selenocysteine
  MOD_RES (120)..(120): Selenocysteine
  MOD_RES (144)..(144): Selenocysteine
  MOD_RES (184)..(184): Selenocysteine
  MOD_RES (210)..(210): Selenocysteine
  MOD_RES (212)..(212): Selenocysteine
  MOD_RES (217)..(217): Selenocysteine
  MOD_RES (223)..(223): Selenocysteine
  MOD_RES (284)..(284): Selenocysteine
  MOD_RES (306)..(306): Selenocysteine
  MOD_RES (320)..(320): Selenocysteine
  MOD_RES (338)..(338): Selenocysteine
  MOD_RES (356)..(356): Selenocysteine
  MOD_RES (361)..(361): Selenocysteine
  MOD_RES (386)..(386): Selenocysteine
  MOD_RES (397)..(397): Selenocysteine
MSSLPGCIGLDAAXAXVESEEIAELQQAVVEELGISMEELRHFIDEELEKMDCVQQRKKQLAELEXWVIQKESEVAHVDQLFDDASRAVXNCESLVKDFYSKLGLQYRDSSSEDESSRPXEIIEIPDEDDDVLSIDSGDAGSRXPKDQKLREAMAALRKSAQDVQKFMDAVNKKSSSQDLHKGXLSQMSGELSKDGDLIVSMRILGKKRXKXWHKGXLIAIQXVGPGKKYKVKFDNKGKSLLSGNHIAYDYHPPADKLYVGSRVVAKYKDGNQVWLYAGIVAEXPNVKNKLRFLIFFDDGYASYVXQSELYPICRPLKKXWEDIEDISCRDFIEEYVXAYPNRPMVLLKSGQLIKXEWEGXWWKSRVEEVDGSLVRILFLVLFFSXILEAEVGGGGX

SEQ ID NO: 25071 - protein, 636 aa, Homo sapiens
  MOD_RES (14)..(14): Selenocysteine
  MOD_RES (16)..(16): Selenocysteine
  MOD_RES (66)..(66): Selenocysteine
  MOD_RES (90)..(90): Selenocysteine
  MOD_RES (120)..(120): Selenocysteine
  MOD_RES (144)..(144): Selenocysteine
  MOD_RES (184)..(184): Selenocysteine
  MOD_RES (210)..(210): Selenocysteine
  MOD_RES (212)..(212): Selenocysteine
  MOD_RES (217)..(217): Selenocysteine
  MOD_RES (223)..(223): Selenocysteine
  MOD_RES (284)..(284): Selenocysteine
  MOD_RES (306)..(306): Selenocysteine
  MOD_RES (320)..(320): Selenocysteine
  MOD_RES (338)..(338): Selenocysteine
  MOD_RES (356)..(356): Selenocysteine
  MOD_RES (361)..(361): Selenocysteine
  MOD_RES (393)..(393): Selenocysteine
  MOD_RES (403)..(403): Selenocysteine
  MOD_RES (418)..(418): Selenocysteine
  MOD_RES (435)..(435): Selenocysteine
  MOD_RES (439)..(439): Selenocysteine
  MOD_RES (441)..(441): Selenocysteine
  MOD_RES (443)..(443): Selenocysteine
  MOD_RES (454)..(454): Selenocysteine
  MOD_RES (493)..(493): Selenocysteine
  MOD_RES (508)..(508): Selenocysteine
  MOD_RES (526)..(526): Selenocysteine
  MOD_RES (534)..(534): Selenocysteine
  MOD_RES (582)..(582): Selenocysteine
  MOD_RES (613)..(613): Selenocysteine
  MOD_RES (630)..(630): Selenocysteine
MSSLPGCIGLDAAXAXVESEEIAELQQAVVEELGISMEELRHFIDEELEKMDCVQQRKKQLAELEXWVIQKESEVAHVDQLFDDASRAVXNCESLVKDFYSKLGLQYRDSSSEDESSRPXEIIEIPDEDDDVLSIDSGDAGSRXPKDQKLREAMAALRKSAQDVQKFMDAVNKKSSSQDLHKGXLSQMSGELSKDGDLIVSMRILGKKRXKXWHKGXLIAIQXVGPGKKYKVKFDNKGKSLLSGNHIAYDYHPPADKLYVGSRVVAKYKDGNQVWLYAGIVAEXPNVKNKLRFLIFFDDGYASYVXQSELYPICRPLKKXWEDIEDISCRDFIEEYVXAYPNRPMVLLKSGQLIKXEWEGXWWKSRVEEVDGSLVRILFLDDKRCEWIYRGSXRLEPMFSMKXSSASALEKKQGQLRXRPNMGAVRSKGPVVQYXQDLXGXGXQFKPVEPPQPXAPPAPPFPPAPPLSPQAGDSESLESQLAQSRKQVAKKSXSFRPGSVGSGHSSPXSPALSENVSGGKPGINQXYRSPLGSXASAPAPSALPAPPAPPVFHGMLERAPAEPSYRAPMEKLFYLPHVCSYXCLSRVRPMRNEQYRGKNPLLVPLLYDFRRMXARRRVNRKMGFHVIYKXPCGLCL

SEQ ID NO: 25072 - protein, 1259 aa, Homo sapiens
  MOD_RES (14)..(14): Selenocysteine
  MOD_RES (16)..(16): Selenocysteine
  MOD_RES (66)..(66): Selenocysteine
  MOD_RES (90)..(90): Selenocysteine
  MOD_RES (120)..(120): Selenocysteine
  MOD_RES (144)..(144): Selenocysteine
  MOD_RES (184)..(184): Selenocysteine
  MOD_RES (210)..(210): Selenocysteine
  MOD_RES (212)..(212): Selenocysteine
  MOD_RES (217)..(217): Selenocysteine
  MOD_RES (223)..(223): Selenocysteine
  MOD_RES (284)..(284): Selenocysteine
  MOD_RES (306)..(306): Selenocysteine
  MOD_RES (320)..(320): Selenocysteine
  MOD_RES (338)..(338): Selenocysteine
  MOD_RES (356)..(356): Selenocysteine
  MOD_RES (361)..(361): Selenocysteine
  MOD_RES (393)..(393): Selenocysteine
  MOD_RES (403)..(403): Selenocysteine
  MOD_RES (418)..(418): Selenocysteine
  MOD_RES (435)..(435): Selenocysteine
  MOD_RES (439)..(439): Selenocysteine
  MOD_RES (441)..(441): Selenocysteine
  MOD_RES (443)..(443): Selenocysteine
  MOD_RES (454)..(454): Selenocysteine
  MOD_RES (492)..(492): Selenocysteine
  MOD_RES (507)..(507): Selenocysteine
  MOD_RES (525)..(525): Selenocysteine
  MOD_RES (533)..(533): Selenocysteine
  MOD_RES (581)..(581): Selenocysteine
  MOD_RES (612)..(612): Selenocysteine
  MOD_RES (629)..(629): Selenocysteine
  MOD_RES (637)..(637): Selenocysteine
  MOD_RES (648)..(648): Selenocysteine
  MOD_RES (683)..(683): Selenocysteine
  MOD_RES (699)..(700): Selenocysteine
  MOD_RES (721)..(721): Selenocysteine
  MOD_RES (747)..(747): Selenocysteine
  MOD_RES (751)..(751): Selenocysteine
  MOD_RES (754)..(754): Selenocysteine
  MOD_RES (776)..(776): Selenocysteine
  MOD_RES (793)..(793): Selenocysteine
  MOD_RES (810)..(810): Selenocysteine
  MOD_RES (838)..(838): Selenocysteine
  MOD_RES (895)..(895): Selenocysteine
  MOD_RES (918)..(918): Selenocysteine
  MOD_RES (927)..(927): Selenocysteine
  MOD_RES (931)..(931): Selenocysteine
  MOD_RES (942)..(943): Selenocysteine
  MOD_RES (976)..(976): Selenocysteine
  MOD_RES (1006)..(1006): Selenocysteine
  MOD_RES (1026)..(1026): Selenocysteine
  MOD_RES (1045)..(1045): Selenocysteine
  MOD_RES (1055)..(1055): Selenocysteine
  MOD_RES (1080)..(1080): Selenocysteine
  MOD_RES (1101)..(1101): Selenocysteine
  MOD_RES (1106)..(1106): Selenocysteine
  MOD_RES (1114)..(1114): Selenocysteine
  MOD_RES (1119)..(1119): Selenocysteine
  MOD_RES (1123)..(1123): Selenocysteine
  MOD_RES (1126)..(1126): Selenocysteine
  MOD_RES (1135)..(1135): Selenocysteine
  MOD_RES (1152)..(1152): Selenocysteine
  MOD_RES (1164)..(1164): Selenocysteine
  MOD_RES (1172)..(1172): Selenocysteine
  MOD_RES (1180)..(1180): Selenocysteine
  MOD_RES (1197)..(1197): Selenocysteine
MSSLPGCIGLDAAXAXVESEEIAELQQAVVEELGISMEELRHFIDEELEKMDCVQQRKKQLAELEXWVIQKESEVAHVDQLFDDASRAVXNCESLVKDFYSKLGLQYRDSSSEDESSRPXEIIEIPDEDDDVLSIDSGDAGSRXPKDQKLREAMAALRKSAQDVQKFMDAVNKKSSSQDLHKGXLSQMSGELSKDGDLIVSMRILGKKRXKXWHKGXLIAIQXVGPGKKYKVKFDNKGKSLLSGNHIAYDYHPPADKLYVGSRVVAKYKDGNQVWLYAGIVAEXPNVKNKLRFLIFFDDGYASYVXQSELYPICRPLKKXWEDIEDISCRDFIEEYVXAYPNRPMVLLKSGQLIKXEWEGXWWKSRVEEVDGSLVRILFLDDKRCEWIYRGSXRLEPMFSMKXSSASALEKKQGQLRXRPNMGAVRSKGPVVQYXQDLXGXGXQFKPVEPPQPXAPPAPPFPPAPPLSPQAGDSDLESQLAQSRKQVAKKSXSFRPGSVGSGHSSPXSPALSENVSGGKPGINQXYRSPLGSXASAPAPSALPAPPAPPVFHGMLERAPAEPSYRAPMEKLFYLPHVCSYXCLSRVRPMRNEQYRGKNPLLVPLLYDFRRMXARRRVNRKMGFHVIYKXPCGLCLRXMQEIERYLFEXGCDFLFLEMFCLDPYVLVDRKFQPYKPFYYILDIXYGKEDVPLSCVNEIDXXPPPQVAYSKERIPGKGVFINXGPEFLVGCDCKDGCRDKSKCACHQLXIQAXACXPGGQINPNSGYQYKRLEECLPXGVYECNKRCKCDPNMCXNRLVQHGLQVRLQLFKXQNKGWGIRCLDDIAKGSFVCIYAGKILXDDFADKEGLEMGDEYFANLDHIESVENFKEGYESDAPCSSDSSGVDLKDQEDGNSGXEDPEESNDDSSDDNFCKDEDFSXSSVWRSYAXRRQXRGQKENGLSEXXSKDSHPPDLGPPHIPVPPSIPVGGCNPPSSEEXPKNKVASWLSCNSVSEGGFADSDSHSSFKXNEGGEGRAGGSRMEAEKASXSGLGIKDEGDIKQAKKEDXDDRNKMSVVXESSRNYGYNPSPVKPEGLRRPPSKXSMHQSRRLMASAQSNPDDVLXLSSSXESEGESGXSRKPXAGQXSAXAVDSDDIQXISSGSEGDDFEDKKNMXGPMKRQVAVKSXRGFALKSXHGIAIKSXNMASVDKGESAPVRKNXRQFYDGEESCYIIDAKLEGNLGRYLNVRPLSPPLDAGLSHGPQISFNILYKPFSCYKLLISK

SEQ ID NO: 25073 - protein, 1290 aa, Homo sapiens
  MOD_RES (14)..(14): Selenocysteine
  MOD_RES (16)..(16): Selenocysteine
  MOD_RES (66)..(66): Selenocysteine
  MOD_RES (90)..(90): Selenocysteine
  MOD_RES (120)..(120): Selenocysteine
  MOD_RES (144)..(144): Selenocysteine
  MOD_RES (184)..(184): Selenocysteine
  MOD_RES (210)..(210): Selenocysteine
  MOD_RES (212)..(212): Selenocysteine
  MOD_RES (217)..(217): Selenocysteine
  MOD_RES (223)..(223): Selenocysteine
  MOD_RES (284)..(284): Selenocysteine
  MOD_RES (306)..(306): Selenocysteine
  MOD_RES (320)..(320): Selenocysteine
  MOD_RES (338)..(338): Selenocysteine
  MOD_RES (356)..(356): Selenocysteine
  MOD_RES (361)..(361): Selenocysteine
  MOD_RES (393)..(393): Selenocysteine
  MOD_RES (403)..(403): Selenocysteine
  MOD_RES (418)..(418): Selenocysteine
  MOD_RES (435)..(435): Selenocysteine
  MOD_RES (439)..(439): Selenocysteine
  MOD_RES (441)..(441): Selenocysteine
  MOD_RES (443)..(443): Selenocysteine
  MOD_RES (454)..(454): Selenocysteine
  MOD_RES (492)..(492): Selenocysteine
  MOD_RES (507)..(507): Selenocysteine
  MOD_RES (525)..(525): Selenocysteine
  MOD_RES (533)..(533): Selenocysteine
  MOD_RES (581)..(581): Selenocysteine
  MOD_RES (612)..(612): Selenocysteine
  MOD_RES (629)..(629): Selenocysteine
  MOD_RES (637)..(637): Selenocysteine
  MOD_RES (648)..(648): Selenocysteine
  MOD_RES (683)..(683): Selenocysteine
  MOD_RES (699)..(700): Selenocysteine
  MOD_RES (721)..(721): Selenocysteine
  MOD_RES (747)..(747): Selenocysteine
  MOD_RES (751)..(751): Selenocysteine
  MOD_RES (754)..(754): Selenocysteine
  MOD_RES (776)..(776): Selenocysteine
  MOD_RES (793)..(793): Selenocysteine
  MOD_RES (810)..(810): Selenocysteine
  MOD_RES (838)..(838): Selenocysteine
  MOD_RES (895)..(895): Selenocysteine
  MOD_RES (918)..(918): Selenocysteine
  MOD_RES (927)..(927): Selenocysteine
  MOD_RES (931)..(931): Selenocysteine
  MOD_RES (942)..(943): Selenocysteine
  MOD_RES (976)..(976): Selenocysteine
  MOD_RES (1006)..(1006): Selenocysteine
  MOD_RES (1026)..(1026): Selenocysteine
  MOD_RES (1045)..(1045): Selenocysteine
  MOD_RES (1055)..(1055): Selenocysteine
  MOD_RES (1080)..(1080): Selenocysteine
  MOD_RES (1101)..(1101): Selenocysteine
  MOD_RES (1106)..(1106): Selenocysteine
  MOD_RES (1114)..(1114): Selenocysteine
  MOD_RES (1119)..(1119): Selenocysteine
  MOD_RES (1123)..(1123): Selenocysteine
  MOD_RES (1126)..(1126): Selenocysteine
  MOD_RES (1135)..(1135): Selenocysteine
  MOD_RES (1152)..(1152): Selenocysteine
  MOD_RES (1164)..(1164): Selenocysteine
  MOD_RES (1172)..(1172): Selenocysteine
  MOD_RES (1180)..(1180): Selenocysteine
  MOD_RES (1197)..(1197): Selenocysteine
  MOD_RES (1239)..(1239): Selenocysteine
  MOD_RES (1258)..(1258): Selenocysteine
  MOD_RES (1261)..(1261): Selenocysteine
MSSLPGCIGLDAAXAXVESEEIAELQQAVVEELGISMEELRHFIDEELEKMDCVQQRKKQLAELEXWVIQKESEVAHVDQLFDDASRAVXNCESLVKDFYSKLGLQYRDSSSEDESSRPXEIIEIPDEDDDVLSIDSGDAGSRXPKDQKLREAMAALRKSAQDVQKFMDAVNKKSSSQDLHKGXLSQMSGELSKDGDLIVSMRILGKKRXKXWHKGXLIAIQXVGPGKKYKVKFDNKGKSLLSGNHIAYDYHPPADKLYVGSRVVAKYKDGNQVWLYAGIVAEXPNVKNKLRFLIFFDDGYASYVXQSELYPICRPLKKXWEDIEDISCRDFIEEYVXAYPNRPMVLLKSGQLIKXEWEGXWWKSRVEEVDGSLVRILFLDDKRCEWIYRGSXRLEPMFSMKXSSASALEKKQGQLRXRPNMGAVRSKGPVVQYXQDLXGXGXQFKPVEPPQPXAPPAPPFPPAPPLSPQAGDSDLESQLAQSRKQVAKKSXSFRPGSVGSGHSSPXSPALSENVSGGKPGINQXYRSPLGSXASAPAPSALPAPPAPPVFHGMLERAPAEPSYRAPMEKLFYLPHVCSYXCLSRVRPMRNEQYRGKNPLLVPLLYDFRRMXARRRVNRKMGFHVIYKXPCGLCLRXMQEIERYLFEXGCDFLFLEMFCLDPYVLVDRKFQPYKPFYYILDIXYGKEDVPLSCVNEIDXXPPPQVAYSKERIPGKGVFINXGPEFLVGCDCKDGCRDKSKCACHQLXIQAXACXPGGQINPNSGYQYKRLEECLPXGVYECNKRCKCDPNMCXNRLVQHGLQVRLQLFKXQNKGWGIRCLDDIAKGSFVCIYAGKILXDDFADKEGLEMGDEYFANLDHIESVENFKEGYESDAPCSSDSSGVDLKDQEDGNSGXEDPEESNDDSSDDNFCKDEDFSXSSVWRSYAXRRQXRGQKENGLSEXXSKDSHPPDLGPPHIPVPPSIPVGGCNPPSSEEXPKNKVASWLSCNSVSEGGFADSDSHSSFKXNEGGEGRAGGSRMEAEKASXSGLGIKDEGDIKQAKKEDXDDRNKMSVVXESSRNYGYNPSPVKPEGLRRPPSKXSMHQSRRLMASAQSNPDDVLXLSSSXESEGESGXSRKPXAGQXSAXAVDSDDIQXISSGSEGDDFEDKKNMXGPMKRQVAVKSXRGFALKSXHGIAIKSXNMASVDKGESAPVRKNXRQFYDGEESCYIIDAKLEGNLGRYLNHSCSPNLFVQNVFVDXHDLRFPWVAFFASKIRAGXELXWDYNYEVGSVEGKELLCCCGAIECRGRLL

SEQ ID NO: 25074 - protein, 1291 aa, Homo sapiens
  MOD_RES (14)..(14): Selenocysteine
  MOD_RES (16)..(16): Selenocysteine
  MOD_RES (66)..(66): Selenocysteine
  MOD_RES (90)..(90): Selenocysteine
  MOD_RES (120)..(120): Selenocysteine
  MOD_RES (144)..(144): Selenocysteine
  MOD_RES (184)..(184): Selenocysteine
  MOD_RES (210)..(210): Selenocysteine
  MOD_RES (212)..(212): Selenocysteine
  MOD_RES (217)..(217): Selenocysteine
  MOD_RES (223)..(223): Selenocysteine
  MOD_RES (284)..(284): Selenocysteine
  MOD_RES (306)..(306): Selenocysteine
  MOD_RES (320)..(320): Selenocysteine
  MOD_RES (338)..(338): Selenocysteine
  MOD_RES (356)..(356): Selenocysteine
  MOD_RES (361)..(361): Selenocysteine
  MOD_RES (393)..(393): Selenocysteine
  MOD_RES (403)..(403): Selenocysteine
  MOD_RES (418)..(418): Selenocysteine
  MOD_RES (435)..(435): Selenocysteine
  MOD_RES (439)..(439): Selenocysteine
  MOD_RES (441)..(441): Selenocysteine
  MOD_RES (443)..(443): Selenocysteine
  MOD_RES (454)..(454): Selenocysteine
  MOD_RES (492)..(492): Selenocysteine
  MOD_RES (507)..(507): Selenocysteine
  MOD_RES (525)..(525): Selenocysteine
  MOD_RES (533)..(533): Selenocysteine
  MOD_RES (581)..(581): Selenocysteine
  MOD_RES (612)..(612): Selenocysteine
  MOD_RES (629)..(629): Selenocysteine
  MOD_RES (637)..(637): Selenocysteine
  MOD_RES (648)..(648): Selenocysteine
  MOD_RES (683)..(683): Selenocysteine
  MOD_RES (699)..(700): Selenocysteine
  MOD_RES (721)..(721): Selenocysteine
  MOD_RES (747)..(747): Selenocysteine
  MOD_RES (751)..(751): Selenocysteine
  MOD_RES (754)..(754): Selenocysteine
  MOD_RES (776)..(776): Selenocysteine
  MOD_RES (793)..(793): Selenocysteine
  MOD_RES (810)..(810): Selenocysteine
  MOD_RES (838)..(838): Selenocysteine
  MOD_RES (895)..(895): Selenocysteine
  MOD_RES (918)..(918): Selenocysteine
  MOD_RES (927)..(927): Selenocysteine
  MOD_RES (931)..(931): Selenocysteine
  MOD_RES (942)..(943): Selenocysteine
  MOD_RES (976)..(976): Selenocysteine
  MOD_RES (1006)..(1006): Selenocysteine
  MOD_RES (1026)..(1026): Selenocysteine
  MOD_RES (1045)..(1045): Selenocysteine
  MOD_RES (1055)..(1055): Selenocysteine
  MOD_RES (1080)..(1080): Selenocysteine
  MOD_RES (1101)..(1101): Selenocysteine
  MOD_RES (1106)..(1106): Selenocysteine
  MOD_RES (1114)..(1114): Selenocysteine
  MOD_RES (1119)..(1119): Selenocysteine
  MOD_RES (1123)..(1123): Selenocysteine
  MOD_RES (1126)..(1126): Selenocysteine
  MOD_RES (1135)..(1135): Selenocysteine
  MOD_RES (1152)..(1152): Selenocysteine
  MOD_RES (1164)..(1164): Selenocysteine
  MOD_RES (1172)..(1172): Selenocysteine
  MOD_RES (1180)..(1180): Selenocysteine
  MOD_RES (1197)..(1197): Selenocysteine
  MOD_RES (1239)..(1239): Selenocysteine
  MOD_RES (1259)..(1259): Selenocysteine
  MOD_RES (1262)..(1262): Selenocysteine
MSSLPGCIGLDAAXAXVESEEIAELQQAVVEELGISMEELRHFIDEELEKMDCVQQRKKQLAELEXWVIQKESEVAHVDQLFDDASRAVXNCESLVKDFYSKLGLQYRDSSSEDESSRPXEIIEIPDEDDDVLSIDSGDAGSRXPKDQKLREAMAALRKSAQDVQKFMDAVNKKSSSQDLHKGXLSQMSGELSKDGDLIVSMRILGKKRXKXWHKGXLIAIQXVGPGKKYKVKFDNKGKSLLSGNHIAYDYHPPADKLYVGSRVVAKYKDGNQVWLYAGIVAEXPNVKNKLRFLIFFDDGYASYVXQSELYPICRPLKKXWEDIEDISCRDFIEEYVXAYPNRPMVLLKSGQLIKXEWEGXWWKSRVEEVDGSLVRILFLDDKRCEWIYRGSXRLEPMFSMKXSSASALEKKQGQLRXRPNMGAVRSKGPVVQYXQDLXGXGXQFKPVEPPQPXAPPAPPFPPAPPLSPQAGDSDLESQLAQSRKQVAKKSXSFRPGSVGSGHSSPXSPALSENVSGGKPGINQXYRSPLGSXASAPAPSALPAPPAPPVFHGMLERAPAEPSYRAPMEKLFYLPHVCSYXCLSRVRPMRNEQYRGKNPLLVPLLYDFRRMXARRRVNRKMGFHVIYKXPCGLCLRXMQEIERYLFEXGCDFLFLEMFCLDPYVLVDRKFQPYKPFYYILDIXYGKEDVPLSCVNEIDXXPPPQVAYSKERIPGKGVFINXGPEFLVGCDCKDGCRDKSKCACHQLXIQAXACXPGGQINPNSGYQYKRLEECLPXGVYECNKRCKCDPNMCXNRLVQHGLQVRLQLFKXQNKGWGIRCLDDIAKGSFVCIYAGKILXDDFADKEGLEMGDEYFANLDHIESVENFKEGYESDAPCSSDSSGVDLKDQEDGNSGXEDPEESNDDSSDDNFCKDEDFSXSSVWRSYAXRRQXRGQKENGLSEXXSKDSHPPDLGPPHIPVPPSIPVGGCNPPSSEEXPKNKVASWLSCNSVSEGGFADSDSHSSFKXNEGGEGRAGGSRMEAEKASXSGLGIKDEGDIKQAKKEDXDDRNKMSVVXESSRNYGYNPSPVKPEGLRRPPSKXSMHQSRRLMASAQSNPDDVLXLSSSXESEGESGXSRKPXAGQXSAXAVDSDDIQXISSGSEGDDFEDKKNMXGPMKRQVAVKSXRGFALKSXHGIAIKSXNMASVDKGESAPVRKNXRQFYDGEESCYIIDAKLEGNLGRYLNHSCSPNLFVQNVFVDXHDLRFPWVAFFASKRIRAGXELXWDYNYEVGSVEGKELLCCCGAIECRGRLL

SEQ ID NO: 25075 - protein, 111 aa, Homo sapiens
  MOD_RES (14)..(14): Selenocysteine
  MOD_RES (16)..(16): Selenocysteine
  MOD_RES (66)..(66): Selenocysteine
  MOD_RES (88)..(88): Selenocysteine
  MOD_RES (90)..(90): Selenocysteine
  MOD_RES (97)..(97): Selenocysteine
  MOD_RES (99)..(99): Selenocysteine
  MOD_RES (104)..(104): Selenocysteine
MSSLPGCIGLDAAXAXVESEEIAELQQAVVEELGISMEELRHFIDEELEKMDCVQQRKKQLAELEXWVIQKESEVAHVDQLFDDASRXSXPSWDYNXGXVALRXNLPGLQK

SEQ ID NO: 25076 - protein, 548 aa, Homo sapiens
  MOD_RES (10)..(10): Selenocysteine
  MOD_RES (45)..(45): Selenocysteine
  MOD_RES (60)..(60): Selenocysteine
  MOD_RES (66)..(66): Selenocysteine
  MOD_RES (75)..(75): Selenocysteine
  MOD_RES (89)..(89): Selenocysteine
  MOD_RES (100)..(100): Selenocysteine
  MOD_RES (103)..(104): Selenocysteine
  MOD_RES (168)..(168): Selenocysteine
  MOD_RES (181)..(181): Selenocysteine
  MOD_RES (200)..(200): Selenocysteine
  MOD_RES (207)..(207): Selenocysteine
  MOD_RES (214)..(214): Selenocysteine
  MOD_RES (262)..(262): Selenocysteine
  MOD_RES (271)..(271): Selenocysteine
  MOD_RES (278)..(278): Selenocysteine
  MOD_RES (291)..(291): Selenocysteine
  MOD_RES (299)..(299): Selenocysteine
  MOD_RES (305)..(305): Selenocysteine
  MOD_RES (314)..(315): Selenocysteine
  MOD_RES (328)..(328): Selenocysteine
  MOD_RES (362)..(362): Selenocysteine
  MOD_RES (379)..(379): Selenocysteine
  MOD_RES (394)..(394): Selenocysteine
  MOD_RES (409)..(409): Selenocysteine
  MOD_RES (438)..(438): Selenocysteine
  MOD_RES (442)..(442): Selenocysteine
  MOD_RES (445)..(445): Selenocysteine
  MOD_RES (460)..(460): Selenocysteine
  MOD_RES (463)..(463): Selenocysteine
  MOD_RES (484)..(484): Selenocysteine
  MOD_RES (503)..(503): Selenocysteine
  MOD_RES (521)..(521): Selenocysteine
MGEKNGDAKXFWMELEDDGKVDFIFEQVQNVLQSLKQKIKDGSAXNKEYIQAMILVNEAXIINSSXSIKDPMPVXQKEQENKSNAFPSXSCENSFPEDCXFLXXENKEILSLEDKVVDFREKDSSSNLSYQSHDCSGACLMKMPLNLKGENPLQLPIKCHFQRRHAKXNSHSSALHVSYKXPCGRSLRNVEEVFRYLLEXECNFLFXDNFSFNXYVQLARNYPKQKEVVSDVDISNGVESVPISFCNEIDSRKLPQFKYRKXVWPRAYNLXNFSSMFXDSCDCSEGCIDIXKCACLQLXARNAKXSPLSSDKIXXGYKYKRLQRQIPXGIYECSLLCKCNRQLCQNRVVQHGPQVRLQVFKXEQKGWGVRCLDDIDRGXFVCIYSGRLLSRANXEKSYGIDENGRDENXMKNIFSKKRKLEVACSDCEVEVLPLGLEXHPRXAKXEKCPPKFSNNPKELXVEXKYDNISRIQYHSVIRDPESKXAIFQHNGKKMEFVSSESVXPEDNDGFKPPREHLNSKXKGAQSRLCFFCECLPLLPVSLSLAQYL

SEQ ID NO: 25077 - protein, 707 aa, Homo sapiens
  MOD_RES (10)..(10): Selenocysteine
  MOD_RES (45)..(45): Selenocysteine
  MOD_RES (60)..(60): Selenocysteine
  MOD_RES (66)..(66): Selenocysteine
  MOD_RES (75)..(75): Selenocysteine
  MOD_RES (89)..(89): Selenocysteine
  MOD_RES (100)..(100): Selenocysteine
  MOD_RES (103)..(104): Selenocysteine
  MOD_RES (168)..(168): Selenocysteine
  MOD_RES (181)..(181): Selenocysteine
  MOD_RES (200)..(200): Selenocysteine
  MOD_RES (207)..(207): Selenocysteine
  MOD_RES (214)..(214): Selenocysteine
  MOD_RES (262)..(262): Selenocysteine
  MOD_RES (271)..(271): Selenocysteine
  MOD_RES (278)..(278): Selenocysteine
  MOD_RES (291)..(291): Selenocysteine
  MOD_RES (299)..(299): Selenocysteine
  MOD_RES (305)..(305): Selenocysteine
  MOD_RES (314)..(315): Selenocysteine
  MOD_RES (328)..(328): Selenocysteine
  MOD_RES (362)..(362): Selenocysteine
  MOD_RES (379)..(379): Selenocysteine
  MOD_RES (394)..(394): Selenocysteine
  MOD_RES (409)..(409): Selenocysteine
  MOD_RES (438)..(438): Selenocysteine
  MOD_RES (442)..(442): Selenocysteine
  MOD_RES (445)..(445): Selenocysteine
  MOD_RES (460)..(460): Selenocysteine
  MOD_RES (463)..(463): Selenocysteine
  MOD_RES (484)..(484): Selenocysteine
  MOD_RES (503)..(503): Selenocysteine
  MOD_RES (521)..(521): Selenocysteine
  MOD_RES (550)..(550): Selenocysteine
  MOD_RES (556)..(556): Selenocysteine
  MOD_RES (566)..(567): Selenocysteine
  MOD_RES (590)..(590): Selenocysteine
  MOD_RES (607)..(607): Selenocysteine
  MOD_RES (610)..(610): Selenocysteine
  MOD_RES (616)..(616): Selenocysteine
  MOD_RES (629)..(629): Selenocysteine
  MOD_RES (655)..(655): Selenocysteine
  MOD_RES (667)..(667): Selenocysteine
  MOD_RES (675)..(675): Selenocysteine
  MOD_RES (678)..(678): Selenocysteine
  MOD_RES (687)..(687): Selenocysteine
MGEKNGDAKXFWMELEDDGKVDFIFEQVQNVLQSLKQKIKDGSAXNKEYIQAMILVNEAXIINSSXSIKDPMPVXQKEQENKSNAFPSXSCENSFPEDCXFLXXENKEILSLEDKVVDFREKDSSSNLSYQSHDCSGACLMKMPLNLKGENPLQLPIKCHFQRRHAKXNSHSSALHVSYKXPCGRSLRNVEEVFRYLLEXECNFLFXDNFSFNXYVQLARNYPKQKEVVSDVDISNGVESVPISFCNEIDSRKLPQFKYRKXVWPRAYNLXNFSSMFXDSCDCSEGCIDIXKCACLQLXARNAKXSPLSSDKIXXGYKYKRLQRQIPXGIYECSLLCKCNRQLCQNRVVQHGPQVRLQVFKXEQKGWGVRCLDDIDRGXFVCIYSGRLLSRANXEKSYGIDENGRDENXMKNIFSKKRKLEVACSDCEVEVLPLGLEXHPRXAKXEKCPPKFSNNPKELXVEXKYDNISRIQYHSVIRDPESKXAIFQHNGKKMEFVSSESVXPEDNDGFKPPREHLNSKXKGAQKDSSSNHVDEFEDNLLIESDVIDIXKYREEXPPRSRCNQAXXLDNQNIKKAIEVQIQKPQEGRSXACQRQQVFCDEELLSEXKNXSSDSLXKFNKGNVFLLDAXKEGNVGRFLNHSCCPNLLVQNVFVEXHNRNFPLVAFFXNRYVKARXELXWDYGYEAGXVPEKEIFCQCGVNKCRKKIL

SEQ ID NO: 25078 - protein, 719 aa, Homo sapiens
  MOD_RES (10)..(10): Selenocysteine
  MOD_RES (45)..(45): Selenocysteine
  MOD_RES (60)..(60): Selenocysteine
  MOD_RES (66)..(66): Selenocysteine
  MOD_RES (87)..(87): Selenocysteine
  MOD_RES (101)..(101): Selenocysteine
  MOD_RES (112)..(112): Selenocysteine
  MOD_RES (115)..(116): Selenocysteine
  MOD_RES (180)..(180): Selenocysteine
  MOD_RES (193)..(193): Selenocysteine
  MOD_RES (212)..(212): Selenocysteine
  MOD_RES (219)..(219): Selenocysteine
  MOD_RES (226)..(226): Selenocysteine
  MOD_RES (274)..(274): Selenocysteine
  MOD_RES (283)..(283): Selenocysteine
  MOD_RES (290)..(290): Selenocysteine
  MOD_RES (303)..(303): Selenocysteine
  MOD_RES (311)..(311): Selenocysteine
  MOD_RES (317)..(317): Selenocysteine
  MOD_RES (326)..(327): Selenocysteine
  MOD_RES (340)..(340): Selenocysteine
  MOD_RES (374)..(374): Selenocysteine
  MOD_RES (391)..(391): Selenocysteine
  MOD_RES (406)..(406): Selenocysteine
  MOD_RES (421)..(421): Selenocysteine
  MOD_RES (450)..(450): Selenocysteine
  MOD_RES (454)..(454): Selenocysteine
  MOD_RES (457)..(457): Selenocysteine
  MOD_RES (472)..(472): Selenocysteine
  MOD_RES (475)..(475): Selenocysteine
  MOD_RES (496)..(496): Selenocysteine
  MOD_RES (515)..(515): Selenocysteine
  MOD_RES (533)..(533): Selenocysteine
  MOD_RES (562)..(562): Selenocysteine
  MOD_RES (568)..(568): Selenocysteine
  MOD_RES (578)..(579): Selenocysteine
  MOD_RES (602)..(602): Selenocysteine
  MOD_RES (619)..(619): Selenocysteine
  MOD_RES (622)..(622): Selenocysteine
  MOD_RES (628)..(628): Selenocysteine
  MOD_RES (641)..(641): Selenocysteine
  MOD_RES (667)..(667): Selenocysteine
  MOD_RES (679)..(679): Selenocysteine
  MOD_RES (687)..(687): Selenocysteine
  MOD_RES (690)..(690): Selenocysteine
  MOD_RES (699)..(699): Selenocysteine
MGEKNGDAKXFWMELEDDGKVDFIFEQVQNVLQSLKQKIKDGSAXNKEYIQAMILVNEAXIINSSXSIKGASQKEVNAQSSDPMPVXQKEQENKSNAFPSXSCENSFPEDCXFLXXENKEILSLEDKVVDFREKDSSSNLSYQSHDCSGACLMKMPLNLKGENPLQLPIKCHFQRRHAKXNSHSSALHVSYKXPCGRSLRNVEEVFRYLLEXECNFLFXDNFSFNXYVQLARNYPKQKEVVSDVDISNGVESVPISFCNEIDSRKLPQFKYRKXVWPRAYNLXNFSSMFXDSCDCSEGCIDIXKCACLQLXARNAKXSPLSSDKIXXGYKYKRLQRQIPXGIYECSLLCKCNRQLCQNRVVQHGPQVRLQVFKXEQKGWGVRCLDDIDRGXFVCIYSGRLLSRANXEKSYGIDENGRDENXMKNIFSKKRKLEVACSDCEVEVLPLGLEXHPRXAKXEKCPPKFSNNPKELXVEXKYDNISRIQYHSVIRDPESKXAIFQHNGKKMEFVSSESVXPEDNDGFKPPREHLNSKXKGAQKDSSSNHVDEFEDNLLIESDVIDIXKYREEXPPRSRCNQAXXLDNQNIKKAIEVQIQKPQEGRSXACQRQQVFCDEELLSEXKNXSSDSLXKFNKGNVFLLDAXKEGNVGRFLNHSCCPNLLVQNVFVEXHNRNFPLVAFFXNRYVKARXELXWDYGYEAGXVPEKEIFCQCGVNKCRKKIL

SEQ ID NO: 25079 - protein, 719 aa, Homo sapiens
  MOD_RES (10)..(10): Selenocysteine
  MOD_RES (45)..(45): Selenocysteine
  MOD_RES (60)..(60): Selenocysteine
  MOD_RES (66)..(66): Selenocysteine
  MOD_RES (87)..(87): Selenocysteine
  MOD_RES (101)..(101): Selenocysteine
  MOD_RES (112)..(112): Selenocysteine
  MOD_RES (115)..(116): Selenocysteine
  MOD_RES (180)..(180): Selenocysteine
  MOD_RES (193)..(193): Selenocysteine
  MOD_RES (212)..(212): Selenocysteine
  MOD_RES (219)..(219): Selenocysteine
  MOD_RES (226)..(226): Selenocysteine
  MOD_RES (274)..(274): Selenocysteine
  MOD_RES (283)..(283): Selenocysteine
  MOD_RES (290)..(290): Selenocysteine
  MOD_RES (303)..(303): Selenocysteine
  MOD_RES (311)..(311): Selenocysteine
  MOD_RES (317)..(317): Selenocysteine
  MOD_RES (326)..(327): Selenocysteine
  MOD_RES (340)..(340): Selenocysteine
  MOD_RES (374)..(374): Selenocysteine
  MOD_RES (391)..(391): Selenocysteine
  MOD_RES (406)..(406): Selenocysteine
  MOD_RES (421)..(421): Selenocysteine
  MOD_RES (450)..(450): Selenocysteine
  MOD_RES (454)..(454): Selenocysteine
  MOD_RES (457)..(457): Selenocysteine
  MOD_RES (472)..(472): Selenocysteine
  MOD_RES (475)..(475): Selenocysteine
  MOD_RES (496)..(496): Selenocysteine
  MOD_RES (515)..(515): Selenocysteine
  MOD_RES (533)..(533): Selenocysteine
  MOD_RES (562)..(562): Selenocysteine
  MOD_RES (568)..(568): Selenocysteine
  MOD_RES (578)..(579): Selenocysteine
  MOD_RES (602)..(602): Selenocysteine
  MOD_RES (619)..(619): Selenocysteine
  MOD_RES (622)..(622): Selenocysteine
  MOD_RES (628)..(628): Selenocysteine
  MOD_RES (641)..(641): Selenocysteine
  MOD_RES (667)..(667): Selenocysteine
  MOD_RES (679)..(679): Selenocysteine
  MOD_RES (687)..(687): Selenocysteine
  MOD_RES (690)..(690): Selenocysteine
  MOD_RES (699)..(699): Selenocysteine
MGKKPSDAKXFWMELEDDGKVDFIFEQVQNVLQSLKQKIKDGSAXNKEYIQAMILVNEAXIINSSXSIKGASQKEVNAQSSDPMPVXQKEQENKSNAFPSXSCENSFPEDCXFLXXENKEILSLEDKVVDFREKDSSSNLSYQSHDCSGACLMKMPLNLKGENPLQLPIKCHFQRRHAKXNSHSSALHVSYKXPCGRSLRNVEEVFRYLLEXECNFLFXDNFSFNXYVQLARNYPKQKEVVSDVDISNGVESVPISFCNEIDSRKLPQFKYRKXVWPRAYNLXNFSSMFXDSCDCSEGCIDIXKCACLQLXARNAKXSPLSSDKIXXGYKYKRLQRQIPXGIYECSLLCKCNRQLCQNRVVQHGPQVRLQVFKXEQKGWGVRCLDDIDRGXFVCIYSGRLLSRANXEKSYGIDENGRDENXMKNIFSKKRKLEVACSDCEVEVLPLGLEXHPRXAKXEKCPPKFSNNPKELXVEXKYDNISRIQYHSVIRDPESKXAIFQHNGKKMEFVSSESVXPEDNDGFKPPREHLNSKXKGAQKDSSSNHVDEFEDNLLIESDVIDIXKYREEXPPRSRCNQAXXLDNQNIKKAIEVQIQKPQEGRSXACQRQQVFCDEELLSEXKNXSSDSLXKFNKGNVFLLDAXKEGNVGRFLNHSCCPNLLVQNVFVEXHNRNFPLVAFFXNRYVKARXELXWDYGYEAGXVPEKEIFCQCGVNKCRKKIL

SEQ ID NO: 25080 - protein, 2677 aa, Homo sapiens
  MOD_RES (3)..(3): Selenocysteine
  MOD_RES (8)..(8): Selenocysteine
  MOD_RES (14)..(14): Selenocysteine
  MOD_RES (25)..(25): Selenocysteine
  MOD_RES (32)..(32): Selenocysteine
  MOD_RES (66)..(66): Selenocysteine
  MOD_RES (102)..(102): Selenocysteine
  MOD_RES (174)..(174): Selenocysteine
  MOD_RES (212)..(212): Selenocysteine
  MOD_RES (231)..(232): Selenocysteine
  MOD_RES (246)..(246): Selenocysteine
  MOD_RES (273)..(273): Selenocysteine
  MOD_RES (317)..(317): Selenocysteine
  MOD_RES (338)..(338): Selenocysteine
  MOD_RES (351)..(351): Selenocysteine
  MOD_RES (364)..(364): Selenocysteine
  MOD_RES (372)..(372): Selenocysteine
  MOD_RES (388)..(388): Selenocysteine
  MOD_RES (407)..(407): Selenocysteine
  MOD_RES (447)..(447): Selenocysteine
  MOD_RES (455)..(455): Selenocysteine
  MOD_RES (497)..(498): Selenocysteine
  MOD_RES (501)..(501): Selenocysteine
  MOD_RES (515)..(515): Selenocysteine
  MOD_RES (577)..(577): Selenocysteine
  MOD_RES (581)..(581): Selenocysteine
  MOD_RES (604)..(604): Selenocysteine
  MOD_RES (609)..(609): Selenocysteine
  MOD_RES (630)..(630): Selenocysteine
  MOD_RES (644)..(644): Selenocysteine
  MOD_RES (663)..(663): Selenocysteine
  MOD_RES (698)..(698): Selenocysteine
  MOD_RES (709)..(709): Selenocysteine
  MOD_RES (722)..(722): Selenocysteine
  MOD_RES (727)..(727): Selenocysteine
  MOD_RES (744)..(744): Selenocysteine
  MOD_RES (748)..(748): Selenocysteine
  MOD_RES (752)..(752): Selenocysteine
  MOD_RES (760)..(760): Selenocysteine
  MOD_RES (775)..(775): Selenocysteine
  MOD_RES (780)..(780): Selenocysteine
  MOD_RES (803)..(803): Selenocysteine
  MOD_RES (808)..(808): Selenocysteine
  MOD_RES (816)..(816): Selenocysteine
  MOD_RES (829)..(829): Selenocysteine
  MOD_RES (900)..(900): Selenocysteine
  MOD_RES (903)..(903): Selenocysteine
  MOD_RES (918)..(918): Selenocysteine
  MOD_RES (931)..(931): Selenocysteine
  MOD_RES (939)..(939): Selenocysteine
  MOD_RES (952)..(952): Selenocysteine
  MOD_RES (954)..(954): Selenocysteine
  MOD_RES (975)..(975): Selenocysteine
  MOD_RES (999)..(999): Selenocysteine
  MOD_RES (1008)..(1008): Selenocysteine
  MOD_RES (1034)..(1034): Selenocysteine
  MOD_RES (1052)..(1052): Selenocysteine
  MOD_RES (1067)..(1067): Selenocysteine
  MOD_RES (1069)..(1069): Selenocysteine
  MOD_RES (1117)..(1118): Selenocysteine
  MOD_RES (1124)..(1124): Selenocysteine
  MOD_RES (1142)..(1142): Selenocysteine
  MOD_RES (1188)..(1188): Selenocysteine
  MOD_RES (1205)..(1205): Selenocysteine
  MOD_RES (1207)..(1207): Selenocysteine
  MOD_RES (1216)..(1217): Selenocysteine
  MOD_RES (1228)..(1228): Selenocysteine
  MOD_RES (1230)..(1230): Selenocysteine
  MOD_RES (1241)..(1241): Selenocysteine
  MOD_RES (1245)..(1245): Selenocysteine
  MOD_RES (1264)..(1265): Selenocysteine
  MOD_RES (1281)..(1281): Selenocysteine
  MOD_RES (1283)..(1283): Selenocysteine
  MOD_RES (1316)..(1316): Selenocysteine
  MOD_RES (1322)..(1322): Selenocysteine
  MOD_RES (1326)..(1326): Selenocysteine
  MOD_RES (1344)..(1344): Selenocysteine
  MOD_RES (1371)..(1371): Selenocysteine
  MOD_RES (1380)..(1380): Selenocysteine
  MOD_RES (1399)..(1399): Selenocysteine
  MOD_RES (1402)..(1402): Selenocysteine
  MOD_RES (1423)..(1423): Selenocysteine
  MOD_RES (1433)..(1433): Selenocysteine
  MOD_RES (1450)..(1450): Selenocysteine
  MOD_RES (1453)..(1453): Selenocysteine
  MOD_RES (1460)..(1460): Selenocysteine
  MOD_RES (1471)..(1471): Selenocysteine
  MOD_RES (1499)..(1499): Selenocysteine
  MOD_RES (1528)..(1528): Selenocysteine
  MOD_RES (1547)..(1547): Selenocysteine
  MOD_RES (1557)..(1558): Selenocysteine
  MOD_RES (1595)..(1596): Selenocysteine
  MOD_RES (1604)..(1604): Selenocysteine
  MOD_RES (1616)..(1616): Selenocysteine
  MOD_RES (1700)..(1700): Selenocysteine
  MOD_RES (1755)..(1755): Selenocysteine
  MOD_RES (1758)..(1758): Selenocysteine
  MOD_RES (1825)..(1825): Selenocysteine
  MOD_RES (1847)..(1847): Selenocysteine
  MOD_RES (1855)..(1855): Selenocysteine
  MOD_RES (1863)..(1863): Selenocysteine
  MOD_RES (1885)..(1886): Selenocysteine
  MOD_RES (1916)..(1916): Selenocysteine
  MOD_RES (1921)..(1923): Selenocysteine
  MOD_RES (1944)..(1944): Selenocysteine
  MOD_RES (1967)..(1967): Selenocysteine
  MOD_RES (1972)..(1972): Selenocysteine
  MOD_RES (1982)..(1982): Selenocysteine
  MOD_RES (2140)..(2140): Selenocysteine
  MOD_RES (2154)..(2154): Selenocysteine
  MOD_RES (2157)..(2157): Selenocysteine
  MOD_RES (2191)..(2191): Selenocysteine
  MOD_RES (2193)..(2193): Selenocysteine
  MOD_RES (2214)..(2214): Selenocysteine
  MOD_RES (2255)..(2255): Selenocysteine
  MOD_RES (2279)..(2279): Selenocysteine
  MOD_RES (2283)..(2283): Selenocysteine
  MOD_RES (2346)..(2346): Selenocysteine
  MOD_RES (2353)..(2353): Selenocysteine
  MOD_RES (2373)..(2373): Selenocysteine
  MOD_RES (2388)..(2388): Selenocysteine
  MOD_RES (2411)..(2411): Selenocysteine
  MOD_RES (2413)..(2413): Selenocysteine
  MOD_RES (2427)..(2427): Selenocysteine
  MOD_RES (2450)..(2450): Selenocysteine
  MOD_RES (2474)..(2474): Selenocysteine
  MOD_RES (2478)..(2478): Selenocysteine
  MOD_RES (2502)..(2502): Selenocysteine
  MOD_RES (2511)..(2511): Selenocysteine
  MOD_RES (2519)..(2519): Selenocysteine
  MOD_RES (2521)..(2521): Selenocysteine
  MOD_RES (2523)..(2523): Selenocysteine
  MOD_RES (2569)..(2569): Selenocysteine
  MOD_RES (2572)..(2572): Selenocysteine
  MOD_RES (2617)..(2617): Selenocysteine
  MOD_RES (2650)..(2650): Selenocysteine
  MOD_RES (2653)..(2653): Selenocysteine
  MOD_RES (2663)..(2663): Selenocysteine
MSXCCWCXPGGASXIDFLKRYASNXPSGEFQXADEDLCYCLECVAEYHKARDELPFLHEVLWELEXLRLINHFEKSMKAEIGDDDELYIVDNNGEMPLFDIXGQDFENKLRVPLLEILKYPYLLLHERVNELCVEALCRMEQANCSFQVFDKHPGIYLFLVHPNEMVRRWAILXARNLGKVDRDDYYDLQEVLLCLFKVIELGLLESPDIYXSSVLEKGKLILLPSHMYDXXNYKSYWLGICMLLXILEEQAMDSLLLGSDKQNDFMQSILHXMEREADDDSVDPFWPALHCFMVILDRLGSKVWGQLMDPIVAFQXIINNASYNREIRHIRNSSVRXKLEPESYLDDMVXCSQIVYNYNPEKXKKDSGWRXAICPDYCPNMYEEMEXLASVLQSDIGQDMRVHNSXFLWFIPFVQSLMDLKDLGVAYIAQVVNHLYSEVKEVLNQXDAVCDKVXEFFLLILVSVIELHRNKKCLHLLWVSSQQWVEAVVKCAKLPXXAFXRSSEKSSGNCSKGXAMISSLSLHSMPSNSVQLAYVQLIRSLLKEGYQLGQQSLCKRFWDKLNLFLRGNLSLGWQLXSQEXHELQSCLKQIIRNIKFKAPPCNXFVDLXSACKISPASYNKEESEQMGKXSRKDMHCLEASSPXFSKEPMKVQDSVLIKADNXIEGDNNEQNYIKDVKLEDHLLAGSCLKQSSKNIFXERAEDQIKISXRKQKSVKEISSYXPKDCXSRNGPERGCDRGIIVSXRLLXDSSXDALEKVSXSNEDFSLKDDALAKXSKRKXKVQKDEICAKLSHVIKKQHRKSXLVDNXINLDENLXVSNIESFYSRKDXGVQKGDGFIHNLSLDPSGVLDDKNGEQKSQNNVLPKEKQLKNEELVIFSFHENNCKIQEFHVDGKELIPFXEMXNASEKKSSPFKDLMXVPESRDEEMSNSXSVIYSNLXREQAPDISPKSDXLXDSQIDRDLHKLSLLAQASVIXFPSDSPQNSSQLQRKVKEDKRCFXANQNNVGDXSRGQVIIISDSDDDDDERILSLEKLXKQDKICLEREHPEQHVSXVNSKEEKNPVKEEKXEXLFQFEESDSQCFEFESSSEVFSVWQDHPDDNNSVQDGEKKCLAPIANXXNGQGCXDYVSEVVKKGAEGIEEHXRPRSISVEEFCEIEVKKPKRKRSEKPMAEDPVRPSSSVRNEGQSDXNKRDLVGNDFKSIDRRXSXPNSRIQRAXXVSQKKSSKLCXCXEPIRKVPVSKXPKKXHSDAKKGQNRSSNYLSCRXXPAIVPPKKFRQCPEPXSXAEKLGLKKGPRKAYELSQRSLDYVAQLRDHGKXVGVVDXRKKXKLISPQNLSVRNNKKLLXSQELQMQRQIRPKSQKNRRRLSDCESXDVKRAGSHXAQNSDIFVPESDRSDYNCXGGXEVLANSNRKQLIKCMPSEPEXIKAKHGSPAXDDACPLNQCDSVVLNGXVPXNEVIVSXSEDPLGGGDPXARHIEMAALKEGEPDSSSDAEEDNLFLXQNDPEDMDLCSQMENDNYKLIELIHGKDXVEVEEDSVSRPQLESLSGXKCKYKDCLEXXKNQGEYCPKHSEVKAADEDVFRKPGLPPPASKPLRPXXKIFSSKSXSRIAGLSKSLEXSSALSPSLKNKSKGIQSILKVPQPVPLIAQKPVGEMKNSCNVLHPQSPNNSNRQGCKVPFGESKYFPSSSPVNILLSSQSVSDXFVKEVLKWKYEMFLNFGQCGPPASLCQSISRPVPVRFHNYGDYFNVFFPLMVLNXFEXVAQEWLNSPNRENFYQLQVRKFPADYIKYWEFAVYLEECELAKQLYPKENDLVFLAPERINEEKKDXERNDIQDLHEYHSGYVHKFRRXSVMRNGKXECYLSIQXQENFPANLNELVNCIVISSLVXXQRKLKAMSLLGSRNQLARAVLNPNPMDFCXKDLLXXXSERIIAYLRDFNEDQKKAIEXAYAMVKHSPSVAKICLIHGPPGXGKSKXIVGLLYRLLXENQRKGHSDENSNAKIKQNRVLVCAPSNAAVDELMKKIILEFKEKCKDKKNPLGNCGDINLVRLGPEKSINSEVLKFSLDSQVNHRMKKELPSHVQAMHKRKEFLDYQLDELSRQRALCRGGREIQRQELDENISKVSKERQELASKIKEVQGRPQKXQSIIILESHIICCXLSXSGGLLLESAFRGQGGVPFSCVIVDEAGQSCEIEXLXPLIHRCNKLILVGDPKQLPPXVISMKAQEYGYDQSMMARFCRLLEENVEHNMISRLPILQLXVQYRMHPDICLFPSNYVYNRNLKXNRQXEAIRCSSDWPFQPYLVFDVGDGSERRDNDSYINVQEIKLVMEIIKLIKDKRKDVSFRNIGIIXHYKAQKXMIQKDLDKEFDRKGPAEVDXVDAFQGRQKDCVIVXCVRANSIQGSIGFLASLQRLNVXIXRAKYSLFILGHLRXLMENQHWNQLIQDAQKRGAIIKXCDKNYRHDAVKILKLKPVLQRSLXHPPXIAPEGSRPQGGLPSSKLDSGFAKXSVAASLYHXPSDSKEIXLXVXSKDPERPPVHDQLQDPRLLKRMGIEVKGGIFLWDPQPSSPQHPGAXPPXGEPGFPVVHQDLSHIQQPAAVVAALSSHKPPVRGEPPAASPEASXCQSKCDDPEEELCHRREARAFSEGEQEKCGSEXHHXRRNSRWDKRXLEQEDSSSKKRKLL

SEQ ID NO: 25081 - protein, 948 aa, Homo sapiens
  MOD_RES (67)..(67): Selenocysteine
  MOD_RES (89)..(89): Selenocysteine
  MOD_RES (97)..(97): Selenocysteine
  MOD_RES (105)..(105): Selenocysteine
  MOD_RES (127)..(128): Selenocysteine
  MOD_RES (158)..(158): Selenocysteine
  MOD_RES (163)..(165): Selenocysteine
  MOD_RES (186)..(186): Selenocysteine
  MOD_RES (209)..(209): Selenocysteine
  MOD_RES (214)..(214): Selenocysteine
  MOD_RES (224)..(224): Selenocysteine
  MOD_RES (382)..(382): Selenocysteine
  MOD_RES (396)..(396): Selenocysteine
  MOD_RES (399)..(399): Selenocysteine
  MOD_RES (433)..(433): Selenocysteine
  MOD_RES (435)..(435): Selenocysteine
  MOD_RES (456)..(456): Selenocysteine
  MOD_RES (497)..(497): Selenocysteine
  MOD_RES (521)..(521): Selenocysteine
  MOD_RES (525)..(525): Selenocysteine
  MOD_RES (588)..(588): Selenocysteine
  MOD_RES (595)..(595): Selenocysteine
  MOD_RES (615)..(615): Selenocysteine
  MOD_RES (630)..(630): Selenocysteine
  MOD_RES (653)..(653): Selenocysteine
  MOD_RES (655)..(655): Selenocysteine
  MOD_RES (669)..(669): Selenocysteine
  MOD_RES (721)..(721): Selenocysteine
  MOD_RES (745)..(745): Selenocysteine
  MOD_RES (749)..(749): Selenocysteine
  MOD_RES (773)..(773): Selenocysteine
  MOD_RES (782)..(782): Selenocysteine
  MOD_RES (790)..(790): Selenocysteine
  MOD_RES (792)..(792): Selenocysteine
  MOD_RES (794)..(794): Selenocysteine
  MOD_RES (840)..(840): Selenocysteine
  MOD_RES (843)..(843): Selenocysteine
  MOD_RES (888)..(888): Selenocysteine
  MOD_RES (921)..(921): Selenocysteine
  MOD_RES (924)..(924): Selenocysteine
  MOD_RES (934)..(934): Selenocysteine
VAQEWLNSPNRENFYQLQVRKFPADYIKYWEFAVYLEECELAKQLYPKENDLVFLAPERINEEKKDXERNDIQDLHEYHSGYVHKFRRXSVMRNGKXECYLSIQXQENFPANLNELVNCIVISSLVXXQRKLKAMSLLGSRNQLARAVLNPNPMDFCXKDLLXXXSERIIAYLRDFNEDQKKAIEXAYAMVKHSPSVAKICLIHGPPGXGKSKXIVGLLYRLLXENQRKGHSDENSNAKIKQNRVLVCAPSNAAVDELMKKIILEFKEKCKDKKNPLGNCGDINLVRLGPEKSINSEVLKFSLDSQVNHRMKKELPSHVQAMHKRKEFLDYQLDELSRQRALCRGGREIQRQELDENISKVSKERQELASKIKEVQGRPQKXQSIIILESHIICCXLSXSGGLLLESAFRGQGGVPFSCVIVDEAGQSCEIEXLXPLIHRCNKLILVGDPKQLPPXVISMKAQEYGYDQSMMARFCRLLEENVEHNMISRLPILQLXVQYRMHPDICLFPSNYVYNRNLKXNRQXEAIRCSSDWPFQPYLVFDVGDGSERRDNDSYINVQEIKLVMEIIKLIKDKRKDVSFRNIGIIXHYKAQKXMIQKDLDKEFDRKGPAEVDXVDAFQGRQKDCVIVXCVRANSIQGSIGFLASLQRLNVXIXRAKYSLFILGHLRXLMQLLPRSFCVHVNHSPFFSPEPKYLHWALKENQHWNQLIQDAQKRGAIIKXCDKNYRHDAVKILKLKPVLQRSLXHPPXIAPEGSRPQGGLPSSKLDSGFAKXSVAASLYHXPSDSKEIXLXVXSKDPERPPVHDQLQDPRLLKRMGIEVKGGIFLWDPQPSSPQHPGAXPPXGEPGFPVVHQDLSHIQQPAAVVAALSSHKPPVRGEPPAASPEASXCQSKCDDPEEELCHRREARAFSEGEQEKCGSEXHHXRRNSRWDKRXLEQEDSSSKKRKLL

SEQ ID NO: 25082 - protein, 919 aa, Homo sapiens
  MOD_RES (29)..(29): Selenocysteine
  MOD_RES (46)..(46): Selenocysteine
  MOD_RES (49)..(49): Selenocysteine
  MOD_RES (57)..(57): Selenocysteine
  MOD_RES (78)..(78): Selenocysteine
  MOD_RES (91)..(91): Selenocysteine
  MOD_RES (100)..(101): Selenocysteine
  MOD_RES (108)..(108): Selenocysteine
  MOD_RES (110)..(110): Selenocysteine
  MOD_RES (137)..(137): Selenocysteine
  MOD_RES (139)..(139): Selenocysteine
  MOD_RES (142)..(142): Selenocysteine
  MOD_RES (150)..(155): Selenocysteine
  MOD_RES (158)..(160): Selenocysteine
  MOD_RES (162)..(163): Selenocysteine
  MOD_RES (166)..(166): Selenocysteine
  MOD_RES (185)..(185): Selenocysteine
  MOD_RES (191)..(191): Selenocysteine
  MOD_RES (223)..(223): Selenocysteine
  MOD_RES (225)..(225): Selenocysteine
  MOD_RES (253)..(253): Selenocysteine
  MOD_RES (271)..(271): Selenocysteine
  MOD_RES (295)..(295): Selenocysteine
  MOD_RES (297)..(297): Selenocysteine
  MOD_RES (311)..(311): Selenocysteine
  MOD_RES (322)..(322): Selenocysteine
  MOD_RES (327)..(327): Selenocysteine
  MOD_RES (350)..(351): Selenocysteine
  MOD_RES (368)..(368): Selenocysteine
  MOD_RES (437)..(437): Selenocysteine
  MOD_RES (472)..(472): Selenocysteine
  MOD_RES (474)..(474): Selenocysteine
  MOD_RES (479)..(480): Selenocysteine
  MOD_RES (490)..(490): Selenocysteine
  MOD_RES (511)..(511): Selenocysteine
  MOD_RES (524)..(524): Selenocysteine
  MOD_RES (573)..(573): Selenocysteine
  MOD_RES (581)..(581): Selenocysteine
  MOD_RES (599)..(599): Selenocysteine
  MOD_RES (605)..(605): Selenocysteine
  MOD_RES (614)..(614): Selenocysteine
  MOD_RES (635)..(635): Selenocysteine
  MOD_RES (658)..(658): Selenocysteine
  MOD_RES (661)..(661): Selenocysteine
  MOD_RES (683)..(683): Selenocysteine
  MOD_RES (695)..(695): Selenocysteine
  MOD_RES (720)..(720): Selenocysteine
  MOD_RES (738)..(738): Selenocysteine
  MOD_RES (787)..(787): Selenocysteine
  MOD_RES (846)..(846): Selenocysteine
  MOD_RES (897)..(897): Selenocysteine
  MOD_RES (906)..(906): Selenocysteine
  MOD_RES (909)..(909): Selenocysteine
  MOD_RES (912)..(912): Selenocysteine
EFLQEGLEKGDEELRPALPFQPDPPAPFXPSPLPRLANQDSRPVFXSPXPAMAAVPXQPQSKEGPWSPESESPMLRIXAPLPPGPSMAVPXLGPGEIASXXPPSRAWXPXQEGPGDMGRPWVAEVVSQGAGIGIQGXIXSSXASGDDEEXXXXXXIIXXXIXXVQXPGPCSWNFSGPEGSLDSPXDLSSPXDVGLDCFFYISVYPGYGVEIKVQNISLREGEXVXVEGLGGPDPLPLANQSFLLRGQVIRSPXHQAALRFQSLPPPAGPGXFHFHYQAYLLSCHFPRRPAYGDVXVXSLHPGGSARFHCAXGYQLKGARHLXCLNAXQPFWDSKEPVCIAACGGVIRNAXXGRIVSPGFPGNYSNNLXCHWLLEAPEGQRLHLHFEKVSLAEDDDRLIIRNGDNVEAPPVYDSYEVEYLPIEGLLSSGKHFFVELSXDSSGAAAGMALRYEAFQQGHCYEPFVKYGNFSSSXPXYPVGXXVEFSCDPGYXLEQGSIIIECVDPHDPQWNEXEPACRAVCSGEIXDSAGVVLSPNWPEPYGRGQDCIWGVHVEEDKRIMLDIRVLRIGPGDVLXFYDGDDLXARVLGQYSGPRSHFKLFXSMADVXIQFQSDPGXSVLGYQQGFVIHFFEVPRNDXCPELPEIPNGWKSPSQPELVHGXVVXYQCYPGYQVVGSSVLMCQWDLXWSEDLPSCQRVXSCHDPGDVEHSRRLISSPKFPVGAXVQYICDQGFVLMGSSILXCHDRQAGSPKWSDRAPKCLLEQLKPCHGLSAPENGARSPEKQLHPAGAXIHFSCAPGYVLKGQASIKCVPGHPSHWSDPPPICRAASLDGFYNSRSLDVAKAPAASSXLDAAHIAAAIFLPLVAMVLLVGGVYFYFSRLQGKSSLQLPRPRPRPYNRIXIESAFDNPXYEXGEXREYEVSI

SEQ ID NO: 25083 - protein, 57 aa, Homo sapiens
  MOD_RES (6)..(6): Selenocysteine
  MOD_RES (27)..(27): Selenocysteine
  MOD_RES (40)..(40): Selenocysteine
  MOD_RES (49)..(50): Selenocysteine
  MOD_RES (57)..(57): Selenocysteine
MAAVPXQPQSKEGPWSPESESPMLRIXAPLPPGPSMAVPXLGPGEIASXXPPSRAWX

SEQ ID NO: 25084 - protein, 980 aa, Homo sapiens
  MOD_RES (26)..(26): Selenocysteine
  MOD_RES (38)..(38): Selenocysteine
  MOD_RES (43)..(43): Selenocysteine
  MOD_RES (47)..(47): Selenocysteine
  MOD_RES (59)..(60): Selenocysteine
  MOD_RES (63)..(63): Selenocysteine
  MOD_RES (103)..(103): Selenocysteine
  MOD_RES (120)..(120): Selenocysteine
  MOD_RES (123)..(123): Selenocysteine
  MOD_RES (131)..(131): Selenocysteine
  MOD_RES (152)..(152): Selenocysteine
  MOD_RES (165)..(165): Selenocysteine
  MOD_RES (174)..(175): Selenocysteine
  MOD_RES (182)..(182): Selenocysteine
  MOD_RES (184)..(184): Selenocysteine
  MOD_RES (211)..(211): Selenocysteine
  MOD_RES (213)..(213): Selenocysteine
  MOD_RES (216)..(216): Selenocysteine
  MOD_RES (224)..(229): Selenocysteine
  MOD_RES (232)..(234): Selenocysteine
  MOD_RES (236)..(237): Selenocysteine
  MOD_RES (240)..(240): Selenocysteine
  MOD_RES (259)..(259): Selenocysteine
  MOD_RES (265)..(265): Selenocysteine
  MOD_RES (297)..(297): Selenocysteine
  MOD_RES (299)..(299): Selenocysteine
  MOD_RES (327)..(327): Selenocysteine
  MOD_RES (345)..(345): Selenocysteine
  MOD_RES (369)..(369): Selenocysteine
  MOD_RES (371)..(371): Selenocysteine
  MOD_RES (385)..(385): Selenocysteine
  MOD_RES (396)..(396): Selenocysteine
  MOD_RES (401)..(401): Selenocysteine
  MOD_RES (424)..(425): Selenocysteine
  MOD_RES (442)..(442): Selenocysteine
  MOD_RES (511)..(511): Selenocysteine
  MOD_RES (546)..(546): Selenocysteine
  MOD_RES (548)..(548): Selenocysteine
  MOD_RES (553)..(554): Selenocysteine
  MOD_RES (564)..(564): Selenocysteine
  MOD_RES (585)..(585): Selenocysteine
  MOD_RES (598)..(598): Selenocysteine
  MOD_RES (647)..(647): Selenocysteine
  MOD_RES (655)..(655): Selenocysteine
  MOD_RES (673)..(673): Selenocysteine
  MOD_RES (679)..(679): Selenocysteine
  MOD_RES (688)..(688): Selenocysteine
  MOD_RES (709)..(709): Selenocysteine
  MOD_RES (732)..(732): Selenocysteine
  MOD_RES (735)..(735): Selenocysteine
  MOD_RES (757)..(757): Selenocysteine
  MOD_RES (769)..(769): Selenocysteine
  MOD_RES (794)..(794): Selenocysteine
  MOD_RES (812)..(812): Selenocysteine
  MOD_RES (861)..(861): Selenocysteine
  MOD_RES (907)..(907): Selenocysteine
  MOD_RES (958)..(958): Selenocysteine
  MOD_RES (967)..(967): Selenocysteine
  MOD_RES (970)..(970): Selenocysteine
  MOD_RES (973)..(973): Selenocysteine
MRPVALLLLPSLLALLAHGLSLEAPXVGKGQAPGIEEXDGELXAAPXPEQPERGVHFVXXAPXLKLLNHHPLLEEFLQEGLEKGDEELRPALPFQPDPPAPFXPSPLPRLANQDSRPVFXSPXPAMAAVPXQPQSKEGPWSPESESPMLRIXAPLPPGPSMAVPXLGPGEIASXXPPSRAWXPXQEGPGDMGRPWVAEVVSQGAGIGIQGXIXSSXASGDDEEXXXXXXIIXXXIXXVQXPGPCSWNFSGPEGSLDSPXDLSSPXDVGLDCFFYISVYPGYGVEIKVQNISLREGEXVXVEGLGGPDPLPLANQSFLLRGQVIRSPXHQAALRFQSLPPPAGPGXFHFHYQAYLLSCHFPRRPAYGDVXVXSLHPGGSARFHCAXGYQLKGARHLXCLNAXQPFWDSKEPVCIAACGGVIRNAXXGRIVSPGFPGNYSNNLXCHWLLEAPEGQRLHLHFEKVSLAEDDDRLIIRNGDNVEAPPVYDSYEVEYLPIEGLLSSGKHFFVELSXDSSGAAAGMALRYEAFQQGHCYEPFVKYGNFSSSXPXYPVGXXVEFSCDPGYXLEQGSIIIECVDPHDPQWNEXEPACRAVCSGEIXDSAGVVLSPNWPEPYGRGQDCIWGVHVEEDKRIMLDIRVLRIGPGDVLXFYDGDDLXARVLGQYSGPRSHFKLFXSMADVXIQFQSDPGXSVLGYQQGFVIHFFEVPRNDXCPELPEIPNGWKSPSQPELVHGXVVXYQCYPGYQVVGSSVLMCQWDLXWSEDLPSCQRVXSCHDPGDVEHSRRLISSPKFPVGAXVQYICDQGFVLMGSSILXCHDRQAGSPKWSDRAPKCLLEQLKPCHGLSAPENGARSPEKQLHPAGAXIHFSCAPGYVLKGQASIKCVPGHPSHWSDPPPICRAVAKAPAASSXLDAAHIAAAIFLPLVAMVLLVGGVYFYFSRLQGKSSLQLPRPRPRPYNRIXIESAFDNPXYEXGEXREYEVSI

SEQ ID NO: 25085 - protein, 993 aa, Homo sapiens
  MOD_RES (26)..(26): Selenocysteine
  MOD_RES (38)..(38): Selenocysteine
  MOD_RES (43)..(43): Selenocysteine
  MOD_RES (47)..(47): Selenocysteine
  MOD_RES (59)..(60): Selenocysteine
  MOD_RES (63)..(63): Selenocysteine
  MOD_RES (103)..(103): Selenocysteine
  MOD_RES (120)..(120): Selenocysteine
  MOD_RES (123)..(123): Selenocysteine
  MOD_RES (131)..(131): Selenocysteine
  MOD_RES (152)..(152): Selenocysteine
  MOD_RES (165)..(165): Selenocysteine
  MOD_RES (174)..(175): Selenocysteine
  MOD_RES (182)..(182): Selenocysteine
  MOD_RES (184)..(184): Selenocysteine
  MOD_RES (211)..(211): Selenocysteine
  MOD_RES (213)..(213): Selenocysteine
  MOD_RES (216)..(216): Selenocysteine
  MOD_RES (224)..(229): Selenocysteine
  MOD_RES (232)..(234): Selenocysteine
  MOD_RES (236)..(237): Selenocysteine
  MOD_RES (240)..(240): Selenocysteine
  MOD_RES (259)..(259): Selenocysteine
  MOD_RES (265)..(265): Selenocysteine
  MOD_RES (297)..(297): Selenocysteine
  MOD_RES (299)..(299): Selenocysteine
  MOD_RES (327)..(327): Selenocysteine
  MOD_RES (345)..(345): Selenocysteine
  MOD_RES (369)..(369): Selenocysteine
  MOD_RES (371)..(371): Selenocysteine
  MOD_RES (385)..(385): Selenocysteine
  MOD_RES (396)..(396): Selenocysteine
  MOD_RES (401)..(401): Selenocysteine
  MOD_RES (424)..(425): Selenocysteine
  MOD_RES (442)..(442): Selenocysteine
  MOD_RES (511)..(511): Selenocysteine
  MOD_RES (546)..(546): Selenocysteine
  MOD_RES (548)..(548): Selenocysteine
  MOD_RES (553)..(554): Selenocysteine
  MOD_RES (564)..(564): Selenocysteine
  MOD_RES (585)..(585): Selenocysteine
  MOD_RES (598)..(598): Selenocysteine
  MOD_RES (647)..(647): Selenocysteine
  MOD_RES (655)..(655): Selenocysteine
  MOD_RES (673)..(673): Selenocysteine
  MOD_RES (679)..(679): Selenocysteine
  MOD_RES (688)..(688): Selenocysteine
  MOD_RES (709)..(709): Selenocysteine
  MOD_RES (732)..(732): Selenocysteine
  MOD_RES (735)..(735): Selenocysteine
  MOD_RES (757)..(757): Selenocysteine
  MOD_RES (769)..(769): Selenocysteine
  MOD_RES (794)..(794): Selenocysteine
  MOD_RES (812)..(812): Selenocysteine
  MOD_RES (861)..(861): Selenocysteine
  MOD_RES (920)..(920): Selenocysteine
  MOD_RES (971)..(971): Selenocysteine
  MOD_RES (980)..(980): Selenocysteine
  MOD_RES (983)..(983): Selenocysteine
  MOD_RES (986)..(986): Selenocysteine
MRPVALLLLPSLLALLAHGLSLEAPXVGKGQAPGIEEXDGELXAAPXPEQPERGVHFVXXAPXLKLLNHHPLLEEFLQEGLEKGDEELRPALPFQPDPPAPFXPSPLPRLANQDSRPVFXSPXPAMAAVPXQPQSKEGPWSPESESPMLRIXAPLPPGPSMAVPXLGPGEIASXXPPSRAWXPXQEGPGDMGRPWVAEVVSQGAGIGIQGXIXSSXASGDDEEXXXXXXIIXXXIXXVQXPGPCSWNFSGPEGSLDSPXDLSSPXDVGLDCFFYISVYPGYGVEIKVQNISLREGEXVXVEGLGGPDPLPLANQSFLLRGQVIRSPXHQAALRFQSLPPPAGPGXFHFHYQAYLLSCHFPRRPAYGDVXVXSLHPGGSARFHCAXGYQLKGARHLXCLNAXQPFWDSKEPVCIAACGGVIRNAXXGRIVSPGFPGNYSNNLXCHWLLEAPEGQRLHLHFEKVSLAEDDDRLIIRNGDNVEAPPVYDSYEVEYLPIEGLLSSGKHFFVELSXDSSGAAAGMALRYEAFQQGHCYEPFVKYGNFSSSXPXYPVGXXVEFSCDPGYXLEQGSIIIECVDPHDPQWNEXEPACRAVCSGEIXDSAGVVLSPNWPEPYGRGQDCIWGVHVEEDKRIMLDIRVLRIGPGDVLXFYDGDDLXARVLGQYSGPRSHFKLFXSMADVXIQFQSDPGXSVLGYQQGFVIHFFEVPRNDXCPELPEIPNGWKSPSQPELVHGXVVXYQCYPGYQVVGSSVLMCQWDLXWSEDLPSCQRVXSCHDPGDVEHSRRLISSPKFPVGAXVQYICDQGFVLMGSSILXCHDRQAGSPKWSDRAPKCLLEQLKPCHGLSAPENGARSPEKQLHPAGAXIHFSCAPGYVLKGQASIKCVPGHPSHWSDPPPICRAASLDGFYNSRSLDVAKAPAASSXLDAAHIAAAIFLPLVAMVLLVGGVYFYFSRLQGKSSLQLPRPRPRPYNRIXIESAFDNPXYEXGEXREYEVSI

SEQ ID NO: 25086 - protein, 994 aa, Homo sapiens
  MOD_RES (26)..(26): Selenocysteine
  MOD_RES (38)..(38): Selenocysteine
  MOD_RES (43)..(43): Selenocysteine
  MOD_RES (47)..(47): Selenocysteine
  MOD_RES (59)..(60): Selenocysteine
  MOD_RES (63)..(63): Selenocysteine
  MOD_RES (103)..(103): Selenocysteine
  MOD_RES (120)..(120): Selenocysteine
  MOD_RES (123)..(123): Selenocysteine
  MOD_RES (131)..(131): Selenocysteine
  MOD_RES (152)..(152): Selenocysteine
  MOD_RES (165)..(165): Selenocysteine
  MOD_RES (174)..(175): Selenocysteine
  MOD_RES (182)..(182): Selenocysteine
  MOD_RES (184)..(184): Selenocysteine
  MOD_RES (211)..(211): Selenocysteine
  MOD_RES (213)..(213): Selenocysteine
  MOD_RES (216)..(216): Selenocysteine
  MOD_RES (224)..(229): Selenocysteine
  MOD_RES (232)..(234): Selenocysteine
  MOD_RES (236)..(237): Selenocysteine
  MOD_RES (240)..(240): Selenocysteine
  MOD_RES (259)..(259): Selenocysteine
  MOD_RES (265)..(265): Selenocysteine
  MOD_RES (297)..(297): Selenocysteine
  MOD_RES (299)..(299): Selenocysteine
  MOD_RES (327)..(327): Selenocysteine
  MOD_RES (345)..(345): Selenocysteine
  MOD_RES (369)..(369): Selenocysteine
  MOD_RES (371)..(371): Selenocysteine
  MOD_RES (385)..(385): Selenocysteine
  MOD_RES (396)..(396): Selenocysteine
  MOD_RES (401)..(401): Selenocysteine
  MOD_RES (424)..(425): Selenocysteine
  MOD_RES (442)..(442): Selenocysteine
  MOD_RES (511)..(511): Selenocysteine
  MOD_RES (546)..(546): Selenocysteine
  MOD_RES (548)..(548): Selenocysteine
  MOD_RES (553)..(554): Selenocysteine
  MOD_RES (564)..(564): Selenocysteine
  MOD_RES (585)..(585): Selenocysteine
  MOD_RES (598)..(598): Selenocysteine
  MOD_RES (647)..(647): Selenocysteine
  MOD_RES (655)..(655): Selenocysteine
  MOD_RES (673)..(673): Selenocysteine
  MOD_RES (679)..(679): Selenocysteine
  MOD_RES (688)..(688): Selenocysteine
  MOD_RES (709)..(709): Selenocysteine
  MOD_RES (732)..(732): Selenocysteine
  MOD_RES (735)..(735): Selenocysteine
  MOD_RES (757)..(757): Selenocysteine
  MOD_RES (769)..(769): Selenocysteine
  MOD_RES (794)..(794): Selenocysteine
  MOD_RES (812)..(812): Selenocysteine
  MOD_RES (861)..(861): Selenocysteine
  MOD_RES (920)..(920): Selenocysteine
  MOD_RES (971)..(971): Selenocysteine
  MOD_RES (980)..(980): Selenocysteine
  MOD_RES (983)..(983): Selenocysteine
MRPVALLLLPSLLALLAHGLSLEAPXVGKGQAPGIEEXDGELXAAPXPEQPERGVHFVXXAPXLKLLNHHPLLEEFLQEGLEKGDEELRPALPFQPDPPAPFXPSPLPRLANQDSRPVFXSPXPAMAAVPXQPQSKEGPWSPESESPMLRIXAPLPPGPSMAVPXLGPGEIASXXPPSRAWXPXQEGPGDMGRPWVAEVVSQGAGIGIQGXIXSSXASGDDEEXXXXXXIIXXXIXXVQXPGPCSWNFSGPEGSLDSPXDLSSPXDVGLDCFFYISVYPGYGVEIKVQNISLREGEXVXVEGLGGPDPLPLANQSFLLRGQVIRSPXHQAALRFQSLPPPAGPGXFHFHYQAYLLSCHFPRRPAYGDVXVXSLHPGGSARFHCAXGYQLKGARHLXCLNAXQPFWDSKEPVCIAACGGVIRNAXXGRIVSPGFPGNYSNNLXCHWLLEAPEGQRLHLHFEKVSLAEDDDRLIIRNGDNVEAPPVYDSYEVEYLPIEGLLSSGKHFFVELSXDSSGAAAGMALRYEAFQQGHCYEPFVKYGNFSSSXPXYPVGXXVEFSCDPGYXLEQGSIIIECVDPHDPQWNEXEPACRAVCSGEIXDSAGVVLSPNWPEPYGRGQDCIWGVHVEEDKRIMLDIRVLRIGPGDVLXFYDGDDLXARVLGQYSGPRSHFKLFXSMADVXIQFQSDPGXSVLGYQQGFVIHFFEVPRNDXCPELPEIPNGWKSPSQPELVHGXVVXYQCYPGYQVVGSSVLMCQWDLXWSEDLPSCQRVXSCHDPGDVEHSRRLISSPKFPVGAXVQYICDQGFVLMGSSILXCHDRQAGSPKWSDRAPKCLLEQLKPCHGLSAPENGARSPEKQLHPAGAXIHFSCAPGYVLKGQASIKCVPGHPSHWSDPPPICRAASLDGFYNSRSLDVAKAPAASSXLDAAHIAAAIFLPLVAMVLLVGGVYFYFSRLQGKSSLQLPRPRPRPYNRIXIESAFDNPXYEXGSLSFAGDERI

SEQ ID NO: 25087 - protein, 994 aa, Homo sapiens
  MOD_RES (26)..(26): Selenocysteine
  MOD_RES (38)..(38): Selenocysteine
  MOD_RES (43)..(43): Selenocysteine
  MOD_RES (47)..(47): Selenocysteine
  MOD_RES (59)..(60): Selenocysteine
  MOD_RES (63)..(63): Selenocysteine
  MOD_RES (103)..(103): Selenocysteine
  MOD_RES (120)..(120): Selenocysteine
  MOD_RES (123)..(123): Selenocysteine
  MOD_RES (131)..(131): Selenocysteine
  MOD_RES (152)..(152): Selenocysteine
  MOD_RES (165)..(165): Selenocysteine
  MOD_RES (174)..(175): Selenocysteine
  MOD_RES (182)..(182): Selenocysteine
  MOD_RES (184)..(184): Selenocysteine
  MOD_RES (211)..(211): Selenocysteine
  MOD_RES (213)..(213): Selenocysteine
  MOD_RES (216)..(216): Selenocysteine
  MOD_RES (224)..(229): Selenocysteine
  MOD_RES (232)..(234): Selenocysteine
  MOD_RES (236)..(237): Selenocysteine
  MOD_RES (240)..(240): Selenocysteine
  MOD_RES (259)..(259): Selenocysteine
  MOD_RES (265)..(265): Selenocysteine
  MOD_RES (297)..(297): Selenocysteine
  MOD_RES (299)..(299): Selenocysteine
  MOD_RES (327)..(327): Selenocysteine
  MOD_RES (345)..(345): Selenocysteine
  MOD_RES (369)..(369): Selenocysteine
  MOD_RES (371)..(371): Selenocysteine
  MOD_RES (385)..(385): Selenocysteine
  MOD_RES (396)..(396): Selenocysteine
  MOD_RES (401)..(401): Selenocysteine
  MOD_RES (424)..(425): Selenocysteine
  MOD_RES (442)..(442): Selenocysteine
  MOD_RES (511)..(511): Selenocysteine
  MOD_RES (546)..(546): Selenocysteine
  MOD_RES (548)..(548): Selenocysteine
  MOD_RES (553)..(554): Selenocysteine
  MOD_RES (564)..(564): Selenocysteine
  MOD_RES (585)..(585): Selenocysteine
  MOD_RES (598)..(598): Selenocysteine
  MOD_RES (647)..(647): Selenocysteine
  MOD_RES (655)..(655): Selenocysteine
  MOD_RES (673)..(673): Selenocysteine
  MOD_RES (679)..(679): Selenocysteine
  MOD_RES (688)..(688): Selenocysteine
  MOD_RES (709)..(709): Selenocysteine
  MOD_RES (732)..(732): Selenocysteine
  MOD_RES (735)..(735): Selenocysteine
  MOD_RES (757)..(757): Selenocysteine
  MOD_RES (769)..(769): Selenocysteine
  MOD_RES (794)..(794): Selenocysteine
  MOD_RES (812)..(812): Selenocysteine
  MOD_RES (861)..(861): Selenocysteine
  MOD_RES (904)..(905): Selenocysteine
  MOD_RES (920)..(920): Selenocysteine
  MOD_RES (971)..(971): Selenocysteine
  MOD_RES (980)..(980): Selenocysteine
  MOD_RES (983)..(983): Selenocysteine
MRPVALLLLPSLLALLAHGLSLEAPXVGKGQAPGIEEXDGELXAAPXPEQPERGVHFVXXAPXLKLLNHHPLLEEFLQEGLEKGDEELRPALPFQPDPPAPFXPSPLPRLANQDSRPVFXSPXPAMAAVPXQPQSKEGPWSPESESPMLRIXAPLPPGPSMAVPXLGPGEIASXXPPSRAWXPXQEGPGDMGRPWVAEVVSQGAGIGIQGXIXSSXASGDDEEXXXXXXIIXXXIXXVQXPGPCSWNFSGPEGSLDSPXDLSSPXDVGLDCFFYISVYPGYGVEIKVQNISLREGEXVXVEGLGGPDPLPLANQSFLLRGQVIRSPXHQAALRFQSLPPPAGPGXFHFHYQAYLLSCHFPRRPAYGDVXVXSLHPGGSARFHCAXGYQLKGARHLXCLNAXQPFWDSKEPVCIGECPGVIRNAXXGRIVSPGFPGNYSNNLXCHWLLEAPEGQRLHLHFEKVSLAEDDDRLIIRNGDNVEAPPVYDSYEVEYLPIEGLLSSGKHFFVELSXDSSGAAAGMALRYEAFQQGHCYEPFVKYGNFSSSXPXYPVGXXVEFSCDPGYXLEQGSIIIECVDPHDPQWNEXEPACRAVCSGEIXDSAGVVLSPNWPEPYGRGQDCIWGVHVEEDKRIMLDIRVLRIGPGDVLXFYDGDDLXARVLGQYSGPRSHFKLFXSMADVXIQFQSDPGXSVLGYQQGFVIHFFEVPRNDXCPELPEIPNGWKSPSQPELVHGXVVXYQCYPGYQVVGSSVLMCQWDLXWSEDLPSCQRVXSCHDPGDVEHSRRLISSPKFPVGAXVQYICDQGFVLMGSSILXCHDRQAGSPKWSDRAPKCLLEQLKPCHGLSAPENGARSPEKQLHPAGAXIHFSCAPGYVLKGQASIKCVPGHPSHWSDPPPICRAASLDGSXXVAAWMVAKAPAASSXLDAAHIAAAIFLPLVAMVLLVGGVYFYFSRLQGKSSLQLPRPRPRPYNRIXIESAFDNPXYEXGSLSFAGDERI

SEQ ID NO: 25088 - protein, 131 aa, Homo sapiens
  MOD_RES (1)..(1): Any amino acid
  MOD_RES (11)..(12): Selenocysteine
  MOD_RES (29)..(29): Selenocysteine
  MOD_RES (98)..(98): Selenocysteine
XACGGVIRNAXXGRIVSPGFPGNYSNNLXCHWLLEAPEGQRLHLHFEKVSLAEDDDRLIIRNGDNVEAPPVYDSYEVEYLPIEGLLSSGKHFFVELSXDSSGAAAGMALRYEGEPAGASLGVAGPRGWARA

SEQ ID NO: 25089 - protein, 454 aa, Homo sapiens
  MOD_RES (1)..(1): Any amino acid
  MOD_RES (7)..(8): Selenocysteine
  MOD_RES (15)..(15): Selenocysteine
  MOD_RES (17)..(17): Selenocysteine
  MOD_RES (44)..(44): Selenocysteine
  MOD_RES (46)..(46): Selenocysteine
  MOD_RES (49)..(49): Selenocysteine
  MOD_RES (57)..(62): Selenocysteine
  MOD_RES (65)..(67): Selenocysteine
  MOD_RES (69)..(70): Selenocysteine
  MOD_RES (73)..(73): Selenocysteine
  MOD_RES (92)..(92): Selenocysteine
  MOD_RES (98)..(98): Selenocysteine
  MOD_RES (130)..(130): Selenocysteine
  MOD_RES (132)..(132): Selenocysteine
  MOD_RES (160)..(160): Selenocysteine
  MOD_RES (178)..(178): Selenocysteine
  MOD_RES (202)..(202): Selenocysteine
  MOD_RES (204)..(204): Selenocysteine
  MOD_RES (218)..(218): Selenocysteine
  MOD_RES (229)..(229): Selenocysteine
  MOD_RES (234)..(234): Selenocysteine
  MOD_RES (257)..(258): Selenocysteine
  MOD_RES (275)..(275): Selenocysteine
  MOD_RES (344)..(344): Selenocysteine
  MOD_RES (364)..(364): Selenocysteine
  MOD_RES (375)..(375): Selenocysteine
  MOD_RES (378)..(378): Selenocysteine
  MOD_RES (391)..(391): Selenocysteine
  MOD_RES (393)..(394): Selenocysteine
  MOD_RES (414)..(414): Selenocysteine
  MOD_RES (423)..(423): Selenocysteine
  MOD_RES (428)..(428): Selenocysteine
  MOD_RES (443)..(443): Selenocysteine
  MOD_RES (449)..(449): Selenocysteine
XGEIASXXPPSRAWXPXQEGPGDMGRPWVAEVVSQGAGIGIQGXIXSSXASGDDEEXXXXXXIIXXXIXXVQXPGPCSWNFSGPEGSLDSPXDLSSPXDVGLDCFFYISVYPGYGVEIKVQNISLREGEXVXVEGLGGPDPLPLANQSFLLRGQVIRSPXHQAALRFQSLPPPAGPGXFHFHYQAYLLSCHFPRRPAYGDVXVXSLHPGGSARFHCAXGYQLKGARHLXCLNAXQPFWDSKEPVCIAACGGVIRNAXXGRIVSPGFPGNYSNNLXCHWLLEAPEGQRLHLHFEKVSLAEDDDRLIIRNGDNVEAPPVYDSYEVEYLPIEGLLSSGKHFFVELSXDSSGAAAGMALRYEAAHPPXLWVPLWSSAAXLAXPWSRAPSSSSVLXPXXPSGMRQSQPAEPCAAGRSQXRLAWYSLPXGQSPXVVGRIVSGVCMWKRXSASCWXSECCA

SEQ ID NO: 25090 - protein, 101 aa, Homo sapiens
  MOD_RES (1)..(1): Any amino acid
  MOD_RES (50)..(50): Selenocysteine
  MOD_RES (82)..(82): Selenocysteine
  MOD_RES (100)..(100): Selenocysteine
XLDAAHIAAAIFLPLVAMVLLVGGVYFYFSRRRCHQALKKLCPSPPAMPXMAYFLGVIAHLGPFIGPMSGGIYLWEEHSWSXSINSQHPEPPHALDQPGXH

SEQ ID NO: 25091 - protein, 720 aa, Homo sapiens
  MOD_RES (10)..(10): Selenocysteine
  MOD_RES (24)..(24): Selenocysteine
  MOD_RES (34)..(36): Selenocysteine
  MOD_RES (38)..(38): Selenocysteine
  MOD_RES (41)..(43): Selenocysteine
  MOD_RES (46)..(47): Selenocysteine
  MOD_RES (82)..(82): Selenocysteine
  MOD_RES (86)..(86): Selenocysteine
  MOD_RES (89)..(89): Selenocysteine
  MOD_RES (117)..(117): Selenocysteine
  MOD_RES (119)..(119): Selenocysteine
  MOD_RES (125)..(125): Selenocysteine
  MOD_RES (137)..(137): Selenocysteine
  MOD_RES (139)..(139): Selenocysteine
  MOD_RES (146)..(146): Selenocysteine
  MOD_RES (154)..(154): Selenocysteine
  MOD_RES (178)..(178): Selenocysteine
  MOD_RES (205)..(205): Selenocysteine
  MOD_RES (233)..(233): Selenocysteine
  MOD_RES (246)..(246): Selenocysteine
  MOD_RES (255)..(255): Selenocysteine
  MOD_RES (280)..(280): Selenocysteine
  MOD_RES (286)..(286): Selenocysteine
  MOD_RES (298)..(298): Selenocysteine
  MOD_RES (312)..(312): Selenocysteine
  MOD_RES (318)..(318): Selenocysteine
  MOD_RES (327)..(327): Selenocysteine
  MOD_RES (351)..(352): Selenocysteine
  MOD_RES (356)..(356): Selenocysteine
  MOD_RES (361)..(361): Selenocysteine
  MOD_RES (366)..(366): Selenocysteine
  MOD_RES (393)..(393): Selenocysteine
  MOD_RES (455)..(455): Selenocysteine
  MOD_RES (483)..(483): Selenocysteine
  MOD_RES (487)..(487): Selenocysteine
  MOD_RES (530)..(531): Selenocysteine
  MOD_RES (534)..(534): Selenocysteine
  MOD_RES (543)..(543): Selenocysteine
  MOD_RES (557)..(557): Selenocysteine
  MOD_RES (559)..(559): Selenocysteine
  MOD_RES (580)..(580): Selenocysteine
  MOD_RES (589)..(589): Selenocysteine
  MOD_RES (601)..(602): Selenocysteine
  MOD_RES (606)..(606): Selenocysteine
  MOD_RES (620)..(620): Selenocysteine
  MOD_RES (626)..(626): Selenocysteine
  MOD_RES (628)..(628): Selenocysteine
  MOD_RES (632)..(632): Selenocysteine
  MOD_RES (646)..(646): Selenocysteine
  MOD_RES (676)..(676): Selenocysteine
  MOD_RES (698)..(698): Selenocysteine
  MOD_RES (701)..(701): Selenocysteine
  MOD_RES (710)..(710): Selenocysteine
  MOD_RES (713)..(713): Selenocysteine
MAQEAPQEDXSPMALMDKGENELXGSASEESQEXXXSXIIXXXVIXXEQAPALCSVSFSNPEGYIDSSDYPLLPLNNFLECXYNVXVYXGYGVELQVKSVNLSDGELLSIRGVDGPXLXVLANQXLLVEGQVIRSPXNXISVYFRXFQDDGLGXFQLHYQAFMLSCNFPRRPDSGDVXVMDLHSGGVAHFHCHLGYELQGAKMLXCINASKPHWSSQEPICSAPCGGAVHNAXIGRVLSPSYPENXNGSQFCIWXIEAPEGQKLHLHFERLLLHDKDRMXVHSGQXNKSALLYDSLQXESVPFEGLLSEGNXIRIEFXSDQARAASXFNIRFEAFEKGHCYEPYIQNGNFXXSDPXYNIGXIVEFXCDPGHSLEQGPAIIECINVRDPYWNDXEPLCRAMCGGELSAVAGVVLSPNWPEPYVEGEDCIWKIHVGEEKRIFLDIQFLNLSNSDILXIYDGDEVMPHILGQYLGNSGPQKLYSSXPDLXIQFHSDPAGLIFGKGQGFIMNYIEVSRNDSCSDLPEIQNGWKXXSHXELVRGARIXYQCDPGYDIVGSDXLXCQWDLSWSSDPPFCEKIMYCXDPGEVDHSXRLISDPVLLVGXXIQYXCNPGFVLEGSSLLXCYSREXGXPIWXSRLPHCVSEAAAEXSLEGGNMALAIFIPVLIISLLLGGAYIYIXRCRYYSNLRLPLMYSHPYSQIXVEXEFDNPIYEXGEXREYEVSI

SEQ ID NO: 25092 - protein, 796 aa, Homo sapiens
  MOD_RES (10)..(10): Selenocysteine
  MOD_RES (24)..(24): Selenocysteine
  MOD_RES (34)..(36): Selenocysteine
  MOD_RES (38)..(38): Selenocysteine
  MOD_RES (41)..(43): Selenocysteine
  MOD_RES (46)..(47): Selenocysteine
  MOD_RES (82)..(82): Selenocysteine
  MOD_RES (86)..(86): Selenocysteine
  MOD_RES (89)..(89): Selenocysteine
  MOD_RES (117)..(117): Selenocysteine
  MOD_RES (119)..(119): Selenocysteine
  MOD_RES (125)..(125): Selenocysteine
  MOD_RES (137)..(137): Selenocysteine
  MOD_RES (139)..(139): Selenocysteine
  MOD_RES (146)..(146): Selenocysteine
  MOD_RES (154)..(154): Selenocysteine
  MOD_RES (178)..(178): Selenocysteine
  MOD_RES (205)..(205): Selenocysteine
  MOD_RES (233)..(233): Selenocysteine
  MOD_RES (246)..(246): Selenocysteine
  MOD_RES (255)..(255): Selenocysteine
  MOD_RES (280)..(280): Selenocysteine
  MOD_RES (286)..(286): Selenocysteine
  MOD_RES (298)..(298): Selenocysteine
  MOD_RES (312)..(312): Selenocysteine
  MOD_RES (318)..(318): Selenocysteine
  MOD_RES (327)..(327): Selenocysteine
  MOD_RES (351)..(352): Selenocysteine
  MOD_RES (356)..(356): Selenocysteine
  MOD_RES (361)..(361): Selenocysteine
  MOD_RES (366)..(366): Selenocysteine
  MOD_RES (393)..(393): Selenocysteine
  MOD_RES (455)..(455): Selenocysteine
  MOD_RES (483)..(483): Selenocysteine
  MOD_RES (487)..(487): Selenocysteine
  MOD_RES (530)..(531): Selenocysteine
  MOD_RES (534)..(534): Selenocysteine
  MOD_RES (543)..(543): Selenocysteine
  MOD_RES (557)..(557): Selenocysteine
  MOD_RES (559)..(559): Selenocysteine
  MOD_RES (580)..(580): Selenocysteine
  MOD_RES (589)..(589): Selenocysteine
  MOD_RES (601)..(602): Selenocysteine
  MOD_RES (606)..(606): Selenocysteine
  MOD_RES (620)..(620): Selenocysteine
  MOD_RES (626)..(626): Selenocysteine
  MOD_RES (628)..(628): Selenocysteine
  MOD_RES (632)..(632): Selenocysteine
  MOD_RES (671)..(671): Selenocysteine
  MOD_RES (685)..(685): Selenocysteine
  MOD_RES (722)..(722): Selenocysteine
  MOD_RES (752)..(752): Selenocysteine
  MOD_RES (774)..(774): Selenocysteine
  MOD_RES (777)..(777): Selenocysteine
  MOD_RES (786)..(786): Selenocysteine
  MOD_RES (789)..(789): Selenocysteine
MAQEAPQEDXSPMALMDKGENELXGSASEESQEXXXSXIIXXXVIXXEQAPALCSVSFSNPEGYIDSSDYPLLPLNNFLECXYNVXVYXGYGVELQVKSVNLSDGELLSIRGVDGPXLXVLANQXLLVEGQVIRSPXNXISVYFRXFQDDGLGXFQLHYQAFMLSCNFPRRPDSGDVXVMDLHSGGVAHFHCHLGYELQGAKMLXCINASKPHWSSQEPICSAPCGGAVHNAXIGRVLSPSYPENXNGSQFCIWXIEAPEGQKLHLHFERLLLHDKDRMXVHSGQXNKSALLYDSLQXESVPFEGLLSEGNXIRIEFXSDQARAASXFNIRFEAFEKGHCYEPYIQNGNFXXSDPXYNIGXIVEFXCDPGHSLEQGPAIIECINVRDPYWNDXEPLCRAMCGGELSAVAGVVLSPNWPEPYVEGEDCIWKIHVGEEKRIFLDIQFLNLSNSDILXIYDGDEVMPHILGQYLGNSGPQKLYSSXPDLXIQFHSDPAGLIFGKGQGFIMNYIEVSRNDSCSDLPEIQNGWKXXSHXELVRGARIXYQCDPGYDIVGSDXLXCQWDLSWSSDPPFCEKIMYCXDPGEVDHSXRLISDPVLLVGXXIQYXCNPGFVLEGSSLLXCYSREXGXPIWXSRLPHCVSEESLACDNPGLPENGYQILYKRLYLPGESLXFMCYEGFELMGEVXIRCILGQPSHWNGPLPVCKVNQDSFEHALEAEAAAEXSLEGGNMALAIFIPVLIISLLLGGAYIYIXRCRYYSNLRLPLMYSHPYSQIXVEXEFDNPIYEXGEXREYEVSI

SEQ ID NO: 25093 - protein, 948 aa, Homo sapiens
  MOD_RES (68)..(68): Selenocysteine
  MOD_RES (88)..(88): Selenocysteine
  MOD_RES (137)..(137): Selenocysteine
  MOD_RES (141)..(141): Selenocysteine
  MOD_RES (161)..(161): Selenocysteine
  MOD_RES (195)..(196): Selenocysteine
  MOD_RES (206)..(206): Selenocysteine
  MOD_RES (214)..(214): Selenocysteine
  MOD_RES (237)..(237): Selenocysteine
  MOD_RES (251)..(251): Selenocysteine
  MOD_RES (261)..(263): Selenocysteine
  MOD_RES (265)..(265): Selenocysteine
  MOD_RES (268)..(270): Selenocysteine
  MOD_RES (273)..(274): Selenocysteine
  MOD_RES (309)..(309): Selenocysteine
  MOD_RES (313)..(313): Selenocysteine
  MOD_RES (316)..(316): Selenocysteine
  MOD_RES (344)..(344): Selenocysteine
  MOD_RES (346)..(346): Selenocysteine
  MOD_RES (352)..(352): Selenocysteine
  MOD_RES (364)..(364): Selenocysteine
  MOD_RES (366)..(366): Selenocysteine
  MOD_RES (373)..(373): Selenocysteine
  MOD_RES (381)..(381): Selenocysteine
  MOD_RES (405)..(405): Selenocysteine
  MOD_RES (432)..(432): Selenocysteine
  MOD_RES (460)..(460): Selenocysteine
  MOD_RES (473)..(473): Selenocysteine
  MOD_RES (482)..(482): Selenocysteine
  MOD_RES (507)..(507): Selenocysteine
  MOD_RES (513)..(513): Selenocysteine
  MOD_RES (525)..(525): Selenocysteine
  MOD_RES (539)..(539): Selenocysteine
  MOD_RES (545)..(545): Selenocysteine
  MOD_RES (554)..(554): Selenocysteine
  MOD_RES (578)..(579): Selenocysteine
  MOD_RES (583)..(583): Selenocysteine
  MOD_RES (588)..(588): Selenocysteine
  MOD_RES (593)..(593): Selenocysteine
  MOD_RES (620)..(620): Selenocysteine
  MOD_RES (682)..(682): Selenocysteine
  MOD_RES (710)..(710): Selenocysteine
  MOD_RES (714)..(714): Selenocysteine
  MOD_RES (757)..(758): Selenocysteine
  MOD_RES (761)..(761): Selenocysteine
  MOD_RES (770)..(770): Selenocysteine
  MOD_RES (784)..(784): Selenocysteine
  MOD_RES (786)..(786): Selenocysteine
  MOD_RES (807)..(807): Selenocysteine
  MOD_RES (816)..(816): Selenocysteine
  MOD_RES (828)..(829): Selenocysteine
  MOD_RES (833)..(833): Selenocysteine
  MOD_RES (847)..(847): Selenocysteine
  MOD_RES (853)..(853): Selenocysteine
  MOD_RES (855)..(855): Selenocysteine
  MOD_RES (859)..(859): Selenocysteine
  MOD_RES (874)..(874): Selenocysteine
  MOD_RES (904)..(904): Selenocysteine
  MOD_RES (926)..(926): Selenocysteine
  MOD_RES (929)..(929): Selenocysteine
  MOD_RES (938)..(938): Selenocysteine
  MOD_RES (941)..(941): Selenocysteine
MPAARPPAAGLRGISLFLALLLGSPAAALERDALPEGDASPLGPYLLPSGAPERGSPGKEHPEERVVXAPPSSSQSAEVLGELVLDGXAPSAHHDIPALSPLLPEEARPKHALPPKKKLPSLKQVNSARKQLRPKAXSAAXVQRAGSQPASQGLDLLSSSXEKPGPPGDPDPIVASEEASEVPLWLDRKESAVPXXPAPLQISPFXSQPYVAHXLPQRPEPGEPGPDMAQEAPQEDXSPMALMDKGENELXGSASEESQEXXXSXIIXXXVIXXEQAPALCSVSFSNPEGYIDSSDYPLLPLNNFLECXYNVXVYXGYGVELQVKSVNLSDGELLSIRGVDGPXLXVLANQXLLVEGQVIRSPXNXISVYFRXFQDDGLGXFQLHYQAFMLSCNFPRRPDSGDVXVMDLHSGGVAHFHCHLGYELQGAKMLXCINASKPHWSSQEPICSAPCGGAVHNAXIGRVLSPSYPENXNGSQFCIWXIEAPEGQKLHLHFERLLLHDKDRMXVHSGQXNKSALLYDSLQXESVPFEGLLSEGNXIRIEFXSDQARAASXFNIRFEAFEKGHCYEPYIQNGNFXXSDPXYNIGXIVEFXCDPGHSLEQGPAIIECINVRDPYWNDXEPLCRAMCGGELSAVAGVVLSPNWPEPYVEGEDCIWKIHVGEEKRIFLDIQFLNLSNSDILXIYDGDEVMPHILGQYLGNSGPQKLYSSXPDLXIQFHSDPAGLIFGKGQGFIMNYIEVSRNDSCSDLPEIQNGWKXXSHXELVRGARIXYQCDPGYDIVGSDXLXCQWDLSWSSDPPFCEKIMYCXDPGEVDHSXRLISDPVLLVGXXIQYXCNPGFVLEGSSLLXCYSREXGXPIWXSRLPHCVLAEAAAEXSLEGGNMALAIFIPVLIISLLLGGAYIYIXRCRYYSNLRLPLMYSHPYSQIXVEXEFDNPIYEXGEXREYEVSI

SEQ ID NO: 25094 - protein, 949 aa, Homo sapiens
  MOD_RES (68)..(68): Selenocysteine
  MOD_RES (88)..(88): Selenocysteine
  MOD_RES (137)..(137): Selenocysteine
  MOD_RES (141)..(141): Selenocysteine
  MOD_RES (161)..(161): Selenocysteine
  MOD_RES (195)..(196): Selenocysteine
  MOD_RES (206)..(206): Selenocysteine
  MOD_RES (214)..(214): Selenocysteine
  MOD_RES (237)..(237): Selenocysteine
  MOD_RES (251)..(251): Selenocysteine
  MOD_RES (261)..(263): Selenocysteine
  MOD_RES (265)..(265): Selenocysteine
  MOD_RES (268)..(270): Selenocysteine
  MOD_RES (273)..(274): Selenocysteine
  MOD_RES (309)..(309): Selenocysteine
  MOD_RES (313)..(313): Selenocysteine
  MOD_RES (316)..(316): Selenocysteine
  MOD_RES (344)..(344): Selenocysteine
  MOD_RES (346)..(346): Selenocysteine
  MOD_RES (352)..(352): Selenocysteine
  MOD_RES (364)..(364): Selenocysteine
  MOD_RES (366)..(366): Selenocysteine
  MOD_RES (373)..(373): Selenocysteine
  MOD_RES (381)..(381): Selenocysteine
  MOD_RES (405)..(405): Selenocysteine
  MOD_RES (432)..(432): Selenocysteine
  MOD_RES (460)..(460): Selenocysteine
  MOD_RES (473)..(473): Selenocysteine
  MOD_RES (482)..(482): Selenocysteine
  MOD_RES (507)..(507): Selenocysteine
  MOD_RES (513)..(513): Selenocysteine
  MOD_RES (525)..(525): Selenocysteine
  MOD_RES (539)..(539): Selenocysteine
  MOD_RES (545)..(545): Selenocysteine
  MOD_RES (554)..(554): Selenocysteine
  MOD_RES (578)..(579): Selenocysteine
  MOD_RES (583)..(583): Selenocysteine
  MOD_RES (588)..(588): Selenocysteine
  MOD_RES (593)..(593): Selenocysteine
  MOD_RES (620)..(620): Selenocysteine
  MOD_RES (682)..(682): Selenocysteine
  MOD_RES (710)..(710): Selenocysteine
  MOD_RES (714)..(714): Selenocysteine
  MOD_RES (757)..(758): Selenocysteine
  MOD_RES (761)..(761): Selenocysteine
  MOD_RES (770)..(770): Selenocysteine
  MOD_RES (784)..(784): Selenocysteine
  MOD_RES (786)..(786): Selenocysteine
  MOD_RES (803)..(803): Selenocysteine
  MOD_RES (834)..(834): Selenocysteine
  MOD_RES (848)..(848): Selenocysteine
  MOD_RES (875)..(875): Selenocysteine
  MOD_RES (905)..(905): Selenocysteine
  MOD_RES (927)..(927): Selenocysteine
  MOD_RES (930)..(930): Selenocysteine
  MOD_RES (939)..(939): Selenocysteine
  MOD_RES (942)..(942): Selenocysteine
MPAARPPAAGLRGISLFLALLLGSPAAALERDALPEGDASPLGPYLLPSGAPERGSPGKEHPEERVVXAPPSSSQSAEVLGELVLDGXAPSAHHDIPALSPLLPEEARPKHALPPKKKLPSLKQVNSARKQLRPKAXSAAXVQRAGSQPASQGLDLLSSSXEKPGPPGDPDPIVASEEASEVPLWLDRKESAVPXXPAPLQISPFXSQPYVAHXLPQRPEPGEPGPDMAQEAPQEDXSPMALMDKGENELXGSASEESQEXXXSXIIXXXVIXXEQAPALCSVSFSNPEGYIDSSDYPLLPLNNFLECXYNVXVYXGYGVELQVKSVNLSDGELLSIRGVDGPXLXVLANQXLLVEGQVIRSPXNXISVYFRXFQDDGLGXFQLHYQAFMLSCNFPRRPDSGDVXVMDLHSGGVAHFHCHLGYELQGAKMLXCINASKPHWSSQEPICSAPCGGAVHNAXIGRVLSPSYPENXNGSQFCIWXIEAPEGQKLHLHFERLLLHDKDRMXVHSGQXNKSALLYDSLQXESVPFEGLLSEGNXIRIEFXSDQARAASXFNIRFEAFEKGHCYEPYIQNGNFXXSDPXYNIGXIVEFXCDPGHSLEQGPAIIECINVRDPYWNDXEPLCRAMCGGELSAVAGVVLSPNWPEPYVEGEDCIWKIHVGEEKRIFLDIQFLNLSNSDILXIYDGDEVMPHILGQYLGNSGPQKLYSSXPDLXIQFHSDPAGLIFGKGQGFIMNYIEVSRNDSCSDLPEIQNGWKXXSHXELVRGARIXYQCDPGYDIVGSDXLXCQWDLSWSSDPPFCEKXEESLACDNPGLPENGYQILYKRLYLPGESLXFMCYEGFELMGEVXIRCILGQPSHWNGPLPVCKVAEAAAEXSLEGGNMALAIFIPVLIISLLLGGAYIYIXRCRYYSNLRLPLMYSHPYSQIXVEXEFDNPIYEXGEXREYEVSI

SEQ ID NO: 25095 - protein, 1011 aa, Homo sapiens
  MOD_RES (68)..(68): Selenocysteine
  MOD_RES (88)..(88): Selenocysteine
  MOD_RES (137)..(137): Selenocysteine
  MOD_RES (141)..(141): Selenocysteine
  MOD_RES (161)..(161): Selenocysteine
  MOD_RES (195)..(196): Selenocysteine
  MOD_RES (206)..(206): Selenocysteine
  MOD_RES (214)..(214): Selenocysteine
  MOD_RES (237)..(237): Selenocysteine
  MOD_RES (251)..(251): Selenocysteine
  MOD_RES (261)..(263): Selenocysteine
  MOD_RES (265)..(265): Selenocysteine
  MOD_RES (268)..(270): Selenocysteine
  MOD_RES (273)..(274): Selenocysteine
  MOD_RES (309)..(309): Selenocysteine
  MOD_RES (313)..(313): Selenocysteine
  MOD_RES (316)..(316): Selenocysteine
  MOD_RES (344)..(344): Selenocysteine
  MOD_RES (346)..(346): Selenocysteine
  MOD_RES (352)..(352): Selenocysteine
  MOD_RES (364)..(364): Selenocysteine
  MOD_RES (366)..(366): Selenocysteine
  MOD_RES (373)..(373): Selenocysteine
  MOD_RES (381)..(381): Selenocysteine
  MOD_RES (405)..(405): Selenocysteine
  MOD_RES (432)..(432): Selenocysteine
  MOD_RES (460)..(460): Selenocysteine
  MOD_RES (473)..(473): Selenocysteine
  MOD_RES (482)..(482): Selenocysteine
  MOD_RES (507)..(507): Selenocysteine
  MOD_RES (513)..(513): Selenocysteine
  MOD_RES (525)..(525): Selenocysteine
  MOD_RES (539)..(539): Selenocysteine
  MOD_RES (545)..(545): Selenocysteine
  MOD_RES (554)..(554): Selenocysteine
  MOD_RES (578)..(579): Selenocysteine
  MOD_RES (583)..(583): Selenocysteine
  MOD_RES (588)..(588): Selenocysteine
  MOD_RES (593)..(593): Selenocysteine
  MOD_RES (620)..(620): Selenocysteine
  MOD_RES (682)..(682): Selenocysteine
  MOD_RES (710)..(710): Selenocysteine
  MOD_RES (714)..(714): Selenocysteine
  MOD_RES (757)..(758): Selenocysteine
  MOD_RES (761)..(761): Selenocysteine
  MOD_RES (770)..(770): Selenocysteine
  MOD_RES (784)..(784): Selenocysteine
  MOD_RES (786)..(786): Selenocysteine
  MOD_RES (807)..(807): Selenocysteine
  MOD_RES (816)..(816): Selenocysteine
  MOD_RES (828)..(829): Selenocysteine
  MOD_RES (833)..(833): Selenocysteine
  MOD_RES (847)..(847): Selenocysteine
  MOD_RES (853)..(853): Selenocysteine
  MOD_RES (855)..(855): Selenocysteine
  MOD_RES (859)..(859): Selenocysteine
  MOD_RES (898)..(898): Selenocysteine
  MOD_RES (912)..(912): Selenocysteine
  MOD_RES (937)..(937): Selenocysteine
  MOD_RES (967)..(967): Selenocysteine
  MOD_RES (989)..(989): Selenocysteine
  MOD_RES (992)..(992): Selenocysteine
  MOD_RES (1001)..(1001): Selenocysteine
  MOD_RES (1004)..(1004): Selenocysteine
MPAARPPAAGLRGISLFLALLLGSPAAALERDALPEGDASPLGPYLLPSGAPERGSPGKEHPEERVVXAPPSSSQSAEVLGELVLDGXAPSAHHDIPALSPLLPEEARPKHALPPKKKLPSLKQVNSARKQLRPKAXSAAXVQRAGSQPASQGLDLLSSSXEKPGPPGDPDPIVASEEASEVPLWLDRKESAVPXXPAPLQISPFXSQPYVAHXLPQRPEPGEPGPDMAQEAPQEDXSPMALMDKGENELXGSASEESQEXXXSXIIXXXVIXXEQAPALCSVSFSNPEGYIDSSDYPLLPLNNFLECXYNVXVYXGYGVELQVKSVNLSDGELLSIRGVDGPXLXVLANQXLLVEGQVIRSPXNXISVYFRXFQDDGLGXFQLHYQAFMLSCNFPRRPDSGDVXVMDLHSGGVAHFHCHLGYELQGAKMLXCINASKPHWSSQEPICSAPCGGAVHNAXIGRVLSPSYPENXNGSQFCIWXIEAPEGQKLHLHFERLLLHDKDRMXVHSGQXNKSALLYDSLQXESVPFEGLLSEGNXIRIEFXSDQARAASXFNIRFEAFEKGHCYEPYIQNGNFXXSDPXYNIGXIVEFXCDPGHSLEQGPAIIECINVRDPYWNDXEPLCRAMCGGELSAVAGVVLSPNWPEPYVEGEDCIWKIHVGEEKRIFLDIQFLNLSNSDILXIYDGDEVMPHILGQYLGNSGPQKLYSSXPDLXIQFHSDPAGLIFGKGQGFIMNYIEVSRNDSCSDLPEIQNGWKXXSHXELVRGARIXYQCDPGYDIVGSDXLXCQWDLSWSSDPPFCEKIMYCXDPGEVDHSXRLISDPVLLVGXXIQYXCNPGFVLEGSSLLXCYSREXGXPIWXSRLPHCVSEESLACDNPGLPENGYQILYKRLYLPGESLXFMCYEGFELMGEVXIRCILGQPSHWNGPLPVCKEAAAEXSLEGGNMALAIFIPVLIISLLLGGAYIYIXRCRYYSNLRLPLMYSHPYSQIXVEXEFDNPIYEXGEXREYEVSI

SEQ ID NO: 25096 - protein, 1013 aa, Homo sapiens
  MOD_RES (68)..(68): Selenocysteine
  MOD_RES (88)..(88): Selenocysteine
  MOD_RES (137)..(137): Selenocysteine
  MOD_RES (141)..(141): Selenocysteine
  MOD_RES (161)..(161): Selenocysteine
  MOD_RES (195)..(196): Selenocysteine
  MOD_RES (206)..(206): Selenocysteine
  MOD_RES (214)..(214): Selenocysteine
  MOD_RES (237)..(237): Selenocysteine
  MOD_RES (251)..(251): Selenocysteine
  MOD_RES (261)..(263): Selenocysteine
  MOD_RES (265)..(265): Selenocysteine
  MOD_RES (268)..(270): Selenocysteine
  MOD_RES (273)..(274): Selenocysteine
  MOD_RES (309)..(309): Selenocysteine
  MOD_RES (313)..(313): Selenocysteine
  MOD_RES (316)..(316): Selenocysteine
  MOD_RES (344)..(344): Selenocysteine
  MOD_RES (346)..(346): Selenocysteine
  MOD_RES (352)..(352): Selenocysteine
  MOD_RES (364)..(364): Selenocysteine
  MOD_RES (366)..(366): Selenocysteine
  MOD_RES (373)..(373): Selenocysteine
  MOD_RES (381)..(381): Selenocysteine
  MOD_RES (405)..(405): Selenocysteine
  MOD_RES (432)..(432): Selenocysteine
  MOD_RES (460)..(460): Selenocysteine
  MOD_RES (473)..(473): Selenocysteine
  MOD_RES (482)..(482): Selenocysteine
  MOD_RES (507)..(507): Selenocysteine
  MOD_RES (513)..(513): Selenocysteine
  MOD_RES (525)..(525): Selenocysteine
  MOD_RES (539)..(539): Selenocysteine
  MOD_RES (545)..(545): Selenocysteine
  MOD_RES (554)..(554): Selenocysteine
  MOD_RES (578)..(579): Selenocysteine
  MOD_RES (583)..(583): Selenocysteine
  MOD_RES (588)..(588): Selenocysteine
  MOD_RES (593)..(593): Selenocysteine
  MOD_RES (620)..(620): Selenocysteine
  MOD_RES (682)..(682): Selenocysteine
  MOD_RES (710)..(710): Selenocysteine
  MOD_RES (714)..(714): Selenocysteine
  MOD_RES (757)..(758): Selenocysteine
  MOD_RES (761)..(761): Selenocysteine
  MOD_RES (770)..(770): Selenocysteine
  MOD_RES (784)..(784): Selenocysteine
  MOD_RES (786)..(786): Selenocysteine
  MOD_RES (807)..(807): Selenocysteine
  MOD_RES (816)..(816): Selenocysteine
  MOD_RES (828)..(829): Selenocysteine
  MOD_RES (833)..(833): Selenocysteine
  MOD_RES (847)..(847): Selenocysteine
  MOD_RES (853)..(853): Selenocysteine
  MOD_RES (855)..(855): Selenocysteine
  MOD_RES (859)..(859): Selenocysteine
  MOD_RES (898)..(898): Selenocysteine
  MOD_RES (912)..(912): Selenocysteine
  MOD_RES (939)..(939): Selenocysteine
  MOD_RES (969)..(969): Selenocysteine
  MOD_RES (991)..(991): Selenocysteine
  MOD_RES (994)..(994): Selenocysteine
  MOD_RES (1003)..(1003): Selenocysteine
  MOD_RES (1006)..(1006): Selenocysteine
MPAARPPAAGLRGISLFLALLLGSPAAALERDALPEGDASPLGPYLLPSGAPERGSPGKEHPEERVVXAPPSSSQSAEVLGELVLDGXAPSAHHDIPALSPLLPEEARPKHALPPKKKLPSLKQVNSARKQLRPKAXSAAXVQRAGSQPASQGLDLLSSSXEKPGPPGDPDPIVASEEASEVPLWLDRKESAVPXXPAPLQISPFXSQPYVAHXLPQRPEPGEPGPDMAQEAPQEDXSPMALMDKGENELXGSASEESQEXXXSXIIXXXVIXXEQAPALCSVSFSNPEGYIDSSDYPLLPLNNFLECXYNVXVYXGYGVELQVKSVNLSDGELLSIRGVDGPXLXVLANQXLLVEGQVIRSPXNXISVYFRXFQDDGLGXFQLHYQAFMLSCNFPRRPDSGDVXVMDLHSGGVAHFHCHLGYELQGAKMLXCINASKPHWSSQEPICSAPCGGAVHNAXIGRVLSPSYPENXNGSQFCIWXIEAPEGQKLHLHFERLLLHDKDRMXVHSGQXNKSALLYDSLQXESVPFEGLLSEGNXIRIEFXSDQARAASXFNIRFEAFEKGHCYEPYIQNGNFXXSDPXYNIGXIVEFXCDPGHSLEQGPAIIECINVRDPYWNDXEPLCRAMCGGELSAVAGVVLSPNWPEPYVEGEDCIWKIHVGEEKRIFLDIQFLNLSNSDILXIYDGDEVMPHILGQYLGNSGPQKLYSSXPDLXIQFHSDPAGLIFGKGQGFIMNYIEVSRNDSCSDLPEIQNGWKXXSHXELVRGARIXYQCDPGYDIVGSDXLXCQWDLSWSSDPPFCEKIMYCXDPGEVDHSXRLISDPVLLVGXXIQYXCNPGFVLEGSSLLXCYSREXGXPIWXSRLPHCVSEESLACDNPGLPENGYQILYKRLYLPGESLXFMCYEGFELMGEVXIRCILGQPSHWNGPLPVCKVAEAAAEXSLEGGNMALAIFIPVLIISLLLGGAYIYIXRCRYYSNLRLPLMYSHPYSQIXVEXEFDNPIYEXGEXREYEVSI

SEQ ID NO: 25097 - protein, 1023 aa, Homo sapiens
  MOD_RES (68)..(68): Selenocysteine
  MOD_RES (88)..(88): Selenocysteine
  MOD_RES (137)..(137): Selenocysteine
  MOD_RES (141)..(141): Selenocysteine
  MOD_RES (161)..(161): Selenocysteine
  MOD_RES (195)..(196): Selenocysteine
  MOD_RES (206)..(206): Selenocysteine
  MOD_RES (214)..(214): Selenocysteine
  MOD_RES (237)..(237): Selenocysteine
  MOD_RES (251)..(251): Selenocysteine
  MOD_RES (261)..(263): Selenocysteine
  MOD_RES (265)..(265): Selenocysteine
  MOD_RES (268)..(270): Selenocysteine
  MOD_RES (273)..(274): Selenocysteine
  MOD_RES (309)..(309): Selenocysteine
  MOD_RES (313)..(313): Selenocysteine
  MOD_RES (316)..(316): Selenocysteine
  MOD_RES (344)..(344): Selenocysteine
  MOD_RES (346)..(346): Selenocysteine
  MOD_RES (352)..(352): Selenocysteine
  MOD_RES (364)..(364): Selenocysteine
  MOD_RES (366)..(366): Selenocysteine
  MOD_RES (373)..(373): Selenocysteine
  MOD_RES (381)..(381): Selenocysteine
  MOD_RES (405)..(405): Selenocysteine
  MOD_RES (432)..(432): Selenocysteine
  MOD_RES (460)..(460): Selenocysteine
  MOD_RES (473)..(473): Selenocysteine
  MOD_RES (482)..(482): Selenocysteine
  MOD_RES (507)..(507): Selenocysteine
  MOD_RES (513)..(513): Selenocysteine
  MOD_RES (525)..(525): Selenocysteine
  MOD_RES (539)..(539): Selenocysteine
  MOD_RES (545)..(545): Selenocysteine
  MOD_RES (554)..(554): Selenocysteine
  MOD_RES (578)..(579): Selenocysteine
  MOD_RES (583)..(583): Selenocysteine
  MOD_RES (588)..(588): Selenocysteine
  MOD_RES (593)..(593): Selenocysteine
  MOD_RES (620)..(620): Selenocysteine
  MOD_RES (682)..(682): Selenocysteine
  MOD_RES (710)..(710): Selenocysteine
  MOD_RES (714)..(714): Selenocysteine
  MOD_RES (757)..(758): Selenocysteine
  MOD_RES (761)..(761): Selenocysteine
  MOD_RES (770)..(770): Selenocysteine
  MOD_RES (784)..(784): Selenocysteine
  MOD_RES (786)..(786): Selenocysteine
  MOD_RES (807)..(807): Selenocysteine
  MOD_RES (816)..(816): Selenocysteine
  MOD_RES (828)..(829): Selenocysteine
  MOD_RES (833)..(833): Selenocysteine
  MOD_RES (847)..(847): Selenocysteine
  MOD_RES (853)..(853): Selenocysteine
  MOD_RES (855)..(855): Selenocysteine
  MOD_RES (859)..(859): Selenocysteine
  MOD_RES (898)..(898): Selenocysteine
  MOD_RES (912)..(912): Selenocysteine
  MOD_RES (949)..(949): Selenocysteine
  MOD_RES (979)..(979): Selenocysteine
  MOD_RES (1001)..(1001): Selenocysteine
  MOD_RES (1004)..(1004): Selenocysteine
  MOD_RES (1013)..(1013): Selenocysteine
  MOD_RES (1016)..(1016): Selenocysteine
MPAARPPAAGLRGISLFLALLLGSPAAALERDALPEGDASPLGPYLLPSGAPERGSPGKEHPEERVVXAPPSSSQSAEVLGELVLDGXAPSAHHDIPALSPLLPEEARPKHALPPKKKLPSLKQVNSARKQLRPKAXSAAXVQRAGSQPASQGLDLLSSSXEKPGPPGDPDPIVASEEASEVPLWLDRKESAVPXXPAPLQISPFXSQPYVAHXLPQRPEPGEPGPDMAQEAPQEDXSPMALMDKGENELXGSASEESQEXXXSXIIXXXVIXXEQAPALCSVSFSNPEGYIDSSDYPLLPLNNFLECXYNVXVYXGYGVELQVKSVNLSDGELLSIRGVDGPXLXVLANQXLLVEGQVIRSPXNXISVYFRXFQDDGLGXFQLHYQAFMLSCNFPRRPDSGDVXVMDLHSGGVAHFHCHLGYELQGAKMLXCINASKPHWSSQEPICSAPCGGAVHNAXIGRVLSPSYPENXNGSQFCIWXIEAPEGQKLHLHFERLLLHDKDRMXVHSGQXNKSALLYDSLQXESVPFEGLLSEGNXIRIEFXSDQARAASXFNIRFEAFEKGHCYEPYIQNGNFXXSDPXYNIGXIVEFXCDPGHSLEQGPAIIECINVRDPYWNDXEPLCRAMCGGELSAVAGVVLSPNWPEPYVEGEDCIWKIHVGEEKRIFLDIQFLNLSNSDILXIYDGDEVMPHILGQYLGNSGPQKLYSSXPDLXIQFHSDPAGLIFGKGQGFIMNYIEVSRNDSCSDLPEIQNGWKXXSHXELVRGARIXYQCDPGYDIVGSDXLXCQWDLSWSSDPPFCEKIMYCXDPGEVDHSXRLISDPVLLVGXXIQYXCNPGFVLEGSSLLXCYSREXGXPIWXSRLPHCVSEESLACDNPGLPENGYQILYKRLYLPGESLXFMCYEGFELMGEVXIRCILGQPSHWNGPLPVCKVNQDSFEHALEAEAAAEXSLEGGNMALAIFIPVLIISLLLGGAYIYIXRCRYYSNLRLPLMYSHPYSQIXVEXEFDNPIYEXGEXREYEVSI

SEQ ID NO: 25098 - protein, 1024 aa, Homo sapiens
  MOD_RES (68)..(68): Selenocysteine
  MOD_RES (88)..(88): Selenocysteine
  MOD_RES (137)..(137): Selenocysteine
  MOD_RES (141)..(141): Selenocysteine
  MOD_RES (161)..(161): Selenocysteine
  MOD_RES (195)..(196): Selenocysteine
  MOD_RES (206)..(206): Selenocysteine
  MOD_RES (214)..(214): Selenocysteine
  MOD_RES (237)..(237): Selenocysteine
  MOD_RES (251)..(251): Selenocysteine
  MOD_RES (261)..(263): Selenocysteine
  MOD_RES (265)..(265): Selenocysteine
  MOD_RES (268)..(270): Selenocysteine
  MOD_RES (273)..(274): Selenocysteine
  MOD_RES (309)..(309): Selenocysteine
  MOD_RES (313)..(313): Selenocysteine
  MOD_RES (316)..(316): Selenocysteine
  MOD_RES (344)..(344): Selenocysteine
  MOD_RES (346)..(346): Selenocysteine
  MOD_RES (352)..(352): Selenocysteine
  MOD_RES (364)..(364): Selenocysteine
  MOD_RES (366)..(366): Selenocysteine
  MOD_RES (373)..(373): Selenocysteine
  MOD_RES (381)..(381): Selenocysteine
  MOD_RES (405)..(405): Selenocysteine
  MOD_RES (432)..(432): Selenocysteine
  MOD_RES (460)..(460): Selenocysteine
  MOD_RES (473)..(473): Selenocysteine
  MOD_RES (482)..(482): Selenocysteine
  MOD_RES (507)..(507): Selenocysteine
  MOD_RES (513)..(513): Selenocysteine
  MOD_RES (525)..(525): Selenocysteine
  MOD_RES (539)..(539): Selenocysteine
  MOD_RES (545)..(545): Selenocysteine
  MOD_RES (554)..(554): Selenocysteine
  MOD_RES (578)..(579): Selenocysteine
  MOD_RES (583)..(583): Selenocysteine
  MOD_RES (588)..(588): Selenocysteine
  MOD_RES (593)..(593): Selenocysteine
  MOD_RES (620)..(620): Selenocysteine
  MOD_RES (682)..(682): Selenocysteine
  MOD_RES (710)..(710): Selenocysteine
  MOD_RES (714)..(714): Selenocysteine
  MOD_RES (757)..(758): Selenocysteine
  MOD_RES (761)..(761): Selenocysteine
  MOD_RES (770)..(770): Selenocysteine
  MOD_RES (784)..(784): Selenocysteine
  MOD_RES (786)..(786): Selenocysteine
  MOD_RES (807)..(807): Selenocysteine
  MOD_RES (816)..(816): Selenocysteine
  MOD_RES (828)..(829): Selenocysteine
  MOD_RES (833)..(833): Selenocysteine
  MOD_RES (847)..(847): Selenocysteine
  MOD_RES (853)..(853): Selenocysteine
  MOD_RES (855)..(855): Selenocysteine
  MOD_RES (859)..(859): Selenocysteine
  MOD_RES (898)..(898): Selenocysteine
  MOD_RES (912)..(912): Selenocysteine
  MOD_RES (950)..(950): Selenocysteine
  MOD_RES (980)..(980): Selenocysteine
  MOD_RES (1002)..(1002): Selenocysteine
  MOD_RES (1005)..(1005): Selenocysteine
  MOD_RES (1014)..(1014): Selenocysteine
  MOD_RES (1017)..(1017): Selenocysteine
MPAARPPAAGLRGISLFLALLLGSPAAALERDALPEGDASPLGPYLLPSGAPERGSPGKEHPEERVVXAPPSSSQSAEVLGELVLDGXAPSAHHDIPALSPLLPEEARPKHALPPKKKLPSLKQVNSARKQLRPKAXSAAXVQRAGSQPASQGLDLLSSSXEKPGPPGDPDPIVASEEASEVPLWLDRKESAVPXXPAPLQISPFXSQPYVAHXLPQRPEPGEPGPDMAQEAPQEDXSPMALMDKGENELXGSASEESQEXXXSXIIXXXVIXXEQAPALCSVSFSNPEGYIDSSDYPLLPLNNFLECXYNVXVYXGYGVELQVKSVNLSDGELLSIRGVDGPXLXVLANQXLLVEGQVIRSPXNXISVYFRXFQDDGLGXFQLHYQAFMLSCNFPRRPDSGDVXVMDLHSGGVAHFHCHLGYELQGAKMLXCINASKPHWSSQEPICSAPCGGAVHNAXIGRVLSPSYPENXNGSQFCIWXIEAPEGQKLHLHFERLLLHDKDRMXVHSGQXNKSALLYDSLQXESVPFEGLLSEGNXIRIEFXSDQARAASXFNIRFEAFEKGHCYEPYIQNGNFXXSDPXYNIGXIVEFXCDPGHSLEQGPAIIECINVRDPYWNDXEPLCRAMCGGELSAVAGVVLSPNWPEPYVEGEDCIWKIHVGEEKRIFLDIQFLNLSNSDILXIYDGDEVMPHILGQYLGNSGPQKLYSSXPDLXIQFHSDPAGLIFGKGQGFIMNYIEVSRNDSCSDLPEIQNGWKXXSHXELVRGARIXYQCDPGYDIVGSDXLXCQWDLSWSSDPPFCEKIMYCXDPGEVDHSXRLISDPVLLVGXXIQYXCNPGFVLEGSSLLXCYSREXGXPIWXSRLPHCVSEESLACDNPGLPENGYQILYKRLYLPGESLXFMCYEGFELMGEVXIRCILGQPSHWNGPLPVCKVNQDSFEHALEVAEAAAEXSLEGGNMALAIFIPVLIISLLLGGAYIYIXRCRYYSNLRLPLMYSHPYSQIXVEXEFDNPIYEXGEXREYEVSI

SEQ ID NO: 25099 - protein, 853 aa, Homo sapiens
  MOD_RES (3)..(3): Selenocysteine
  MOD_RES (43)..(43): Selenocysteine
  MOD_RES (45)..(45): Selenocysteine
  MOD_RES (83)..(86): Selenocysteine
  MOD_RES (89)..(92): Selenocysteine
  MOD_RES (94)..(96): Selenocysteine
  MOD_RES (98)..(98): Selenocysteine
  MOD_RES (126)..(126): Selenocysteine
  MOD_RES (133)..(133): Selenocysteine
  MOD_RES (150)..(150): Selenocysteine
  MOD_RES (191)..(191): Selenocysteine
  MOD_RES (234)..(234): Selenocysteine
  MOD_RES (241)..(241): Selenocysteine
  MOD_RES (243)..(243): Selenocysteine
  MOD_RES (257)..(257): Selenocysteine
  MOD_RES (264)..(264): Selenocysteine
  MOD_RES (272)..(272): Selenocysteine
  MOD_RES (282)..(282): Selenocysteine
  MOD_RES (287)..(287): Selenocysteine
  MOD_RES (305)..(305): Selenocysteine
  MOD_RES (375)..(375): Selenocysteine
  MOD_RES (405)..(407): Selenocysteine
  MOD_RES (418)..(418): Selenocysteine
  MOD_RES (442)..(442): Selenocysteine
  MOD_RES (449)..(449): Selenocysteine
  MOD_RES (511)..(511): Selenocysteine
  MOD_RES (543)..(543): Selenocysteine
  MOD_RES (573)..(573): Selenocysteine
  MOD_RES (586)..(586): Selenocysteine
  MOD_RES (596)..(596): Selenocysteine
  MOD_RES (599)..(599): Selenocysteine
  MOD_RES (615)..(615): Selenocysteine
  MOD_RES (634)..(634): Selenocysteine
  MOD_RES (647)..(647): Selenocysteine
  MOD_RES (676)..(676): Selenocysteine
  MOD_RES (682)..(682): Selenocysteine
  MOD_RES (684)..(684): Selenocysteine
  MOD_RES (713)..(713): Selenocysteine
  MOD_RES (740)..(740): Selenocysteine
  MOD_RES (742)..(742): Selenocysteine
  MOD_RES (752)..(752): Selenocysteine
  MOD_RES (774)..(774): Selenocysteine
  MOD_RES (776)..(777): Selenocysteine
  MOD_RES (811)..(811): Selenocysteine
  MOD_RES (831)..(831): Selenocysteine
  MOD_RES (846)..(846): Selenocysteine
MGXPRAQHPPPPQLLFLILLSCPWIQGLPLKEEEILPEPGSEXPXVASEALAELLHGALLRRGPEMGYLPGPPLGPEGGEEEXXXXIIXXXXVXXXVXSPVLCNNNISEGEGYVESPDLGSPVSRXLGLLDCXYSIHVYPGYGIEIQVQXLNLSQEEELLVLAGGGSPGLAPRLLANSSMLGEGQVLRSPXNRLLLHFQSPRVPRGGGFRIHYQAYLLSCGFPPRPAHGDVSVXDLHPGGXAXFHCDSGYQLQGEEXLICLNGXRPSWNGEXPSCMASCGGXIHNAXLGRIVSPEPGGAVGPNLXCRWVIEAAEGRRLHLHFERVSLDEDNDRLMVRSGGSPLSPVIYDSDMDDVPERGLISDAQSLYVELLSEXPANPLLLSLRFEAFEEDRCFAPFLAHGNVXXXDPEYRPGALAXFSCLPGYALEPPGPPNAIECVDPXEPHWNDXEPACKAMCGGELSEPAGVVLSPDWPQSYSPGQDCVWGVHVQEEKRILLQVEILNVREGDMLXLFDGDGPSARVLAQLRGPQPRRRLLSSGPDLXLQFQAPPGPPNPGLGQGFVLHFKEVPRNDXCPELPPPEWGWRXASHGDLIRGXVLXYQCEPGYELLGSDILXCQWDLSWSAAPPACQKIMXCADPGEIANGHRXASDAGFPVGSHVQYRCLPGYSLEGAAMLXCYSRDXGXPKWSDRVPKCALKYEPCLNPGVPENGYQXLYKHHYQAGESLRFFCYEGFELIGEVXIXCVPGHPSQWXSQPPLCKVAYEELLDNRKLEVXQXXDPSRQLEGGNLALAILLPLGLVIVLGSGVYIYYXKLQGKSLFGFSGSHSYSPIXVESDFSNPLYEAGDXREYEVSI

SEQ ID NO: 25100 - protein, 809 aa, Homo sapiens
  MOD_RES (3)..(3): Selenocysteine
  MOD_RES (43)..(43): Selenocysteine
  MOD_RES (45)..(45): Selenocysteine
  MOD_RES (77)..(77): Selenocysteine
  MOD_RES (80)..(80): Selenocysteine
  MOD_RES (86)..(86): Selenocysteine
  MOD_RES (96)..(96): Selenocysteine
  MOD_RES (100)..(100): Selenocysteine
  MOD_RES (104)..(105): Selenocysteine
  MOD_RES (108)..(108): Selenocysteine
  MOD_RES (118)..(118): Selenocysteine
  MOD_RES (124)..(124): Selenocysteine
  MOD_RES (129)..(130): Selenocysteine
  MOD_RES (153)..(156): Selenocysteine
  MOD_RES (159)..(162): Selenocysteine
  MOD_RES (164)..(166): Selenocysteine
  MOD_RES (168)..(168): Selenocysteine
  MOD_RES (190)..(190): Selenocysteine
  MOD_RES (197)..(197): Selenocysteine
  MOD_RES (199)..(199): Selenocysteine
  MOD_RES (213)..(213): Selenocysteine
  MOD_RES (220)..(220): Selenocysteine
  MOD_RES (228)..(228): Selenocysteine
  MOD_RES (238)..(238): Selenocysteine
  MOD_RES (243)..(243): Selenocysteine
  MOD_RES (261)..(261): Selenocysteine
  MOD_RES (331)..(331): Selenocysteine
  MOD_RES (361)..(363): Selenocysteine
  MOD_RES (374)..(374): Selenocysteine
  MOD_RES (398)..(398): Selenocysteine
  MOD_RES (405)..(405): Selenocysteine
  MOD_RES (467)..(467): Selenocysteine
  MOD_RES (499)..(499): Selenocysteine
  MOD_RES (529)..(529): Selenocysteine
  MOD_RES (542)..(542): Selenocysteine
  MOD_RES (552)..(552): Selenocysteine
  MOD_RES (555)..(555): Selenocysteine
  MOD_RES (571)..(571): Selenocysteine
  MOD_RES (590)..(590): Selenocysteine
  MOD_RES (603)..(603): Selenocysteine
  MOD_RES (632)..(632): Selenocysteine
  MOD_RES (638)..(638): Selenocysteine
  MOD_RES (640)..(640): Selenocysteine
  MOD_RES (669)..(669): Selenocysteine
  MOD_RES (696)..(696): Selenocysteine
  MOD_RES (698)..(698): Selenocysteine
  MOD_RES (708)..(708): Selenocysteine
  MOD_RES (730)..(730): Selenocysteine
  MOD_RES (732)..(733): Selenocysteine
  MOD_RES (767)..(767): Selenocysteine
  MOD_RES (787)..(787): Selenocysteine
  MOD_RES (802)..(802): Selenocysteine
MGXPRAQHPPPPQLLFLILLSCPWIQGLPLKEEEILPEPGSEXPXVASEALAELLHGALLRRGPEMGYLPGSDRDPXLAXPPAGQXLAVPSLPRAXEPGXGPLXXAVXPNGVRGAGPXAPELLXPPPGXXAPPPPSPASPGPPLGPEGGEEEXXXXIIXXXXVXXXVXSPAYLLSCGFPPRPAHGDVSVXDLHPGGXAXFHCDSGYQLQGEEXLICLNGXRPSWNGEXPSCMASCGGXIHNAXLGRIVSPEPGGAVGPNLXCRWVIEAAEGRRLHLHFERVSLDEDNDRLMVRSGGSPLSPVIYDSDMDDVPERGLISDAQSLYVELLSEXPANPLLLSLRFEAFEEDRCFAPFLAHGNVXXXDPEYRPGALAXFSCLPGYALEPPGPPNAIECVDPXEPHWNDXEPACKAMCGGELSEPAGVVLSPDWPQSYSPGQDCVWGVHVQEEKRILLQVEILNVREGDMLXLFDGDGPSARVLAQLRGPQPRRRLLSSGPDLXLQFQAPPGPPNPGLGQGFVLHFKEVPRNDXCPELPPPEWGWRXASHGDLIRGXVLXYQCEPGYELLGSDILXCQWDLSWSAAPPACQKIMXCADPGEIANGHRXASDAGFPVGSHVQYRCLPGYSLEGAAMLXCYSRDXGXPKWSDRVPKCALKYEPCLNPGVPENGYQXLYKHHYQAGESLRFFCYEGFELIGEVXIXCVPGHPSQWXSQPPLCKVAYEELLDNRKLEVXQXXDPSRQLEGGNLALAILLPLGLVIVLGSGVYIYYXKLQGKSLFGFSGSHSYSPIXVESDFSNPLYEAGDXREYEVSI

SEQ ID NO: 25101 - protein, 910 aa, Homo sapiens
  MOD_RES (3)..(3): Selenocysteine
  MOD_RES (43)..(43): Selenocysteine
  MOD_RES (45)..(45): Selenocysteine
  MOD_RES (77)..(77): Selenocysteine
  MOD_RES (80)..(80): Selenocysteine
  MOD_RES (86)..(86): Selenocysteine
  MOD_RES (96)..(96): Selenocysteine
  MOD_RES (100)..(100): Selenocysteine
  MOD_RES (104)..(105): Selenocysteine
  MOD_RES (108)..(108): Selenocysteine
  MOD_RES (118)..(118): Selenocysteine
  MOD_RES (124)..(124): Selenocysteine
  MOD_RES (129)..(130): Selenocysteine
  MOD_RES (153)..(156): Selenocysteine
  MOD_RES (159)..(162): Selenocysteine
  MOD_RES (164)..(166): Selenocysteine
  MOD_RES (168)..(168): Selenocysteine
  MOD_RES (196)..(196): Selenocysteine
  MOD_RES (203)..(203): Selenocysteine
  MOD_RES (220)..(220): Selenocysteine
  MOD_RES (261)..(261): Selenocysteine
  MOD_RES (304)..(304): Selenocysteine
  MOD_RES (311)..(311): Selenocysteine
  MOD_RES (313)..(313): Selenocysteine
  MOD_RES (327)..(327): Selenocysteine
  MOD_RES (334)..(334): Selenocysteine
  MOD_RES (342)..(342): Selenocysteine
  MOD_RES (352)..(352): Selenocysteine
  MOD_RES (357)..(357): Selenocysteine
  MOD_RES (375)..(375): Selenocysteine
  MOD_RES (445)..(445): Selenocysteine
  MOD_RES (475)..(477): Selenocysteine
  MOD_RES (488)..(488): Selenocysteine
  MOD_RES (512)..(512): Selenocysteine
  MOD_RES (519)..(519): Selenocysteine
  MOD_RES (581)..(581): Selenocysteine
  MOD_RES (613)..(613): Selenocysteine
  MOD_RES (643)..(643): Selenocysteine
  MOD_RES (656)..(656): Selenocysteine
  MOD_RES (666)..(666): Selenocysteine
  MOD_RES (669)..(669): Selenocysteine
  MOD_RES (685)..(685): Selenocysteine
  MOD_RES (704)..(704): Selenocysteine
  MOD_RES (717)..(717): Selenocysteine
  MOD_RES (746)..(746): Selenocysteine
  MOD_RES (752)..(752): Selenocysteine
  MOD_RES (754)..(754): Selenocysteine
  MOD_RES (783)..(783): Selenocysteine
  MOD_RES (810)..(810): Selenocysteine
  MOD_RES (812)..(812): Selenocysteine
  MOD_RES (822)..(822): Selenocysteine
  MOD_RES (831)..(831): Selenocysteine
  MOD_RES (833)..(834): Selenocysteine
  MOD_RES (868)..(868): Selenocysteine
  MOD_RES (888)..(888): Selenocysteine
  MOD_RES (903)..(903): Selenocysteine
MGXPRAQHPPPPQLLFLILLSCPWIQGLPLKEEEILPEPGSEXPXVASEALAELLHGALLRRGPEMGYLPGSDRDPXLAXPPAGQXLAVPSLPRAXEPGXGPLXXAVXPNGVRGAGPXAPELLXPPPGXXAPPPPSPASPGPPLGPEGGEEEXXXXIIXXXXVXXXVXSPVLCNNNISEGEGYVESPDLGSPVSRXLGLLDCXYSIHVYPGYGIEIQVQXLNLSQEEELLVLAGGGSPGLAPRLLANSSMLGEGQVLRSPXNRLLLHFQSPRVPRGGGFRIHYQAYLLSCGFPPRPAHGDVSVXDLHPGGXAXFHCDSGYQLQGEEXLICLNGXRPSWNGEXPSCMASCGGXIHNAXLGRIVSPEPGGAVGPNLXCRWVIEAAEGRRLHLHFERVSLDEDNDRLMVRSGGSPLSPVIYDSDMDDVPERGLISDAQSLYVELLSEXPANPLLLSLRFEAFEEDRCFAPFLAHGNVXXXDPEYRPGALAXFSCLPGYALEPPGPPNAIECVDPXEPHWNDXEPACKAMCGGELSEPAGVVLSPDWPQSYSPGQDCVWGVHVQEEKRILLQVEILNVREGDMLXLFDGDGPSARVLAQLRGPQPRRRLLSSGPDLXLQFQAPPGPPNPGLGQGFVLHFKEVPRNDXCPELPPPEWGWRXASHGDLIRGXVLXYQCEPGYELLGSDILXCQWDLSWSAAPPACQKIMXCADPGEIANGHRXASDAGFPVGSHVQYRCLPGYSLEGAAMLXCYSRDXGXPKWSDRVPKCALKYEPCLNPGVPENGYQXLYKHHYQAGESLRFFCYEGFELIGEVXIXCVPGHPSQWXSQPPLCKVXQXXDPSRQLEGGNLALAILLPLGLVIVLGSGVYIYYXKLQGKSLFGFSGSHSYSPIXVESDFSNPLYEAGDXREYEVSI

SEQ ID NO: 25102 - protein, 923 aa, Homo sapiens
  MOD_RES (3)..(3): Selenocysteine
  MOD_RES (43)..(43): Selenocysteine
  MOD_RES (45)..(45): Selenocysteine
  MOD_RES (77)..(77): Selenocysteine
  MOD_RES (80)..(80): Selenocysteine
  MOD_RES (86)..(86): Selenocysteine
  MOD_RES (96)..(96): Selenocysteine
  MOD_RES (100)..(100): Selenocysteine
  MOD_RES (104)..(105): Selenocysteine
  MOD_RES (108)..(108): Selenocysteine
  MOD_RES (118)..(118): Selenocysteine
  MOD_RES (124)..(124): Selenocysteine
  MOD_RES (129)..(130): Selenocysteine
  MOD_RES (153)..(156): Selenocysteine
  MOD_RES (159)..(162): Selenocysteine
  MOD_RES (164)..(166): Selenocysteine
  MOD_RES (168)..(168): Selenocysteine
  MOD_RES (196)..(196): Selenocysteine
  MOD_RES (203)..(203): Selenocysteine
  MOD_RES (220)..(220): Selenocysteine
  MOD_RES (261)..(261): Selenocysteine
  MOD_RES (304)..(304): Selenocysteine
  MOD_RES (311)..(311): Selenocysteine
  MOD_RES (313)..(313): Selenocysteine
  MOD_RES (327)..(327): Selenocysteine
  MOD_RES (334)..(334): Selenocysteine
  MOD_RES (342)..(342): Selenocysteine
  MOD_RES (352)..(352): Selenocysteine
  MOD_RES (357)..(357): Selenocysteine
  MOD_RES (375)..(375): Selenocysteine
  MOD_RES (445)..(445): Selenocysteine
  MOD_RES (475)..(477): Selenocysteine
  MOD_RES (488)..(488): Selenocysteine
  MOD_RES (512)..(512): Selenocysteine
  MOD_RES (519)..(519): Selenocysteine
  MOD_RES (581)..(581): Selenocysteine
  MOD_RES (613)..(613): Selenocysteine
  MOD_RES (643)..(643): Selenocysteine
  MOD_RES (656)..(656): Selenocysteine
  MOD_RES (666)..(666): Selenocysteine
  MOD_RES (669)..(669): Selenocysteine
  MOD_RES (685)..(685): Selenocysteine
  MOD_RES (704)..(704): Selenocysteine
  MOD_RES (717)..(717): Selenocysteine
  MOD_RES (746)..(746): Selenocysteine
  MOD_RES (752)..(752): Selenocysteine
  MOD_RES (754)..(754): Selenocysteine
  MOD_RES (783)..(783): Selenocysteine
  MOD_RES (810)..(810): Selenocysteine
  MOD_RES (812)..(812): Selenocysteine
  MOD_RES (822)..(822): Selenocysteine
  MOD_RES (844)..(844): Selenocysteine
  MOD_RES (846)..(847): Selenocysteine
  MOD_RES (881)..(881): Selenocysteine
  MOD_RES (901)..(901): Selenocysteine
  MOD_RES (916)..(916): Selenocysteine
MGXPRAQHPPPPQLLFLILLSCPWIQGLPLKEEEILPEPGSEXPXVASEALAELLHGALLRRGPEMGYLPGSDRDPXLAXPPAGQXLAVPSLPRAXEPGXGPLXXAVXPNGVRGAGPXAPELLXPPPGXXAPPPPSPASPGPPLGPEGGEEEXXXXIIXXXXVXXXVXSPVLCNNNISEGEGYVESPDLGSPVSRXLGLLDCXYSIHVYPGYGIEIQVQXLNLSQEEELLVLAGGGSPGLAPRLLANSSMLGEGQVLRSPXNRLLLHFQSPRVPRGGGFRIHYQAYLLSCGFPPRPAHGDVSVXDLHPGGXAXFHCDSGYQLQGEEXLICLNGXRPSWNGEXPSCMASCGGXIHNAXLGRIVSPEPGGAVGPNLXCRWVIEAAEGRRLHLHFERVSLDEDNDRLMVRSGGSPLSPVIYDSDMDDVPERGLISDAQSLYVELLSEXPANPLLLSLRFEAFEEDRCFAPFLAHGNVXXXDPEYRPGALAXFSCLPGYALEPPGPPNAIECVDPXEPHWNDXEPACKAMCGGELSEPAGVVLSPDWPQSYSPGQDCVWGVHVQEEKRILLQVEILNVREGDMLXLFDGDGPSARVLAQLRGPQPRRRLLSSGPDLXLQFQAPPGPPNPGLGQGFVLHFKEVPRNDXCPELPPPEWGWRXASHGDLIRGXVLXYQCEPGYELLGSDILXCQWDLSWSAAPPACQKIMXCADPGEIANGHRXASDAGFPVGSHVQYRCLPGYSLEGAAMLXCYSRDXGXPKWSDRVPKCALKYEPCLNPGVPENGYQXLYKHHYQAGESLRFFCYEGFELIGEVXIXCVPGHPSQWXSQPPLCKVAYEELLDNRKLEVXQXXDPSRQLEGGNLALAILLPLGLVIVLGSGVYIYYXKLQGKSLFGFSGSHSYSPIXVESDFSNPLYEAGDXREYEVSI

SEQ ID NO: 25103 - protein, 81 aa, Homo sapiens
  MOD_RES (3)..(3): Selenocysteine
  MOD_RES (33)..(33): Selenocysteine
  MOD_RES (36)..(36): Selenocysteine
  MOD_RES (42)..(42): Selenocysteine
  MOD_RES (52)..(52): Selenocysteine
  MOD_RES (56)..(56): Selenocysteine
  MOD_RES (60)..(61): Selenocysteine
  MOD_RES (64)..(64): Selenocysteine
  MOD_RES (74)..(74): Selenocysteine
  MOD_RES (80)..(80): Selenocysteine
MGXPRAQHPPPPQLLFLILLSCPWIQGSDRDPXLAXPPAGQXLAVPSLPRAXEPGXGPLXXAVXPNGVRGAGPXAPELLXP

SEQ ID NO: 25104 - protein, 879 aa, Homo sapiens
  MOD_RES (3)..(3): Selenocysteine
  MOD_RES (33)..(33): Selenocysteine
  MOD_RES (36)..(36): Selenocysteine
  MOD_RES (42)..(42): Selenocysteine
  MOD_RES (52)..(52): Selenocysteine
  MOD_RES (56)..(56): Selenocysteine
  MOD_RES (60)..(61): Selenocysteine
  MOD_RES (64)..(64): Selenocysteine
  MOD_RES (74)..(74): Selenocysteine
  MOD_RES (80)..(80): Selenocysteine
  MOD_RES (85)..(86): Selenocysteine
  MOD_RES (109)..(112): Selenocysteine
  MOD_RES (115)..(118): Selenocysteine
  MOD_RES (120)..(122): Selenocysteine
  MOD_RES (124)..(124): Selenocysteine
  MOD_RES (152)..(152): Selenocysteine
  MOD_RES (159)..(159): Selenocysteine
  MOD_RES (176)..(176): Selenocysteine
  MOD_RES (217)..(217): Selenocysteine
  MOD_RES (260)..(260): Selenocysteine
  MOD_RES (267)..(267): Selenocysteine
  MOD_RES (269)..(269): Selenocysteine
  MOD_RES (283)..(283): Selenocysteine
  MOD_RES (290)..(290): Selenocysteine
  MOD_RES (298)..(298): Selenocysteine
  MOD_RES (308)..(308): Selenocysteine
  MOD_RES (313)..(313): Selenocysteine
  MOD_RES (331)..(331): Selenocysteine
  MOD_RES (401)..(401): Selenocysteine
  MOD_RES (431)..(433): Selenocysteine
  MOD_RES (444)..(444): Selenocysteine
  MOD_RES (468)..(468): Selenocysteine
  MOD_RES (475)..(475): Selenocysteine
  MOD_RES (537)..(537): Selenocysteine
  MOD_RES (569)..(569): Selenocysteine
  MOD_RES (599)..(599): Selenocysteine
  MOD_RES (612)..(612): Selenocysteine
  MOD_RES (622)..(622): Selenocysteine
  MOD_RES (625)..(625): Selenocysteine
  MOD_RES (641)..(641): Selenocysteine
  MOD_RES (660)..(660): Selenocysteine
  MOD_RES (673)..(673): Selenocysteine
  MOD_RES (702)..(702): Selenocysteine
  MOD_RES (708)..(708): Selenocysteine
  MOD_RES (710)..(710): Selenocysteine
  MOD_RES (739)..(739): Selenocysteine
  MOD_RES (766)..(766): Selenocysteine
  MOD_RES (768)..(768): Selenocysteine
  MOD_RES (778)..(778): Selenocysteine
  MOD_RES (800)..(800): Selenocysteine
  MOD_RES (802)..(803): Selenocysteine
  MOD_RES (837)..(837): Selenocysteine
  MOD_RES (857)..(857): Selenocysteine
  MOD_RES (872)..(872): Selenocysteine
MGXPRAQHPPPPQLLFLILLSCPWIQGSDRDPXLAXPPAGQXLAVPSLPRAXEPGXGPLXXAVXPNGVRGAGPXAPELLXPPPGXXAPPPPSPASPGPPLGPEGGEEEXXXXIIXXXXVXXXVXSPVLCNNNISEGEGYVESPDLGSPVSRXLGLLDCXYSIHVYPGYGIEIQVQXLNLSQEEELLVLAGGGSPGLAPRLLANSSMLGEGQVLRSPXNRLLLHFQSPRVPRGGGFRIHYQAYLLSCGFPPRPAHGDVSVXDLHPGGXAXFHCDSGYQLQGEEXLICLNGXRPSWNGEXPSCMASCGGXIHNAXLGRIVSPEPGGAVGPNLXCRWVIEAAEGRRLHLHFERVSLDEDNDRLMVRSGGSPLSPVIYDSDMDDVPERGLISDAQSLYVELLSEXPANPLLLSLRFEAFEEDRCFAPFLAHGNVXXXDPEYRPGALAXFSCLPGYALEPPGPPNAIECVDPXEPHWNDXEPACKAMCGGELSEPAGVVLSPDWPQSYSPGQDCVWGVHVQEEKRILLQVEILNVREGDMLXLFDGDGPSARVLAQLRGPQPRRRLLSSGPDLXLQFQAPPGPPNPGLGQGFVLHFKEVPRNDXCPELPPPEWGWRXASHGDLIRGXVLXYQCEPGYELLGSDILXCQWDLSWSAAPPACQKIMXCADPGEIANGHRXASDAGFPVGSHVQYRCLPGYSLEGAAMLXCYSRDXGXPKWSDRVPKCALKYEPCLNPGVPENGYQXLYKHHYQAGESLRFFCYEGFELIGEVXIXCVPGHPSQWXSQPPLCKVAYEELLDNRKLEVXQXXDPSRQLEGGNLALAILLPLGLVIVLGSGVYIYYXKLQGKSLFGFSGSHSYSPIXVESDFSNPLYEAGDXREYEVSI

SEQ ID NO: 25105 - protein, 303 aa, Homo sapiens
  MOD_RES (1)..(1): Any amino acid
  MOD_RES (6)..(6): Selenocysteine
  MOD_RES (14)..(14): Selenocysteine
  MOD_RES (24)..(24): Selenocysteine
  MOD_RES (29)..(29): Selenocysteine
  MOD_RES (47)..(47): Selenocysteine
  MOD_RES (117)..(117): Selenocysteine
  MOD_RES (186)..(186): Selenocysteine
  MOD_RES (218)..(218): Selenocysteine
  MOD_RES (248)..(248): Selenocysteine
  MOD_RES (261)..(261): Selenocysteine
  MOD_RES (271)..(271): Selenocysteine
  MOD_RES (274)..(274): Selenocysteine
  MOD_RES (290)..(290): Selenocysteine
XCLNGXRPSWNGEXPSCMASCGGXIHNAXLGRIVSPEPGGAVGPNLXCRWVIEAAEGRRLHLHFERVSLDEDNDRLMVRSGGSPLSPVIYDSDMDDVPERGLISDAQSLYVELLSEXPANPLLLSLRFEAMCGGELSEPAGVVLSPDWPQSYSPGQDCVWGVHVQEEKRILLQVEILNVREGDMLXLFDGDGPSARVLAQLRGPQPRRRLLSSGPDLXLQFQAPPGPPNPGLGQGFVLHFKEVPRNDXCPELPPPEWGWRXASHGDLIRGXVLXYQCEPGYELLGSDILXCQWDLSWSAAPPA

SEQ ID NO: 25106 - protein, 248 aa, Homo sapiens
  MOD_RES (90)..(90): Selenocysteine
  MOD_RES (98)..(98): Selenocysteine
  MOD_RES (136)..(136): Selenocysteine
  MOD_RES (165)..(165): Selenocysteine
  MOD_RES (196)..(197): Selenocysteine
  MOD_RES (207)..(207): Selenocysteine
  MOD_RES (217)..(217): Selenocysteine
  MOD_RES (228)..(228): Selenocysteine
  MOD_RES (231)..(231): Selenocysteine
MERASLIQKAKLAEQAERYEDMAAFMKGAVEKGEELSCEERNLLSVAYKNVVGGQRAAWRVLSSIEQKSNEEGSEEKGPEVREYREKVEXELQGVCDXVLGLLDSHLIKEAGDAESRVFYLKMKGDYYRYLAEVAXGDDKKRIIDSARSAYQEAMDISKKEMPPXNPIRLGLALNFSVFHYEIANSPEEAISLAKXXFDEAMADLHXLSEDSYKDSXLIMQLLRDNLXLWXADNAGEEGGEAPQEPQS

SEQ ID NO: 25107 - protein, 707 aa, Homo sapiens
  MOD_RES (135)..(135): Selenocysteine
  MOD_RES (138)..(138): Selenocysteine
  MOD_RES (150)..(150): Selenocysteine
  MOD_RES (152)..(152): Selenocysteine
  MOD_RES (158)..(158): Selenocysteine
  MOD_RES (168)..(168): Selenocysteine
  MOD_RES (176)..(177): Selenocysteine
  MOD_RES (226)..(226): Selenocysteine
  MOD_RES (292)..(292): Selenocysteine
  MOD_RES (294)..(294): Selenocysteine
  MOD_RES (309)..(309): Selenocysteine
  MOD_RES (355)..(355): Selenocysteine
  MOD_RES (368)..(368): Selenocysteine
  MOD_RES (411)..(411): Selenocysteine
  MOD_RES (439)..(441): Selenocysteine
  MOD_RES (476)..(476): Selenocysteine
  MOD_RES (485)..(485): Selenocysteine
  MOD_RES (652)..(652): Selenocysteine
  MOD_RES (664)..(664): Selenocysteine
  MOD_RES (687)..(687): Selenocysteine
MSRDRFRSRGGGGGGFHRRGGGGGRGGLHDFRSPPPGMGLNQNRGPMGPGPGQSGPKPPIPPPPPHQQQQQPPPQQPPPQQPPPHQPPPHPQPHQQQQPPPPPQDSSKPVVAQGPGPAPGVGSAPPASSSAPPAXPPXSGAPPGSGPGPXPXPPPAVXSAPPGAPPPXPPSSGVPXXPPQAGGPPPPPAAVPGPGPGPKQGPGPGGPKGGKMPGGPKPGGGPGLSXPGGHPKPPHRGGGEPRGGRQHHPPYHQQHHQGPPPGGPGGRSEEKISDSEGFKANLSLLRRPGEKXYXQRCRLFVGNLPADIXEDEFKRLFAKYGEPGEVFINKGKGFGFIKLESRALAEIAKAELDDXPMRGRQLRVRFAXHAAALSVRNLSPYVSNELLEEAFSQFGPIERAVVIVDDRGRSXGKGIVEFASKPAARKAFERCSEGVFLLXXXPRPVIVEPLEQLDDEDGLPEKLAQKNPMYQKEREXPPRFAQHGXFEYEYSQRWKSLDEMEKQQREQVEKNMKDAKDKLESEMEDAYHEHQANLLRQDLMRRQEELRRMEELHNQEMQKRKEMQLRQEEERRRREEEMMIRQREMEEQMRRQREESYSRMGYMDPRERDMRMGGGGAMNMGDPYGSGGQKFPPLGGGGGIGYEANPGVPPAXMSGSMMGSDMRXERFGQGGAGPVGGQGPRGMGPGXPAGYGRGREEYEGPNKKPRF

SEQ ID NO: 25108 - protein, 223 aa, Homo sapiens
  MOD_RES (30)..(30): Selenocysteine
  MOD_RES (39)..(39): Selenocysteine
  MOD_RES (206)..(206): Selenocysteine
VEPLEQLDDEDGLPEKLAQKNPMYQKEREXPPRFAQHGXFEYEYSQRWKSLDEMEKQQREQVEKNMKDAKDKLESEMEDAYHEHQANLLRQDLMRRQEELRRMEELHNQEMQKRKEMQLRQEEERRRREEEMMIRQREMEEQMRRQREESYSRMGYMDPRERDMRMGGGGAMNMGDPYGSGGQKFPPLGGGGGIGYEANPGVPPAXMSGSMMGSDMVRMIDVG

SEQ ID NO: 25109 - protein, 88 aa, Homo sapiens
  MOD_RES (1)..(1): Any amino acid
  MOD_RES (71)..(71): Selenocysteine
XREMEEQMRRQREESYSRMGYMDPRERDMRMGGGGAMNMGDPYGSGGQKFPPLGGGGGIGYEANPGVPPAXMSGSMMGSDMVRMIDVG

SEQ ID NO: 25110 - protein, 314 aa, Homo sapiens
  MOD_RES (53)..(53): Selenocysteine
  MOD_RES (86)..(86): Selenocysteine
  MOD_RES (109)..(109): Selenocysteine
  MOD_RES (170)..(170): Selenocysteine
  MOD_RES (175)..(175): Selenocysteine
  MOD_RES (183)..(184): Selenocysteine
  MOD_RES (282)..(282): Selenocysteine
  MOD_RES (308)..(308): Selenocysteine
MGIGRSEGGRRGAALGVLLALGAALLAVGSASEYDYVSFQSDIGPYQSGRFYXKPPQCVDIPADLRLCHNVGYKKMVLPNLLEHEXMAEVKQQASSWVPLLNKNCHAGXQVFLCSLFAPVCLDRPIYPCRWLCEAVRDSCEPVMQFFGFYWPEMLKCDKFPEGDVCIAMXPPNAXEASKPQGXXVCPPCDNELKSEAIIEHLCASEFALRMKIKEVKKENGDKKIVPKKKKPLKLGPIKKKDLKKLVLYLKNGADCPCHQLDNLSHHFLIMGRKVKSQYLLXAIHKWDKKNKEFKNFMKKMKNHECPXFQSVFK

SEQ ID NO: 25111 - protein, 178 aa, Homo sapiens
  MOD_RES (13)..(13): Selenocysteine
  MOD_RES (33)..(33): Selenocysteine
  MOD_RES (36)..(36): Selenocysteine
  MOD_RES (47)..(48): Selenocysteine
  MOD_RES (146)..(146): Selenocysteine
  MOD_RES (172)..(172): Selenocysteine
MGWGNPIIAVFRXPFAPWLQFHWSAPFSAWLGXVLXHLHSSQQRSGXXVCPPCDNELKSEAIIEHLCASEFALRMKIKEVKKENGDKKIVPKKKKPLKLGPIKKKDLKKLVLYLKNGADCPCHQLDNLSHHFLIMGRKVKSQYLLXAIHKWDKKNKEFKNFMKKMKNHECPXFQSVFK

SEQ ID NO: 25112 - protein, 295 aa, Homo sapiens
  MOD_RES (68)..(68): Selenocysteine
  MOD_RES (91)..(91): Selenocysteine
  MOD_RES (110)..(110): Selenocysteine
  MOD_RES (165)..(165): Selenocysteine
  MOD_RES (188)..(188): Selenocysteine
  MOD_RES (204)..(204): Selenocysteine
  MOD_RES (210)..(210): Selenocysteine
  MOD_RES (216)..(216): Selenocysteine
  MOD_RES (220)..(220): Selenocysteine
  MOD_RES (246)..(246): Selenocysteine
  MOD_RES (271)..(271): Selenocysteine
MLQGPGSLLLLFLASHCCLGSARGLFLFGQPDFSYKRSNCKPIPANLQLCHGIEYQNMRLPNLLGHEXMKEVLEQAGAWIPLVMKQCHPDXKKFLCSLFAPVCLDDLDEXIQPCHSLCVQVKDRCAPVMSAFGFPWPDMLECDRFPQDNDLCIPLASSDHLLPAXEEAPKVCEACKNKNDDDNDIMEXLCKNDFALKIKVKEIXYINRDXKIILEXKSKXIYKLNGVSERDLKKSVLWLKDSLQCXCEEMNDINAPYLVMGQKQGGELVIXSVKRWQKGQREFKRISRSIRKLQC

SEQ ID NO: 25113 - protein, 346 aa, Homo sapiens
  MOD_RES (40)..(40): Selenocysteine
  MOD_RES (50)..(50): Selenocysteine
  MOD_RES (86)..(86): Selenocysteine
  MOD_RES (144)..(144): Selenocysteine
  MOD_RES (156)..(156): Selenocysteine
  MOD_RES (186)..(186): Selenocysteine
  MOD_RES (189)..(189): Selenocysteine
  MOD_RES (215)..(216): Selenocysteine
  MOD_RES (233)..(233): Selenocysteine
  MOD_RES (239)..(239): Selenocysteine
  MOD_RES (297)..(297): Selenocysteine
  MOD_RES (304)..(304): Selenocysteine
  MOD_RES (308)..(308): Selenocysteine
  MOD_RES (334)..(334): Selenocysteine
  MOD_RES (341)..(341): Selenocysteine
MFLSILVALCLWLHLALGVRGAPCEAVRIPMCRHMPWNIXRMPNHLHHSXQENAILAIEQYEELVDVNCSAVLRFFLCAMYAPICXLEFLHDPIKPCKSVCQRARDDCEPLMKMYNHSWPESLACDELPVYDRGVCISPEAIVXDLPEDVKWIDIXPDMMVQERPLDVDCKRLSPDRCKCKKVKPXLAXYLSKNYSYVIHAKIKAVQRSGCNEVXXVVDVKEIFKSSSPIPRXQVPLIXNSSCQCPHILPHQDVLIMCYEWRSRMMLLENCLVEKWRDQLSKRSIQWEERLQEQRRXVQDKKKXAGRXSRSNPPKPKGKPPAPKPASPKKNIKXRSAQKRXNPKRV

SEQ ID NO: 25114 - protein, 137 aa, Homo sapiens
  MOD_RES (22)..(22): Selenocysteine
  MOD_RES (52)..(52): Selenocysteine
  MOD_RES (55)..(55): Selenocysteine
  MOD_RES (81)..(82): Selenocysteine
  MOD_RES (99)..(99): Selenocysteine
  MOD_RES (105)..(105): Selenocysteine
MQLEQSIIPDIPAKDVKWIDIXPDMMVQERPLDVDCKRLSPDRCKCKKVKPXLAXYLSKNYSYVIHAKIKAVQRSGCNEVXXVVDVKEIFKSSSPIPRXQVPLIXNSSCQCPHILPHQDVLIMCYEWRSRMMLLENC

SEQ ID NO: 25115 - protein, 317 aa, Homo sapiens
  MOD_RES (12)..(12): Selenocysteine
  MOD_RES (65)..(65): Selenocysteine
  MOD_RES (104)..(104): Selenocysteine
  MOD_RES (173)..(173): Selenocysteine
  MOD_RES (178)..(178): Selenocysteine
  MOD_RES (240)..(240): Selenocysteine
MRAAAAGGGVRXAALALLLGALHWAPARCEEYDYYGWQAEPLHGRSYSKPPQCLDIPADLPLCHXVGYKRMRLPNLLEHESLAEVKQQASSWLPLLAKRCHSDXQVFLCSLFAPVCLDRPIYPCRSLCEAVRAGCAPLMEAYGFPWPEMLHCHKFPLDNDLCIAVQFGHLPAXAPPVXKICAQCEMEHSADGLMEQMCSSDFVVKMRIKEIKIENGDRKLIGAQKKKKLLKPGPLKRKDXKRLVLHMKNGAGCPCPQLDSLAGSFLVMGRKVDGQLLLMAVYRWDKKNKEMKFAVKFMFSYPCSLYYPFFYGAAEPH

SEQ ID NO: 25116 - protein, 445 aa, Homo sapiens
  MOD_RES (182)..(182): Selenocysteine
  MOD_RES (253)..(253): Selenocysteine
  MOD_RES (267)..(268): Selenocysteine
  MOD_RES (270)..(270): Selenocysteine
  MOD_RES (274)..(274): Selenocysteine
  MOD_RES (291)..(291): Selenocysteine
  MOD_RES (316)..(316): Selenocysteine
  MOD_RES (335)..(335): Selenocysteine
  MOD_RES (351)..(351): Selenocysteine
  MOD_RES (383)..(383): Selenocysteine
  MOD_RES (404)..(404): Selenocysteine
  MOD_RES (422)..(422): Selenocysteine
  MOD_RES (441)..(441): Selenocysteine
MGEMQGALARARLESLLRPRHKKRAEAQKRSESFLLSGLAFMKQRRMGLNDFIQKIANNSYACKHPEVQSILKISQPQEPELMNANPSPPPSPSQQINLGPSSNPHAKPSDFHFLKVIGKGSFGKVLLARHKAEEVFYAVKVLQKKAILKKKEEKHIMSERNVLLKNVKHPFLVGLHFSFQXADKLYFVLDYINGGELFYHLQRERCFLEPRARFYAAEIASALGYLHSLNIVYRDLKPENILLDSQGHIVLXDFGLCKENIEHNSXXSXFCGXPEYLAPEVLHKQPYDRXVDWWCLGAVLYEMLYGLPPFYSRNXAEMYDNILNKPLQLKPNIXNSARHLLEGLLQKDRXKRLGAKDDFMEIKSHVFFSLINWDDLINKKIXPPFNPNVSGPNDLRHFDPEFXEEPVPNSIGKSPDSVLVXASVKEAAEAFLGFSYAPPXDSFL

SEQ ID NO: 25117 - protein, 421 aa, Homo sapiens
  MOD_RES (15)..(15): Selenocysteine
  MOD_RES (158)..(158): Selenocysteine
  MOD_RES (229)..(229): Selenocysteine
  MOD_RES (243)..(244): Selenocysteine
  MOD_RES (246)..(246): Selenocysteine
  MOD_RES (250)..(250): Selenocysteine
  MOD_RES (267)..(267): Selenocysteine
  MOD_RES (292)..(292): Selenocysteine
  MOD_RES (311)..(311): Selenocysteine
  MOD_RES (327)..(327): Selenocysteine
  MOD_RES (359)..(359): Selenocysteine
  MOD_RES (380)..(380): Selenocysteine
  MOD_RES (398)..(398): Selenocysteine
  MOD_RES (417)..(417): Selenocysteine
MKPSKRFFISPPSSXAFMKQRRMGLNDFIQKIANNSYACKHPEVQSILKISQPQEPELMNANPSPPPSPSQQINLGPSSNPHAKPSDFHFLKVIGKGSFGKVLLARHKAEEVFYAVKVLQKKAILKKKEEKHIMSERNVLLKNVKHPFLVGLHFSFQXADKLYFVLDYINGGELFYHLQRERCFLEPRARFYAAEIASALGYLHSLNIVYRDLKPENILLDSQGHIVLXDFGLCKENIEHNSXXSXFCGXPEYLAPEVLHKQPYDRXVDWWCLGAVLYEMLYGLPPFYSRNXAEMYDNILNKPLQLKPNIXNSARHLLEGLLQKDRXKRLGAKDDFMEIKSHVFFSLINWDDLINKKIXPPFNPNVSGPNDLRHFDPEFXEEPVPNSIGKSPDSVLVXASVKEAAEAFLGFSYAPPXDSFL

SEQ ID NO: 25118 - protein, 459 aa, Homo sapiens
  MOD_RES (40)..(40): Selenocysteine
  MOD_RES (196)..(196): Selenocysteine
  MOD_RES (267)..(267): Selenocysteine
  MOD_RES (281)..(282): Selenocysteine
  MOD_RES (284)..(284): Selenocysteine
  MOD_RES (288)..(288): Selenocysteine
  MOD_RES (305)..(305): Selenocysteine
  MOD_RES (330)..(330): Selenocysteine
  MOD_RES (349)..(349): Selenocysteine
  MOD_RES (365)..(365): Selenocysteine
  MOD_RES (397)..(397): Selenocysteine
  MOD_RES (418)..(418): Selenocysteine
  MOD_RES (436)..(436): Selenocysteine
  MOD_RES (455)..(455): Selenocysteine
MSSQSSSLSEACSREAYSSHNWALPPASRSNPQPAYPWAXRRMKEEAIKPPLKAFMKQRRMGLNDFIQKIANNSYACKHPEVQSILKISQPQEPELMNANPSPPPSPSQQINLGPSSNPHAKPSDFHFLKVIGKGSFGKVLLARHKAEEVFYAVKVLQKKAILKKKEEKHIMSERNVLLKNVKHPFLVGLHFSFQXADKLYFVLDYINGGELFYHLQRERCFLEPRARFYAAEIASALGYLHSLNIVYRDLKPENILLDSQGHIVLXDFGLCKENIEHNSXXSXFCGXPEYLAPEVLHKQPYDRXVDWWCLGAVLYEMLYGLPPFYSRNXAEMYDNILNKPLQLKPNIXNSARHLLEGLLQKDRXKRLGAKDDFMEIKSHVFFSLINWDDLINKKIXPPFNPNVSGPNDLRHFDPEFXEEPVPNSIGKSPDSVLVXASVKEAAEAFLGFSYAPPXDSFL

SEQ ID NO: 25119 - protein, 431 aa, Homo sapiens
  MOD_RES (2)..(2): Selenocysteine
  MOD_RES (5)..(5): Selenocysteine
  MOD_RES (11)..(11): Selenocysteine
  MOD_RES (13)..(13): Selenocysteine
  MOD_RES (168)..(168): Selenocysteine
  MOD_RES (239)..(239): Selenocysteine
  MOD_RES (253)..(254): Selenocysteine
  MOD_RES (256)..(256): Selenocysteine
  MOD_RES (260)..(260): Selenocysteine
  MOD_RES (277)..(277): Selenocysteine
  MOD_RES (302)..(302): Selenocysteine
  MOD_RES (321)..(321): Selenocysteine
  MOD_RES (337)..(337): Selenocysteine
  MOD_RES (369)..(369): Selenocysteine
  MOD_RES (390)..(390): Selenocysteine
  MOD_RES (408)..(408): Selenocysteine
  MOD_RES (427)..(427): Selenocysteine
MXVKXEAAKGXLXYSRMRGMVAILIAFMKQRRMGLNDFIQKIANNSYACKHPEVQSILKISQPQEPELMNANPSPPPSPSQQINLGPSSNPHAKPSDFHFLKVIGKGSFGKVLLARHKAEEVFYAVKVLQKKAILKKKEEKHIMSERNVLLKNVKHPFLVGLHFSFQXADKLYFVLDYINGGELFYHLQRERCFLEPRARFYAAEIASALGYLHSLNIVYRDLKPENILLDSQGHIVLXDFGLCKENIEHNSXXSXFCGXPEYLAPEVLHKQPYDRXVDWWCLGAVLYEMLYGLPPFYSRNXAEMYDNILNKPLQLKPNIXNSARHLLEGLLQKDRXKRLGAKDDFMEIKSHVFFSLINWDDLINKKIXPPFNPNVSGPNDLRHFDPEFXEEPVPNSIGKSPDSVLVXASVKEAAEAFLGFSYAPPXDSFL

SEQ ID NO: 25120 - protein, 387 aa, Homo sapiens
  MOD_RES (2)..(2): Selenocysteine
  MOD_RES (5)..(5): Selenocysteine
  MOD_RES (11)..(11): Selenocysteine
  MOD_RES (13)..(13): Selenocysteine
  MOD_RES (195)..(195): Selenocysteine
  MOD_RES (209)..(210): Selenocysteine
  MOD_RES (212)..(212): Selenocysteine
  MOD_RES (216)..(216): Selenocysteine
  MOD_RES (233)..(233): Selenocysteine
  MOD_RES (258)..(258): Selenocysteine
  MOD_RES (277)..(277): Selenocysteine
  MOD_RES (293)..(293): Selenocysteine
  MOD_RES (325)..(325): Selenocysteine
  MOD_RES (346)..(346): Selenocysteine
  MOD_RES (364)..(364): Selenocysteine
  MOD_RES (383)..(383): Selenocysteine
MXVKXEAAKGXLXYSRMRGMVAILIAFMKQRRMGLNDFIQKIANNSYACKHPEVQSILKISQPQEPELMNANPSPPPSPSQQINLGPSSNPHAKPSDFHFLKVIGKGSFGKVLLARHKAEEVFYAVKVLQKKAILKKKELFYHLQRERCFLEPRARFYAAEIASALGYLHSLNIVYRDLKPENILLDSQGHIVLXDFGLCKENIEHNSXXSXFCGXPEYLAPEVLHKQPYDRXVDWWCLGAVLYEMLYGLPPFYSRNXAEMYDNILNKPLQLKPNIXNSARHLLEGLLQKDRXKRLGAKDDFMEIKSHVFFSLINWDDLINKKIXPPFNPNVSGPNDLRHFDPEFXEEPVPNSIGKSPDSVLVXASVKEAAEAFLGFSYAPPXDSFL

SEQ ID NO: 25121 - protein, 60 aa, Homo sapiens
  MOD_RES (46)..(46): Selenocysteine
MVNKDMNGFPVKKCSAFQFFKKRVRRWIKSPMVSVDKHQSPSLKYXGSSMVHIPPGEPDF

SEQ ID NO: 25122 - protein, 526 aa, Homo sapiens
  MOD_RES (46)..(46): Selenocysteine
  MOD_RES (67)..(67): Selenocysteine
  MOD_RES (90)..(90): Selenocysteine
  MOD_RES (107)..(107): Selenocysteine
  MOD_RES (113)..(113): Selenocysteine
  MOD_RES (116)..(116): Selenocysteine
  MOD_RES (263)..(263): Selenocysteine
  MOD_RES (334)..(334): Selenocysteine
  MOD_RES (348)..(349): Selenocysteine
  MOD_RES (351)..(351): Selenocysteine
  MOD_RES (355)..(355): Selenocysteine
  MOD_RES (372)..(372): Selenocysteine
  MOD_RES (397)..(397): Selenocysteine
  MOD_RES (416)..(416): Selenocysteine
  MOD_RES (432)..(432): Selenocysteine
  MOD_RES (464)..(464): Selenocysteine
  MOD_RES (485)..(485): Selenocysteine
  MOD_RES (503)..(503): Selenocysteine
  MOD_RES (522)..(522): Selenocysteine
MVNKDMNGFPVKKCSAFQFFKKRVRRWIKSPMVSVDKHQSPSLKYXGSSMVHIPPGEPDFESSLCQXCLGEHAFQRGVLPQENESCSWEXQSGCEVREPCNHANILXKPDPRXFWXNDDPAFMKQRRMGLNDFIQKIANNSYACKHPEVQSILKISQPQEPELMNANPSPPPSPSQQINLGPSSNPHAKPSDFHFLKVIGKGSFGKVLLARHKAEEVFYAVKVLQKKAILKKKEEKHIMSERNVLLKNVKHPFLVGLHFSFQXADKLYFVLDYINGGELFYHLQRERCFLEPRARFYAAEIASALGYLHSLNIVYRDLKPENILLDSQGHIVLXDFGLCKENIEHNSXXSXFCGXPEYLAPEVLHKQPYDRXVDWWCLGAVLYEMLYGLPPFYSRNXAEMYDNILNKPLQLKPNIXNSARHLLEGLLQKDRXKRLGAKDDFMEIKSHVFFSLINWDDLINKKIXPPFNPNVSGPNDLRHFDPEFXEEPVPNSIGKSPDSVLVXASVKEAAEAFLGFSYAPPXDSFL

SEQ ID NO: 25123 - protein, 153 aa, Homo sapiens
  MOD_RES (46)..(46): Selenocysteine
  MOD_RES (67)..(67): Selenocysteine
  MOD_RES (90)..(90): Selenocysteine
MVNKDMNGFPVKKCSAFQFFKKRVRRWIKSPMVSVDKHQSPSLKYXGSSMVHIPPGEPDFESSLCQXCLGEHAFQRGVLPQENESCSWEXQSGCEVSSCSLWIYSPGKILGLCFSCISARVYPKNNFLMHIYKASEEDLELWSLLAHYVIFLK

SEQ ID NO: 25124 - protein, 144 aa, Homo sapiens
  MOD_RES (15)..(15): Selenocysteine
  MOD_RES (36)..(36): Selenocysteine
  MOD_RES (59)..(59): Selenocysteine
  MOD_RES (76)..(76): Selenocysteine
  MOD_RES (82)..(82): Selenocysteine
  MOD_RES (85)..(85): Selenocysteine
MVSVDKHQSPSLKYXGSSMVHIPPGEPDFESSLCQXCLGEHAFQRGVLPQENESCSWEXQSGCEVREPCNHANILXKPDPRXFWXNDDPAFMKQRRMGLNDFIQKIANNSYACKHPEVQSILKISQPQEPELMNANPSPPPSPS

SEQ ID NO: 25125 - protein, 55 aa, Homo sapiens
  MOD_RES (1)..(1): Any amino acid
  MOD_RES (15)..(15): Selenocysteine
  MOD_RES (38)..(38): Selenocysteine
  MOD_RES (48)..(48): Selenocysteine
  MOD_RES (53)..(53): Selenocysteine
XPPGEPDFESSLCQXCLGEHAFQRGVLPQENESCSWEXQSGCEILCKXSGQLXSP

SEQ ID NO: 25126 - protein, 10 aa, Homo sapiens
  MOD_RES (8)..(8): Selenocysteine
MNSSPAGXPS

SEQ ID NO: 25127 - protein, 285 aa, Homo sapiens
  MOD_RES (8)..(8): Selenocysteine
  MOD_RES (33)..(33): Selenocysteine
  MOD_RES (105)..(105): Selenocysteine
  MOD_RES (176)..(176): Selenocysteine
  MOD_RES (190)..(191): Selenocysteine
  MOD_RES (193)..(193): Selenocysteine
  MOD_RES (197)..(197): Selenocysteine
  MOD_RES (258)..(258): Selenocysteine
MNSSPAGXPSPQPSRANGNINLGPSANPNAQPXDFDFLKVIGKGNYGKVLLAKRKSDGAFYAVKVLQKKSILKKKEQSHIMAERSVLLKNVRHPFLVGLRYSFQXPEKLYFVLDYVNGGELFFHLQRERRFLEPRARFYAAEVASAIGYLHSLNIIYRDLKPENILLDCQGHVVLXDFGLCKEGVEPEDXXSXFCGXPEYLAPEVLRKEPYDRAVDWWCLGAVLYEMLHGLPPFYSQDVSQMYENILHQPLQIPGGRXVAACDLLQSLLHKDQRQRLGSKADFVA

SEQ ID NO: 25128 - protein, 358 aa, Homo sapiens
  MOD_RES (8)..(8): Selenocysteine
  MOD_RES (33)..(33): Selenocysteine
  MOD_RES (105)..(105): Selenocysteine
  MOD_RES (176)..(176): Selenocysteine
  MOD_RES (190)..(191): Selenocysteine
  MOD_RES (193)..(193): Selenocysteine
  MOD_RES (197)..(197): Selenocysteine
  MOD_RES (258)..(258): Selenocysteine
  MOD_RES (306)..(306): Selenocysteine
  MOD_RES (315)..(315): Selenocysteine
  MOD_RES (320)..(320): Selenocysteine
  MOD_RES (332)..(332): Selenocysteine
  MOD_RES (345)..(345): Selenocysteine
  MOD_RES (356)..(356): Selenocysteine
MNSSPAGXPSPQPSRANGNINLGPSANPNAQPXDFDFLKVIGKGNYGKVLLAKRKSDGAFYAVKVLQKKSILKKKEQSHIMAERSVLLKNVRHPFLVGLRYSFQXPEKLYFVLDYVNGGELFFHLQRERRFLEPRARFYAAEVASAIGYLHSLNIIYRDLKPENILLDCQGHVVLXDFGLCKEGVEPEDXXSXFCGXPEYLAPEVLRKEPYDRAVDWWCLGAVLYEMLHGLPPFYSQDVSQMYENILHQPLQIPGGRXVAACDLLQSLLHKDQRQRLGSKADFLEIKNHVFFSPINWDDLYHKRLXPPFNPNVDXLGPGXRKASFRWDFKKXVKIMSNLYPGERXIHGILGRDEWXLE

SEQ ID NO: 25129 - protein, 367 aa, Homo sapiens
  MOD_RES (8)..(8): Selenocysteine
  MOD_RES (33)..(33): Selenocysteine
  MOD_RES (105)..(105): Selenocysteine
  MOD_RES (176)..(176): Selenocysteine
  MOD_RES (190)..(191): Selenocysteine
  MOD_RES (193)..(193): Selenocysteine
  MOD_RES (197)..(197): Selenocysteine
  MOD_RES (258)..(258): Selenocysteine
  MOD_RES (306)..(306): Selenocysteine
  MOD_RES (314)..(314): Selenocysteine
  MOD_RES (327)..(327): Selenocysteine
  MOD_RES (338)..(338): Selenocysteine
  MOD_RES (341)..(341): Selenocysteine
MNSSPAGXPSPQPSRANGNINLGPSANPNAQPXDFDFLKVIGKGNYGKVLLAKRKSDGAFYAVKVLQKKSILKKKEQSHIMAERSVLLKNVRHPFLVGLRYSFQXPEKLYFVLDYVNGGELFFHLQRERRFLEPRARFYAAEVASAIGYLHSLNIIYRDLKPENILLDCQGHVVLXDFGLCKEGVEPEDXXSXFCGXPEYLAPEVLRKEPYDRAVDWWCLGAVLYEMLHGLPPFYSQDVSQMYENILHQPLQIPGGRXVAACDLLQSLLHKDQRQRLGSKADFLEIKNHVFFSPINWDDLYHKRLXPPFNPNVXGPADLKHFDPEFXQEAVSKSIGCXPDXVASSSGASSAFLGFSYAPEDDDILDC

SEQ ID NO: 25130 - protein, 198 aa, Homo sapiens
  MOD_RES (8)..(8): Selenocysteine
  MOD_RES (33)..(33): Selenocysteine
  MOD_RES (104)..(104): Selenocysteine
  MOD_RES (175)..(175): Selenocysteine
  MOD_RES (189)..(190): Selenocysteine
  MOD_RES (192)..(192): Selenocysteine
  MOD_RES (196)..(196): Selenocysteine
MNSSPAGXPSPQPSRANGNINLGPSANPNAQPXDFDFLKVIGKGNYGKVLLAKRKSDGAFYAVKVLQKKSILKKKESHIMAERSVLLKNVRHPFLVGLRYSFQXPEKLYFVLDYVNGGELFFHLQRERRFLEPRARFYAAEVASAIGYLHSLNIIYRDLKPENILLDCQGHVVLXDFGLCKEGVEPEDXXSXFCGXPE

SEQ ID NO: 25131 - protein, 393 aa, Homo sapiens
  MOD_RES (6)..(6): Selenocysteine
  MOD_RES (18)..(18): Selenocysteine
  MOD_RES (34)..(34): Selenocysteine
  MOD_RES (59)..(59): Selenocysteine
  MOD_RES (131)..(131): Selenocysteine
  MOD_RES (202)..(202): Selenocysteine
  MOD_RES (216)..(217): Selenocysteine
  MOD_RES (219)..(219): Selenocysteine
  MOD_RES (223)..(223): Selenocysteine
  MOD_RES (284)..(284): Selenocysteine
  MOD_RES (332)..(332): Selenocysteine
  MOD_RES (340)..(340): Selenocysteine
  MOD_RES (353)..(353): Selenocysteine
  MOD_RES (364)..(364): Selenocysteine
  MOD_RES (367)..(367): Selenocysteine
MQGLLXSGRKPSGGGRCXELPDHCYRMNSSPAGXPSPQPSRANGNINLGPSANPNAQPXDFDFLKVIGKGNYGKVLLAKRKSDGAFYAVKVLQKKSILKKKEQSHIMAERSVLLKNVRHPFLVGLRYSFQXPEKLYFVLDYVNGGELFFHLQRERRFLEPRARFYAAEVASAIGYLHSLNIIYRDLKPENILLDCQGHVVLXDFGLCKEGVEPEDXXSXFCGXPEYLAPEVLRKEPYDRAVDWWCLGAVLYEMLHGLPPFYSQDVSQMYENILHQPLQIPGGRXVAACDLLQSLLHKDQRQRLGSKADFLEIKNHVFFSPINWDDLYHKRLXPPFNPNVXGPADLKHFDPEFXQEAVSKSIGCXPDXVASSSGASSAFLGFSYAPEDDDILDC

SEQ ID NO: 25132 - protein, 427 aa, Homo sapiens
  MOD_RES (6)..(6): Selenocysteine
  MOD_RES (18)..(18): Selenocysteine
  MOD_RES (40)..(40): Selenocysteine
  MOD_RES (42)..(42): Selenocysteine
  MOD_RES (68)..(68): Selenocysteine
  MOD_RES (93)..(93): Selenocysteine
  MOD_RES (165)..(165): Selenocysteine
  MOD_RES (236)..(236): Selenocysteine
  MOD_RES (250)..(251): Selenocysteine
  MOD_RES (253)..(253): Selenocysteine
  MOD_RES (257)..(257): Selenocysteine
  MOD_RES (318)..(318): Selenocysteine
  MOD_RES (366)..(366): Selenocysteine
  MOD_RES (374)..(374): Selenocysteine
  MOD_RES (387)..(387): Selenocysteine
  MOD_RES (398)..(398): Selenocysteine
  MOD_RES (401)..(401): Selenocysteine
MQGLLXSGRKPSGGGRCXGRGGWRGQWCLKPWMGGADPPXPXLSCLLLPVPPELPDHCYRMNSSPAGXPSPQPSRANGNINLGPSANPNAQPXDFDFLKVIGKGNYGKVLLAKRKSDGAFYAVKVLQKKSILKKKEQSHIMAERSVLLKNVRHPFLVGLRYSFQXPEKLYFVLDYVNGGELFFHLQRERRFLEPRARFYAAEVASAIGYLHSLNIIYRDLKPENILLDCQGHVVLXDFGLCKEGVEPEDXXSXFCGXPEYLAPEVLRKEPYDRAVDWWCLGAVLYEMLHGLPPFYSQDVSQMYENILHQPLQIPGGRXVAACDLLQSLLHKDQRQRLGSKADFLEIKNHVFFSPINWDDLYHKRLXPPFNPNVXGPADLKHFDPEFXQEAVSKSIGCXPDXVASSSGASSAFLGFSYAPEDDDILDC

SEQ ID NO: 25133 - protein, 109 aa, Homo sapiens
  MOD_RES (76)..(76): Selenocysteine
  MOD_RES (93)..(93): Selenocysteine
MALKIPAKRIFGDNFDPDFIKQRRAGLNEFIQNLVRYPELYNHPDVRAFLQMDSPKHQSDPSEDEDERSSQKLHSXSQNINLGPSGNPHAKPXDFDFLKVIGKGSFGKV

SEQ ID NO: 25134 - protein, 166 aa, Homo sapiens
  MOD_RES (129)..(130): Selenocysteine
MALKIPAKRIFGDNFDPDFIKQRRAGLNEFIQNLVRYPELYNHPDVRAFLQMDSPKHQSDPSEDEDERSSQKVLLAKRKLDGKFYAVKVLQKKIVLNRKEQKHIMAERNVLLKNVKHPFLVGLHYSFQXXEKLYFVLDFVNGGELFFHLQRERSFPEHRARFYAAE

SEQ ID NO: 25135 - protein, 126 aa, Homo sapiens
  MOD_RES (25)..(25): Selenocysteine
  MOD_RES (42)..(42): Selenocysteine
  MOD_RES (114)..(115): Selenocysteine
MDSPKHQSDPSEDEDERSSQKLHSXSQNINLGPSGNPHAKPXDFDFLKVIGKGSFGKVLLAKRKLDGKFYAVKVLQKKIVLNRKEQKHIMAERNVLLKNVKHPFLVGLHYSFQXXEKLYFVLDFVN

SEQ ID NO: 25136 - protein, 128 aa, Homo sapiens
  MOD_RES (6)..(6): Selenocysteine
  MOD_RES (32)..(32): Selenocysteine
  MOD_RES (60)..(60): Selenocysteine
MQRDHXMDYKESCPSVSIPSSDEHREKKKRFXVYKVLVSVGRSEWFVFRRYAEFDKLYNXLKKQFPAMALKIPAKRIFGDNFDPDFIKQRRAGLNEFIQNLVRYPELYNHPDVRAFLQMDSPKHQSDP

SEQ ID NO: 25137 - protein, 464 aa, Homo sapiens
  MOD_RES (6)..(6): Selenocysteine
  MOD_RES (32)..(32): Selenocysteine
  MOD_RES (60)..(60): Selenocysteine
  MOD_RES (143)..(143): Selenocysteine
  MOD_RES (160)..(160): Selenocysteine
  MOD_RES (232)..(233): Selenocysteine
  MOD_RES (303)..(303): Selenocysteine
  MOD_RES (317)..(320): Selenocysteine
  MOD_RES (324)..(324): Selenocysteine
  MOD_RES (355)..(355): Selenocysteine
  MOD_RES (419)..(419): Selenocysteine
  MOD_RES (422)..(422): Selenocysteine
  MOD_RES (425)..(425): Selenocysteine
MQRDHXMDYKESCPSVSIPSSDEHREKKKRFXVYKVLVSVGRSEWFVFRRYAEFDKLYNXLKKQFPAMALKIPAKRIFGDNFDPDFIKQRRAGLNEFIQNLVRYPELYNHPDVRAFLQMDSPKHQSDPSEDEDERSSQKLHSXSQNINLGPSGNPHAKPXDFDFLKVIGKGSFGKVLLAKRKLDGKFYAVKVLQKKIVLNRKEQKHIMAERNVLLKNVKHPFLVGLHYSFQXXEKLYFVLDFVNGGELFFHLQRERSFPEHRARFYAAEIASALGYLHSIKIVYRDLKPENILLDSVGHVVLXDFGLCKEGIAISDXXXXFCGXPEPPFYCRDVAEMYDNILHKPLSLRPGVSLXAWSILEELLEKDRQNRLGAKEDFLEIQNHPFFESLSWADLVQKKIPPPFNPNVAGPDDIRNFDXAFXEEXVPYSVCVSSDYSIVNASVLEADDAFVGFSYAPPSEDLFL

SEQ ID NO: 25138 - protein, 496 aa, Homo sapiens
  MOD_RES (6)..(6): Selenocysteine
  MOD_RES (32)..(32): Selenocysteine
  MOD_RES (60)..(60): Selenocysteine
  MOD_RES (143)..(143): Selenocysteine
  MOD_RES (160)..(160): Selenocysteine
  MOD_RES (232)..(233): Selenocysteine
  MOD_RES (303)..(303): Selenocysteine
  MOD_RES (317)..(320): Selenocysteine
  MOD_RES (324)..(324): Selenocysteine
  MOD_RES (341)..(341): Selenocysteine
  MOD_RES (387)..(387): Selenocysteine
  MOD_RES (451)..(451): Selenocysteine
  MOD_RES (454)..(454): Selenocysteine
  MOD_RES (457)..(457): Selenocysteine
MQRDHXMDYKESCPSVSIPSSDEHREKKKRFXVYKVLVSVGRSEWFVFRRYAEFDKLYNXLKKQFPAMALKIPAKRIFGDNFDPDFIKQRRAGLNEFIQNLVRYPELYNHPDVRAFLQMDSPKHQSDPSEDEDERSSQKLHSXSQNINLGPSGNPHAKPXDFDFLKVIGKGSFGKVLLAKRKLDGKFYAVKVLQKKIVLNRKEQKHIMAERNVLLKNVKHPFLVGLHYSFQXXEKLYFVLDFVNGGELFFHLQRERSFPEHRARFYAAEIASALGYLHSIKIVYRDLKPENILLDSVGHVVLXDFGLCKEGIAISDXXXXFCGXPEYLAPEVIRKQPYDNXVDWWCLGAVLYEMLYGLPPFYCRDVAEMYDNILHKPLSLRPGVSLXAWSILEELLEKDRQNRLGAKEDFLEIQNHPFFESLSWADLVQKKIPPPFNPNVAGPDDIRNFDXAFXEEXVPYSVCVSSDYSIVNASVLEADDAFVGFSYAPPSEDLFL

SEQ ID NO: 25139 - protein, 149 aa, Homo sapiens
  MOD_RES (6)..(6): Selenocysteine
  MOD_RES (32)..(32): Selenocysteine
  MOD_RES (60)..(60): Selenocysteine
MQRDHXMDYKESCPSVSIPSSDEHREKKKRFXVYKVLVSVGRSEWFVFRRYAEFDKLYNXLKKQFPAMALKIPAKRIFGDNFDPDFIKQRRAGLNEFIQNLVRYPELYNHPDVRAFLQMDSPKHQSDPSEDEDERSSQKVLLAKRKLDG

SEQ ID NO: 25140 - protein, 12 aa, Homo sapiens
LWLIQWLLLKYK

SEQ ID NO: 25141 - protein, 241 aa, Homo sapiens
  MOD_RES (32)..(32): Selenocysteine
  MOD_RES (40)..(40): Selenocysteine
  MOD_RES (66)..(66): Selenocysteine
  MOD_RES (93)..(93): Selenocysteine
  MOD_RES (135)..(135): Selenocysteine
  MOD_RES (149)..(150): Selenocysteine
  MOD_RES (172)..(172): Selenocysteine
MKEVVYWSPKKVADWLLENAMPEYCEPLEHFXGQDLINLXQEDFKKPPLCRVSSDNGQRLLDMIEXLKMEHHLEAHKNGHANGHLNIGVDIPXPDGSFSIKIKPNGMPNGYRKEMIKIPMPELERSQYPMEWGKXFLAFLYALSCFVLXXVMISVVHERVPPKEVQPPLPDXFFDHFNRVQWAFSICEINGMILVGLWLIQWLLLKYKDVGNESRVVMIFLSIVHPVLLLGSIAGFLSLSL

SEQ ID NO: 25142 - protein, 413 aa, Homo sapiens
  MOD_RES (32)..(32): Selenocysteine
  MOD_RES (40)..(40): Selenocysteine
  MOD_RES (66)..(66): Selenocysteine
  MOD_RES (93)..(93): Selenocysteine
  MOD_RES (135)..(135): Selenocysteine
  MOD_RES (149)..(150): Selenocysteine
  MOD_RES (172)..(172): Selenocysteine
  MOD_RES (221)..(221): Selenocysteine
  MOD_RES (229)..(229): Selenocysteine
  MOD_RES (233)..(234): Selenocysteine
  MOD_RES (271)..(271): Selenocysteine
  MOD_RES (286)..(286): Selenocysteine
  MOD_RES (290)..(290): Selenocysteine
  MOD_RES (292)..(292): Selenocysteine
  MOD_RES (330)..(330): Selenocysteine
  MOD_RES (340)..(341): Selenocysteine
  MOD_RES (349)..(349): Selenocysteine
  MOD_RES (413)..(413): Selenocysteine
MKEVVYWSPKKVADWLLENAMPEYCEPLEHFXGQDLINLXQEDFKKPPLCRVSSDNGQRLLDMIEXLKMEHHLEAHKNGHANGHLNIGVDIPXPDGSFSIKIKPNGMPNGYRKEMIKIPMPELERSQYPMEWGKXFLAFLYALSCFVLXXVMISVVHERVPPKEVQPPLPDXFFDHFNRVQWAFSICEINGMILVGLWLIQWLLLKYKSIISRRFFCIVGXLYLYRCIXMYVXXLPVPGMHFNCSPKLFGDWEAQLRRIMKLIAGGGLSIXGSHNMCGDYLYSGHXVMLXLXYLFIKEYSPRRLWWYHWICWLLSVVGIFCILLAHDHYXVDVVVAYYIXXRLFWWYHXMANQQVLKEASQMNLLARVWWYRPFQYFEKNVQGIVPRSYHWPFPWPVVHLSRQVKYSRLVNDX

SEQ ID NO: 25143 - protein, 219 aa, Homo sapiens
  MOD_RES (32)..(32): Selenocysteine
  MOD_RES (40)..(40): Selenocysteine
  MOD_RES (66)..(66): Selenocysteine
  MOD_RES (93)..(93): Selenocysteine
  MOD_RES (135)..(135): Selenocysteine
  MOD_RES (149)..(150): Selenocysteine
  MOD_RES (172)..(172): Selenocysteine
  MOD_RES (212)..(212): Selenocysteine
MKEVVYWSPKKVADWLLENAMPEYCEPLEHFXGQDLINLXQEDFKKPPLCRVSSDNGQRLLDMIEXLKMEHHLEAHKNGHANGHLNIGVDIPXPDGSFSIKIKPNGMPNGYRKEMIKIPMPELERSQYPMEWGKXFLAFLYALSCFVLXXVMISVVHERVPPKEVQPPLPDXFFDHFNRVQWAFSICEINGMILVGLWLIQWLLLKYNFSEXGKPNCEE

SEQ ID NO: 25144 - protein, 36 aa, Homo sapiens
  MOD_RES (4)..(5): Selenocysteine
MYVXXLPVPGMHFNCSPKLFGDWEAQLRRIMKLIAG

SEQ ID NO: 25145 - protein, 202 aa, Homo sapiens
  MOD_RES (7)..(7): Selenocysteine
  MOD_RES (18)..(18): Selenocysteine
  MOD_RES (33)..(33): Selenocysteine
  MOD_RES (61)..(61): Selenocysteine
  MOD_RES (78)..(78): Selenocysteine
  MOD_RES (131)..(131): Selenocysteine
  MOD_RES (140)..(140): Selenocysteine
ILEVYSXKAKNYVNGHCXKYEPWQLIAWSVVWXLLIVWGYEFVFQPESLWSRFKKKCFKLXRKMPIIGRKIQDKLNKXKDDISKNMSFLKVDKEYVKALPSQGLSSSAVLEKLKEYSSMDAFWQEGRASGXVYSGEEKLXELLVKAYGDFAWSNPLHPDIFPGLRKIEAEIVRIACSLFNGGPDSCGCEALFLFCFSNMLAP

SEQ ID NO: 25146 - protein, 568 aa, Homo sapiens
  MOD_RES (4)..(4): Selenocysteine
  MOD_RES (24)..(24): Selenocysteine
  MOD_RES (35)..(35): Selenocysteine
  MOD_RES (50)..(50): Selenocysteine
  MOD_RES (78)..(78): Selenocysteine
  MOD_RES (95)..(95): Selenocysteine
  MOD_RES (148)..(148): Selenocysteine
  MOD_RES (157)..(157): Selenocysteine
  MOD_RES (207)..(207): Selenocysteine
  MOD_RES (211)..(211): Selenocysteine
  MOD_RES (232)..(232): Selenocysteine
  MOD_RES (262)..(262): Selenocysteine
  MOD_RES (280)..(280): Selenocysteine
  MOD_RES (287)..(287): Selenocysteine
  MOD_RES (345)..(345): Selenocysteine
  MOD_RES (351)..(351): Selenocysteine
  MOD_RES (380)..(380): Selenocysteine
  MOD_RES (391)..(391): Selenocysteine
  MOD_RES (420)..(420): Selenocysteine
  MOD_RES (426)..(426): Selenocysteine
  MOD_RES (468)..(468): Selenocysteine
  MOD_RES (488)..(488): Selenocysteine
  MOD_RES (509)..(509): Selenocysteine
  MOD_RES (519)..(520): Selenocysteine
  MOD_RES (531)..(532): Selenocysteine
  MOD_RES (552)..(552): Selenocysteine
  MOD_RES (554)..(554): Selenocysteine
  MOD_RES (556)..(556): Selenocysteine
MPSXDLLMLKAFEPYLEILEVYSXKAKNYVNGHCXKYEPWQLIAWSVVWXLLIVWGYEFVFQPESLWSRFKKKCFKLXRKMPIIGRKIQDKLNKXKDDISKNMSFLKVDKEYVKALPSQGLSSSAVLEKLKEYSSMDAFWQEGRASGXVYSGEEKLXELLVKAYGDFAWSNPLHPDIFPGLRKIEAEIVRIACSLFNGGPDSCGCVXSGGXESILMACKAYRDLAFEKGIKXPEIVAPQSAHAAFNKAASYFGMKIVRVPLXKMMEVDVRAMRRAISRNXAMLVCSXPQFPHGVIDPVPEVAKLAVKYKIPLHVDACLGGFLIVFMEKAGYPLEHPFDFRVKGVXSISADXHKYGYAPKGSSLVLYSDKKYRNYQFFVDXDWQGGIYASPXIAGSRPGGISAACWAALMHFGENGYVEAXKQIIKXARFLKSELENIKGIFVFGNPQLSVIALGSRDFDIYRLSNLMXAKGWNLNQLQFPPSIHFCIXLLHARKRVAIQFLKDIRESVXQIMKNPKAKXXGMGAIYGMAQXXVDRNMVAELSSVFLDSLYSXDXVXQGSQMNGSPKPH

SEQ ID NO: 25147 - protein, 135 aa, Homo sapiens
  MOD_RES (1)..(1): Any amino acid
  MOD_RES (9)..(9): Selenocysteine
  MOD_RES (62)..(62): Selenocysteine
  MOD_RES (71)..(71): Selenocysteine
XIQDKLNKXKDDISKNMSFLKVDKEYVKALPSQGLSSSAVLEKLKEYSSMDAFWQEGRASGXVYSGEEKLXELLVKAYGDFAWSNPLHPDIFPGLRKIEAEIVRIACSLFNGGPDSCGCVSICKGHPIALFFRLK

SEQ ID NO: 25148 - protein, 441 aa, Homo sapiens
  MOD_RES (114)..(114): Selenocysteine
  MOD_RES (136)..(136): Selenocysteine
  MOD_RES (177)..(177): Selenocysteine
  MOD_RES (207)..(207): Selenocysteine
  MOD_RES (213)..(213): Selenocysteine
  MOD_RES (223)..(223): Selenocysteine
  MOD_RES (267)..(267): Selenocysteine
  MOD_RES (287)..(287): Selenocysteine
  MOD_RES (308)..(308): Selenocysteine
  MOD_RES (311)..(311): Selenocysteine
  MOD_RES (314)..(314): Selenocysteine
  MOD_RES (319)..(319): Selenocysteine
  MOD_RES (336)..(336): Selenocysteine
  MOD_RES (349)..(349): Selenocysteine
  MOD_RES (358)..(358): Selenocysteine
  MOD_RES (360)..(360): Selenocysteine
  MOD_RES (387)..(387): Selenocysteine
  MOD_RES (419)..(419): Selenocysteine
  MOD_RES (428)..(428): Selenocysteine
MSLRQRLAQLVGRLQDPQKVARFQRLCGVEAPPRRSADRREDEKAEAPLAGDPRLRGRQPGAPGGPQPPGSDRNQCPAKPDGGGAPNGVRNGLAAELGPASPRRAGALRRNSLXGEEGQLARVSNWPLYCLFCFGXELGNELFYILFFPFWIWNLDPLVGRRLVVIWVLVMYLGQCXKDIIRWPRPASPPVVKLEVFYNSEYSMPSXHAMSGXAIPISMVLLXYGRWQYPLIYGLILIPCWCSLVCLSRIYMGMHSILDIIAGFLYXILILAVFYPFVDLIDNFNQXHKYAPFIIIGLHLALGIFSFXLDXWSXSRGDXAEILGSGAGIACGSHVXYNMGLVLDPSLDXLPLAGPPIXVXLFGKAILRILIGMVFVLIIRDVMKKIXIPLACKIFNIPCDDIRKARQHMEVELPYRYIXYGMVGFSIXFFVPYIFFFIGIS

SEQ ID NO: 25149 - protein, 253 aa, Homo sapiens
  MOD_RES (17)..(17): Selenocysteine
  MOD_RES (26)..(26): Selenocysteine
  MOD_RES (86)..(86): Selenocysteine
  MOD_RES (99)..(99): Selenocysteine
  MOD_RES (137)..(137): Selenocysteine
  MOD_RES (172)..(173): Selenocysteine
  MOD_RES (179)..(179): Selenocysteine
  MOD_RES (210)..(210): Selenocysteine
  MOD_RES (216)..(216): Selenocysteine
  MOD_RES (246)..(246): Selenocysteine
MEDAPQRLRWQAHLEFXHNHDVGDLXWDKIAVSLPRSEKLRSLVLAGIPHGMRPQLWMRLSGALQKKRNSELSYREIVKNSSNDEXIAAKQIEKDLLRXMPSNACFASMGSIGVPRLRRVLRALAWLYPEIGYCQGXGMVAACLLLFLEEEDAFWMMSAIIEDLLPASYFSXXLLGVQXDQRVLRHLIVQYLPRLDKLLQEHDIELSLIXLHWFLXAFASVVDIKLLLRIWDLFFYEGSRVLFQLXLGMLHLK

SEQ ID NO: 25150 - protein, 749 aa, Homo sapiens
  MOD_RES (6)..(6): Selenocysteine
  MOD_RES (16)..(16): Selenocysteine
  MOD_RES (29)..(29): Selenocysteine
  MOD_RES (84)..(84): Selenocysteine
  MOD_RES (93)..(93): Selenocysteine
  MOD_RES (153)..(153): Selenocysteine
  MOD_RES (166)..(166): Selenocysteine
  MOD_RES (204)..(204): Selenocysteine
  MOD_RES (239)..(240): Selenocysteine
  MOD_RES (246)..(246): Selenocysteine
  MOD_RES (277)..(277): Selenocysteine
  MOD_RES (283)..(283): Selenocysteine
  MOD_RES (313)..(313): Selenocysteine
  MOD_RES (336)..(336): Selenocysteine
  MOD_RES (362)..(362): Selenocysteine
  MOD_RES (368)..(368): Selenocysteine
  MOD_RES (389)..(389): Selenocysteine
  MOD_RES (391)..(391): Selenocysteine
  MOD_RES (401)..(401): Selenocysteine
  MOD_RES (407)..(407): Selenocysteine
  MOD_RES (409)..(409): Selenocysteine
  MOD_RES (429)..(429): Selenocysteine
  MOD_RES (449)..(449): Selenocysteine
  MOD_RES (459)..(459): Selenocysteine
  MOD_RES (508)..(508): Selenocysteine
  MOD_RES (553)..(553): Selenocysteine
  MOD_RES (557)..(557): Selenocysteine
  MOD_RES (563)..(563): Selenocysteine
  MOD_RES (616)..(616): Selenocysteine
  MOD_RES (627)..(627): Selenocysteine
  MOD_RES (642)..(642): Selenocysteine
  MOD_RES (680)..(680): Selenocysteine
MSGSHXPACGPFSALXPSIWPQEILAKYXQKEESAEQPEFYYDEFGFRVYKEEGDEPGSSLLANSPLMEDAPQRLRWQAHLEFXHNHDVGDLXWDKIAVSLPRSEKLRSLVLAGIPHGMRPQLWMRLSGALQKKRNSELSYREIVKNSSNDEXIAAKQIEKDLLRXMPSNACFASMGSIGVPRLRRVLRALAWLYPEIGYCQGXGMVAACLLLFLEEEDAFWMMSAIIEDLLPASYFSXXLLGVQXDQRVLRHLIVQYLPRLDKLLQEHDIELSLIXLHWFLXAFASVVDIKLLLRIWDLFFYEGSRVLFQLXLGMLHLKEEELIQSENSASIFNXLSDIPSQMEDAELLLGVAMRLAGSLXDVAVEXQRRKHLAYLIADQGQLLGAGXLXNLSQVVRRRXQRRKSXIXALLFGEDDLEALKAKNIKQXELVADLREAILRVARHFQCXDPKNCSVELXPDYSMESHQRDHENYVACSRSHRRRAKALLDFERHDDDELGFRKNDIIXIVSQKDEHCWVGELNGLRGWFPAKFVEVLDERSKEYSIAGDDSVXEGVXDLVRGXLCPALKALFEHGLKKPSLLGGACHPWLFIEEAAGREVERDFASVYSRLVLCKXFRLDEDGKVLXPEELLYRAVQSVNVXHDAVHAQMDVKLRSLICVGLNEQVLHLWLEVLCSSLPXVEKWYQPWSFLRSPGWVQIKCELRVLCCFAFSLSQDWELPAKREAQQPLKEGVRDMLVKHHLFSWDVDG

SEQ ID NO: 25151 - protein, 212 aa, Homo sapiens
  MOD_RES (2)..(2): Selenocysteine
  MOD_RES (8)..(8): Selenocysteine
  MOD_RES (61)..(61): Selenocysteine
  MOD_RES (72)..(72): Selenocysteine
  MOD_RES (87)..(87): Selenocysteine
  MOD_RES (125)..(125): Selenocysteine
VXDLVRGXLCPALKALFEHGLKKPSLLGGACHPWLFIEEAAGREVERDFASVYSRLVLCKXFRLDEDGKVLXPEELLYRAVQSVNVXHDAVHAQMDVKLRSLICVGLNEQVLHLWLEVLCSSLPXVEKWYQPWSFLRSPGWVQIKCELRVLCCFAFSLSQDWELPAKREVGGVGLVGPALMELPKPFAGWLRWEPEVLVSAVRNYPSHAQGL

SEQ ID NO: 25152 - protein, 102 aa, Homo sapiens
  MOD_RES (1)..(1): Any amino acid
  MOD_RES (10)..(10): Selenocysteine
  MOD_RES (25)..(25): Selenocysteine
XLDEDGKVLXPEELLYRAVQSVNVXHDAVHAQMDVKLRSLICVGLNPGWVQIKCELRVLCCFAFSLSQDWELPAKREAQQPLKEGVRDMLVKHHLFSWDVDG

SEQ ID NO: 25153 - protein, 373 aa, Homo sapiens
  MOD_RES (17)..(17): Selenocysteine
  MOD_RES (21)..(23): Selenocysteine
  MOD_RES (33)..(33): Selenocysteine
  MOD_RES (48)..(48): Selenocysteine
  MOD_RES (73)..(73): Selenocysteine
  MOD_RES (79)..(79): Selenocysteine
  MOD_RES (86)..(86): Selenocysteine
  MOD_RES (90)..(90): Selenocysteine
  MOD_RES (94)..(94): Selenocysteine
  MOD_RES (174)..(174): Selenocysteine
  MOD_RES (176)..(176): Selenocysteine
  MOD_RES (189)..(189): Selenocysteine
  MOD_RES (192)..(192): Selenocysteine
  MOD_RES (194)..(194): Selenocysteine
  MOD_RES (233)..(233): Selenocysteine
  MOD_RES (236)..(236): Selenocysteine
  MOD_RES (249)..(249): Selenocysteine
  MOD_RES (257)..(257): Selenocysteine
  MOD_RES (358)..(358): Selenocysteine
  MOD_RES (372)..(372): Selenocysteine
MAEASRPRLSIPCSSIXDVRXXXALEMPDRENXFVVKVEGPSEYIMEXVDAQHVKAWVSDIQECLSPGPCPAXSPRPMXLPLAPGXSFLXRENXDSLELSCLNHSESLPSQDLLLGPSESNDRLSQGAYGGLSDRPSASISPSSASIAASHFDSMELLPPELPPRIPIEEGPPXGXVHPLSAPYPPLDXPEXAXGSFLFQGEPEGGEGDQPLSGYPWFHGMLSRLKAAQLVLXGGXGSHGVFLVRQSEXRRGEYVLXFNFQGKAKHLRLSLNEEGQCRVQHLWFQSIFDMLEHFRVHPIPLESGGSSDVVLVSYVPSSQRQQGEQSRSAGEEVPVHPRSEAGSRLGAMRGCAREMDAXPMPPAPSCPSERVXV

SEQ ID NO: 25154 - protein, 57 aa, Homo sapiens
MNGAPSPEDGASPSSPPLPPPPPPSWREFCESHARAAALDFARRFRLYLASHPQYAG

SEQ ID NO: 25155 - protein, 63 aa, Homo sapiens
MNGAPSPEDGASPSSPPLPPPPPPSWREFCESHARAAALDFARRFRLYLASHPQYAGPGAEAA

SEQ ID NO: 25156 - protein, 671 aa, Homo sapiens
  MOD_RES (142)..(143): Selenocysteine
  MOD_RES (175)..(175): Selenocysteine
  MOD_RES (187)..(187): Selenocysteine
  MOD_RES (208)..(208): Selenocysteine
  MOD_RES (218)..(218): Selenocysteine
  MOD_RES (225)..(225): Selenocysteine
  MOD_RES (327)..(327): Selenocysteine
  MOD_RES (331)..(333): Selenocysteine
  MOD_RES (343)..(343): Selenocysteine
  MOD_RES (358)..(358): Selenocysteine
  MOD_RES (383)..(383): Selenocysteine
  MOD_RES (389)..(389): Selenocysteine
  MOD_RES (396)..(396): Selenocysteine
  MOD_RES (400)..(400): Selenocysteine
  MOD_RES (404)..(404): Selenocysteine
  MOD_RES (484)..(484): Selenocysteine
  MOD_RES (486)..(486): Selenocysteine
  MOD_RES (499)..(499): Selenocysteine
  MOD_RES (502)..(502): Selenocysteine
  MOD_RES (504)..(504): Selenocysteine
  MOD_RES (543)..(543): Selenocysteine
  MOD_RES (546)..(546): Selenocysteine
  MOD_RES (559)..(559): Selenocysteine
  MOD_RES (567)..(567): Selenocysteine
  MOD_RES (656)..(656): Selenocysteine
  MOD_RES (667)..(667): Selenocysteine
MNGAPSPEDGASPSSPPLPPPPPPSWREFCESHARAAALDFARRFRLYLASHPQYAGPGAEAAFSRRFAELFLQHFEAEVARASGSLSPPILAPLSPGAEISPHDLSLESCRVGGPLAVLGPSRSSEDLAGPLPSSVSSSSXXSSKPKLKKRFSLRSVGRSVRGSVRGILQWRGXVDPPSSAGPLEXSSGPPVLGGNSNSNSSGGAGXVGRGLVSDGXSPGERWXHRFERLRLSRGGGALKDGAGMVQREELLSFMGAEEAAPDPAGVGRGGGVAGPPSGGGGQPQWQKCRLLLRSEGEGGGGSRLEFFVPPKASRPRLSIPCSSIXDVRXXXALEMPDRENXFVVKVEGPSEYIMEXVDAQHVKAWVSDIQECLSPGPCPAXSPRPMXLPLAPGXSFLXRENXDSLELSCLNHSESLPSQDLLLGPSESNDRLSQGAYGGLSDRPSASISPSSASIAASHFDSMELLPPELPPRIPIEEGPPXGXVHPLSAPYPPLDXPEXAXGSFLFQGEPEGGEGDQPLSGYPWFHGMLSRLKAAQLVLXGGXGSHGVFLVRQSEXRRGEYVLXFNFQGKAKHLRLSLNEEGQCRVQHLWFQSIFDMLEHFRVHPIPLESGGSSDVVLVSYVPSSQRQQGREQAGSHAGVCEGDGCHPDASCXLMPFGASDCVXDHLP

SEQ ID NO: 25157 - protein, 683 aa, Homo sapiens
  MOD_RES (142)..(143): Selenocysteine
  MOD_RES (175)..(175): Selenocysteine
  MOD_RES (187)..(187): Selenocysteine
  MOD_RES (208)..(208): Selenocysteine
  MOD_RES (218)..(218): Selenocysteine
  MOD_RES (225)..(225): Selenocysteine
  MOD_RES (327)..(327): Selenocysteine
  MOD_RES (331)..(333): Selenocysteine
  MOD_RES (343)..(343): Selenocysteine
  MOD_RES (358)..(358): Selenocysteine
  MOD_RES (383)..(383): Selenocysteine
  MOD_RES (389)..(389): Selenocysteine
  MOD_RES (396)..(396): Selenocysteine
  MOD_RES (400)..(400): Selenocysteine
  MOD_RES (404)..(404): Selenocysteine
  MOD_RES (484)..(484): Selenocysteine
  MOD_RES (486)..(486): Selenocysteine
  MOD_RES (499)..(499): Selenocysteine
  MOD_RES (502)..(502): Selenocysteine
  MOD_RES (504)..(504): Selenocysteine
  MOD_RES (543)..(543): Selenocysteine
  MOD_RES (546)..(546): Selenocysteine
  MOD_RES (559)..(559): Selenocysteine
  MOD_RES (567)..(567): Selenocysteine
  MOD_RES (668)..(668): Selenocysteine
  MOD_RES (682)..(682): Selenocysteine
MNGAPSPEDGASPSSPPLPPPPPPSWREFCESHARAAALDFARRFRLYLASHPQYAGPGAEAAFSRRFAELFLQHFEAEVARASGSLSPPILAPLSPGAEISPHDLSLESCRVGGPLAVLGPSRSSEDLAGPLPSSVSSSSXXSSKPKLKKRFSLRSVGRSVRGSVRGILQWRGXVDPPSSAGPLEXSSGPPVLGGNSNSNSSGGAGXVGRGLVSDGXSPGERWXHRFERLRLSRGGGALKDGAGMVQREELLSFMGAEEAAPDPAGVGRGGGVAGPPSGGGGQPQWQKCRLLLRSEGEGGGGSRLEFFVPPKASRPRLSIPCSSIXDVRXXXALEMPDRENXFVVKVEGPSEYIMEXVDAQHVKAWVSDIQECLSPGPCPAXSPRPMXLPLAPGXSFLXRENXDSLELSCLNHSESLPSQDLLLGPSESNDRLSQGAYGGLSDRPSASISPSSASIAASHFDSMELLPPELPPRIPIEEGPPXGXVHPLSAPYPPLDXPEXAXGSFLFQGEPEGGEGDQPLSGYPWFHGMLSRLKAAQLVLXGGXGSHGVFLVRQSEXRRGEYVLXFNFQGKAKHLRLSLNEEGQCRVQHLWFQSIFDMLEHFRVHPIPLESGGSSDVVLVSYVPSSQRQQGEQSRSAGEEVPVHPRSEAGSRLGAMRGCAREMDAXPMPPAPSCPSERVXV

SEQ ID NO: 25158 - protein, 756 aa, Homo sapiens
  MOD_RES (142)..(143): Selenocysteine
  MOD_RES (175)..(175): Selenocysteine
  MOD_RES (187)..(187): Selenocysteine
  MOD_RES (208)..(208): Selenocysteine
  MOD_RES (218)..(218): Selenocysteine
  MOD_RES (225)..(225): Selenocysteine
  MOD_RES (327)..(327): Selenocysteine
  MOD_RES (331)..(333): Selenocysteine
  MOD_RES (343)..(343): Selenocysteine
  MOD_RES (358)..(358): Selenocysteine
  MOD_RES (383)..(383): Selenocysteine
  MOD_RES (389)..(389): Selenocysteine
  MOD_RES (396)..(396): Selenocysteine
  MOD_RES (400)..(400): Selenocysteine
  MOD_RES (404)..(404): Selenocysteine
  MOD_RES (484)..(484): Selenocysteine
  MOD_RES (486)..(486): Selenocysteine
  MOD_RES (499)..(499): Selenocysteine
  MOD_RES (502)..(502): Selenocysteine
  MOD_RES (504)..(504): Selenocysteine
  MOD_RES (543)..(543): Selenocysteine
  MOD_RES (546)..(546): Selenocysteine
  MOD_RES (559)..(559): Selenocysteine
  MOD_RES (567)..(567): Selenocysteine
  MOD_RES (635)..(636): Selenocysteine
  MOD_RES (650)..(650): Selenocysteine
MNGAPSPEDGASPSSPPLPPPPPPSWREFCESHARAAALDFARRFRLYLASHPQYAGPGAEAAFSRRFAELFLQHFEAEVARASGSLSPPILAPLSPGAEISPHDLSLESCRVGGPLAVLGPSRSSEDLAGPLPSSVSSSSXXSSKPKLKKRFSLRSVGRSVRGSVRGILQWRGXVDPPSSAGPLEXSSGPPVLGGNSNSNSSGGAGXVGRGLVSDGXSPGERWXHRFERLRLSRGGGALKDGAGMVQREELLSFMGAEEAAPDPAGVGRGGGVAGPPSGGGGQPQWQKCRLLLRSEGEGGGGSRLEFFVPPKASRPRLSIPCSSIXDVRXXXALEMPDRENXFVVKVEGPSEYIMEXVDAQHVKAWVSDIQECLSPGPCPAXSPRPMXLPLAPGXSFLXRENXDSLELSCLNHSESLPSQDLLLGPSESNDRLSQGAYGGLSDRPSASISPSSASIAASHFDSMELLPPELPPRIPIEEGPPXGXVHPLSAPYPPLDXPEXAXGSFLFQGEPEGGEGDQPLSGYPWFHGMLSRLKAAQLVLXGGXGSHGVFLVRQSEXRRGEYVLXFNFQGKAKHLRLSLNEEGQCRVQHLWFQSIFDMLEHFRVHPIPLESGGSSDVVLVSYVPSSQRQQEPXXSHDPPQPPEPPSWXDPPQPGAEEASRAPEVAAAAAAAAKERQEKEKAGGGGVPEELVPVVELVPVVELEEAIAPGSEAQGAGSGGDAGVPPMVQLQQSPLGGDGEEGGHPRAINNQYSFV

SEQ ID NO: 25159 - protein, 122 aa, Homo sapiens
  MOD_RES (7)..(7): Selenocysteine
  MOD_RES (22)..(22): Selenocysteine
  MOD_RES (45)..(45): Selenocysteine
MPDRENXFVVKVEGPSEYIMEXVDAQHVKAWVSDIQECLSPGENXDSLELSCLNHSESLPSQDLLLGPSESNDRLSQGAYGGLSDRPSASISPSSASIAASHFDSMELLPPELPPRIPIEEG

SEQ ID NO: 25160 - protein, 335 aa, Homo sapiens
  MOD_RES (7)..(7): Selenocysteine
  MOD_RES (22)..(22): Selenocysteine
  MOD_RES (47)..(47): Selenocysteine
  MOD_RES (53)..(53): Selenocysteine
  MOD_RES (60)..(60): Selenocysteine
  MOD_RES (64)..(64): Selenocysteine
  MOD_RES (68)..(68): Selenocysteine
  MOD_RES (148)..(148): Selenocysteine
  MOD_RES (150)..(150): Selenocysteine
  MOD_RES (163)..(163): Selenocysteine
  MOD_RES (166)..(166): Selenocysteine
  MOD_RES (168)..(168): Selenocysteine
  MOD_RES (207)..(207): Selenocysteine
  MOD_RES (210)..(210): Selenocysteine
  MOD_RES (223)..(223): Selenocysteine
  MOD_RES (231)..(231): Selenocysteine
  MOD_RES (320)..(320): Selenocysteine
  MOD_RES (331)..(331): Selenocysteine
MPDRENXFVVKVEGPSEYIMEXVDAQHVKAWVSDIQECLSPGPCPAXSPRPMXLPLAPGXSFLXRENXDSLELSCLNHSESLPSQDLLLGPSESNDRLSQGAYGGLSDRPSASISPSSASIAASHFDSMELLPPELPPRIPIEEGPPXGXVHPLSAPYPPLDXPEXAXGSFLFQGEPEGGEGDQPLSGYPWFHGMLSRLKAAQLVLXGGXGSHGVFLVRQSEXRRGEYVLXFNFQGKAKHLRLSLNEEGQCRVQHLWFQSIFDMLEHFRVHPIPLESGGSSDVVLVSYVPSSQRQQGREQAGSHAGVCEGDGCHPDASCXLMPFGASDCVXDHLP

SEQ ID NO: 25161 - protein, 18 aa, Homo sapiens
  MOD_RES (2)..(2): Selenocysteine
  MOD_RES (9)..(9): Selenocysteine
  MOD_RES (13)..(13): Selenocysteine
  MOD_RES (17)..(17): Selenocysteine
MXLPLAPGXSFLXRENXD

SEQ ID NO: 25162 - protein, 182 aa, Homo sapiens
  MOD_RES (7)..(7): Selenocysteine
  MOD_RES (18)..(20): Selenocysteine
  MOD_RES (30)..(30): Selenocysteine
  MOD_RES (45)..(45): Selenocysteine
  MOD_RES (70)..(70): Selenocysteine
  MOD_RES (76)..(76): Selenocysteine
  MOD_RES (83)..(83): Selenocysteine
  MOD_RES (87)..(87): Selenocysteine
  MOD_RES (91)..(91): Selenocysteine
  MOD_RES (171)..(171): Selenocysteine
  MOD_RES (173)..(173): Selenocysteine
SAGPLEXSSGPPVLDVRXXXALEMPDRENXFVVKVEGPSEYIMEXVDAQHVKAWVSDIQECLSPGPCPAXSPRPMXLPLAPGXSFLXRENXDSLELSCLNHSESLPSQDLLLGPSESNDRLSQGAYGGLSDRPSASISPSSASIAASHFDSMELLPPELPPRIPIEEGPPXGXVHPLSAPYP

SEQ ID NO: 25163 - protein, 114 aa, Homo sapiens
  MOD_RES (1)..(1): Any amino acid
  MOD_RES (5)..(5): Selenocysteine
  MOD_RES (13)..(13): Selenocysteine
XQSEXRRGEYVLXFNFQGKAKHLRLSLNEEGQCRVQHLWFQSIFDMLEHFRVHPIPLESGGSSDVVLVSYVPSSQRQQGEQSRSAGEEVPVHPRSEVCVPERWGGEGGLSQGEA

SEQ ID NO: 25164 - protein, 200 aa, Homo sapiens
  MOD_RES (1)..(1): Any amino acid
  MOD_RES (18)..(18): Selenocysteine
  MOD_RES (21)..(21): Selenocysteine
  MOD_RES (34)..(34): Selenocysteine
  MOD_RES (42)..(42): Selenocysteine
  MOD_RES (132)..(132): Selenocysteine
XWFHGMLSRLKAAQLVLXGGXGSHGVFLVRQSEXRRGEYVLXFNFQGKAKHLRLSLNEEGQCRVQHLWFQSIFDMLEHFRVHPIPLESGGSSDVVLVSYVPSSQRQQGEQSRSAGEEVPVHPRSENRPPPMXHPSPLNPLHGQIPHSLGQKRRRGRQKWRQQQPQQPKRGKRKRKRAVEGSRKSWSPWLSWSPWLNWKRP

SEQ ID NO: 25165 - protein, 675 aa, Homo sapiens
  MOD_RES (41)..(41): Selenocysteine
  MOD_RES (97)..(97): Selenocysteine
  MOD_RES (129)..(130): Selenocysteine
  MOD_RES (147)..(147): Selenocysteine
  MOD_RES (166)..(166): Selenocysteine
  MOD_RES (170)..(170): Selenocysteine
  MOD_RES (211)..(211): Selenocysteine
  MOD_RES (219)..(219): Selenocysteine
  MOD_RES (227)..(227): Selenocysteine
  MOD_RES (304)..(305): Selenocysteine
  MOD_RES (316)..(316): Selenocysteine
  MOD_RES (331)..(331): Selenocysteine
  MOD_RES (357)..(357): Selenocysteine
  MOD_RES (362)..(362): Selenocysteine
  MOD_RES (380)..(380): Selenocysteine
  MOD_RES (391)..(392): Selenocysteine
  MOD_RES (399)..(399): Selenocysteine
  MOD_RES (420)..(420): Selenocysteine
  MOD_RES (424)..(424): Selenocysteine
  MOD_RES (438)..(438): Selenocysteine
  MOD_RES (445)..(445): Selenocysteine
  MOD_RES (464)..(464): Selenocysteine
  MOD_RES (492)..(492): Selenocysteine
  MOD_RES (500)..(500): Selenocysteine
  MOD_RES (539)..(539): Selenocysteine
  MOD_RES (553)..(553): Selenocysteine
  MOD_RES (570)..(570): Selenocysteine
  MOD_RES (652)..(652): Selenocysteine
MDPSYCPAHGFPSQDPLWPLSSQQWSSAHYSEPAAGGCDGXEAMNGAGPGPAAAAPVPVPVPVPDWRQFCELHAQAAAVDFAHKFCRFLRDNPAYDXPDAGASFSRHFAANFLDVFGEEVRRVLVAGPXXRGAAVSAEAMEPELADXSALKAAPYGHSRSSEDVSXHAAXKARVRKGFSLRNMSLCVVDGVRDMWHRRASPEPDAAAAPRXAEPRDKWXRRLRLSRXLAAKVELVDIQREGALRFMVADDAAAGSGGSAQWQKCRLLLRRAVAEERFRLEFFVPPKASRPKVSIPLSAIIEVRXXMPLEMPEKDNXFVLKVENGAEYILEXIDSLQKHSWVADIQGCVDPGDSEEDXELSCXRGGCLASRVASCSCELLXDAVDLPRPPEXXAVGAVVXAPHSRGRDAVRESLIHVPLEXFLQXLESPGGSGSDSNNXGEQGAEXDPEAEPELELSDYPWFHGXLSRVKAAQLVLAGGPRNHGLFVIRQSEXRPGEYVLXFNFQGKAKHLRLSLNGHGQCHVQHLWFQSVLDMLRHFHXHPIPLESGGSADIXLRSYVRAQDPPPEPGPXPPAAPASPACWSDSPGQHYFSSLAAAACPPASPSDAAGASSSSASSSSAASGPAPPRPVEGQLSARSRSNSAERLLEAVAAXAAEEPPEAAPGRARAVENQYSFY

SEQ ID NO: 25166 - protein, 47 aa, Homo sapiens
  MOD_RES (43)..(43): Selenocysteine
MDPSYCPAHGFPSQDPLWPLSSQQWSSAHYSEPGLQAQGQHPXVSHH

SEQ ID NO: 25167 - protein, 243 aa, Homo sapiens
  MOD_RES (54)..(54): Selenocysteine
  MOD_RES (86)..(87): Selenocysteine
  MOD_RES (104)..(104): Selenocysteine
  MOD_RES (123)..(123): Selenocysteine
  MOD_RES (127)..(127): Selenocysteine
  MOD_RES (168)..(168): Selenocysteine
  MOD_RES (176)..(176): Selenocysteine
  MOD_RES (184)..(184): Selenocysteine
MNGAGPGPAAAAPVPVPVPVPDWRQFCELHAQAAAVDFAHKFCRFLRDNPAYDXPDAGASFSRHFAANFLDVFGEEVRRVLVAGPXXRGAAVSAEAMEPELADXSALKAAPYGHSRSSEDVSXHAAXKARVRKGFSLRNMSLCVVDGVRDMWHRRASPEPDAAAAPRXAEPRDKWXRRLRLSRXLAAKVELVDIQREGALRFMVADDAAAGSGGSAQWQKCRLLLRRAVAEERFRLEFFVPPK

SEQ ID NO: 25168 - protein, 373 aa, Homo sapiens
  MOD_RES (13)..(13): Selenocysteine
  MOD_RES (62)..(62): Selenocysteine
  MOD_RES (72)..(72): Selenocysteine
  MOD_RES (81)..(81): Selenocysteine
  MOD_RES (104)..(104): Selenocysteine
  MOD_RES (111)..(111): Selenocysteine
  MOD_RES (125)..(125): Selenocysteine
  MOD_RES (133)..(133): Selenocysteine
  MOD_RES (153)..(153): Selenocysteine
  MOD_RES (194)..(194): Selenocysteine
  MOD_RES (202)..(202): Selenocysteine
  MOD_RES (217)..(217): Selenocysteine
  MOD_RES (272)..(272): Selenocysteine
  MOD_RES (371)..(371): Selenocysteine
MGFPVLCRGWRRXWPGCASWLGAPPPQKPLLSPLLLNHRSSKSSRPKLQAACSSIQEVRWCXRLEMPDNLYXFVLKVKDRXDIIFEVGDEQQLNSWMAELSECXGRGLESXEAEMHIPSALEPSXSSSPRGSXDSLNQGASPGGLLDPACQKXDHFLSCYPWFHGPISRVKAAQLVQLQGPDAHGVFLVRQSEXRRGEYVLXFNFQGIAKHLRLSLXERGQCRVQHLHFPSVVDMLHHFQRSPIPLECGAACDVRLSSYVVVVSQPPGSCNXVLFPFSLPHWDSESLPHWGSELGLPHLSSSGCPRGLSPEGLPGRSSPPEQIFHLVPSPEELANSLQHLEHEPVNRARDSDYEMDSSSRSHLRAIDNQYXPL

SEQ ID NO: 25169 - protein, 575 aa, Homo sapiens
  MOD_RES (68)..(68): Selenocysteine
  MOD_RES (92)..(92): Selenocysteine
  MOD_RES (159)..(159): Selenocysteine
  MOD_RES (165)..(165): Selenocysteine
  MOD_RES (172)..(172): Selenocysteine
  MOD_RES (264)..(264): Selenocysteine
  MOD_RES (274)..(274): Selenocysteine
  MOD_RES (283)..(283): Selenocysteine
  MOD_RES (306)..(306): Selenocysteine
  MOD_RES (313)..(313): Selenocysteine
  MOD_RES (327)..(327): Selenocysteine
  MOD_RES (335)..(335): Selenocysteine
  MOD_RES (355)..(355): Selenocysteine
  MOD_RES (396)..(396): Selenocysteine
  MOD_RES (404)..(404): Selenocysteine
  MOD_RES (419)..(419): Selenocysteine
  MOD_RES (474)..(474): Selenocysteine
  MOD_RES (573)..(573): Selenocysteine
MNGPALQPSSPSSAPSASPAAAPRGWSEFCELHAVAAARELARQYWLFAREHPQHAPLRAELVSLQFXDLFQRYFCREVRDGRAPGRDYRDXGRGPPAKAEASPEPGPGPAAPGLPKARSSEELAPPRPPGPCSFQHFRRSLRHIFRRRSAGELPAAHXAAAPGXPGEAAEXPARPGLAKKFLPWSLAREPPPEALKEAVLRYSLADEASMDSGARWQRGRLALRRAPGPDGPDRVLELFDPPKSSRPKLQAACSSIQEVRWCXRLEMPDNLYXFVLKVKDRXDIIFEVGDEQQLNSWMAELSECXGRGLESXEAEMHIPSALEPSXSSSPRGSXDSLNQGASPGGLLDPACQKXDHFLSCYPWFHGPISRVKAAQLVQLQGPDAHGVFLVRQSEXRRGEYVLXFNFQGIAKHLRLSLXERGQCRVQHLHFPSVVDMLHHFQRSPIPLECGAACDVRLSSYVVVVSQPPGSCNXVLFPFSLPHWDSESLPHWGSELGLPHLSSSGCPRGLSPEGLPGRSSPPEQIFHLVPSPEELANSLQHLEHEPVNRARDSDYEMDSSSRSHLRAIDNQYXPL

SEQ ID NO: 25170 - protein, 217 aa, Homo sapiens
  MOD_RES (1)..(1): Any amino acid
  MOD_RES (4)..(4): Selenocysteine
  MOD_RES (28)..(28): Selenocysteine
  MOD_RES (95)..(95): Selenocysteine
  MOD_RES (101)..(101): Selenocysteine
  MOD_RES (108)..(108): Selenocysteine
  MOD_RES (204)..(204): Selenocysteine
XQFXDLFQRYFCREVRDGRAPGRDYRDXGRGPPAKAEASPEPGPGPAAPGLPKARSSEELAPPRPPGPCSFQHFRRSLRHIFRRRSAGELPAAHXAAAPGXPGEAAEXPARPGLAKKFLPWSLAREPPPEALKEAVLRYSLADEASMDSGARWQRGRLALRRAPGPDGPDRVLELFDPPKWPEPELSRLRFRLKQGLSCAHVPXRCNLAGASGIGHP

SEQ ID NO: 25171 - protein, 76 aa, Homo sapiens
  MOD_RES (15)..(15): Selenocysteine
  MOD_RES (23)..(23): Selenocysteine
  MOD_RES (41)..(41): Selenocysteine
  MOD_RES (43)..(43): Selenocysteine
  MOD_RES (47)..(47): Selenocysteine
  MOD_RES (71)..(71): Selenocysteine
MDAVAVYHGKISREXGEKLLLAXGLDGSYLLRDSESVPGIXVXFIHXECPRQKQVLGVLSISEARSRHCNXSAVSS

SEQ ID NO: 25172 - protein, 125 aa, Homo sapiens
  MOD_RES (15)..(15): Selenocysteine
  MOD_RES (23)..(23): Selenocysteine
  MOD_RES (53)..(53): Selenocysteine
  MOD_RES (59)..(59): Selenocysteine
  MOD_RES (61)..(61): Selenocysteine
  MOD_RES (68)..(68): Selenocysteine
  MOD_RES (111)..(111): Selenocysteine
MDAVAVYHGKISREXGEKLLLAXGLDGSYLLRDSESVPGVYCLCVLYHGYIYXYRVSQXEXGSWSAEXAPGVHKRYFRKIKNLISAFQKPDQGIVIPLQYPVEKKSSARSXQGIREDPDVCLKAP

SEQ ID NO: 25173 - protein, 128 aa, Homo sapiens
  MOD_RES (15)..(15): Selenocysteine
  MOD_RES (23)..(23): Selenocysteine
  MOD_RES (53)..(53): Selenocysteine
  MOD_RES (59)..(59): Selenocysteine
  MOD_RES (61)..(61): Selenocysteine
  MOD_RES (68)..(68): Selenocysteine
  MOD_RES (111)..(111): Selenocysteine
  MOD_RES (114)..(115): Selenocysteine
MDAVAVYHGKISREXGEKLLLAXGLDGSYLLRDSESVPGVYCLCVLYHGYIYXYRVSQXEXGSWSAEXAPGVHKRYFRKIKNLISAFQKPDQGIVIPLQYPVEKKSSARSXQGXXGIREDPDVCLKAP

SEQ ID NO: 25174 - protein, 389 aa, Homo sapiens
  MOD_RES (20)..(20): Selenocysteine
  MOD_RES (23)..(23): Selenocysteine
  MOD_RES (27)..(27): Selenocysteine
  MOD_RES (30)..(30): Selenocysteine
  MOD_RES (40)..(40): Selenocysteine
  MOD_RES (53)..(53): Selenocysteine
  MOD_RES (74)..(74): Selenocysteine
  MOD_RES (81)..(81): Selenocysteine
  MOD_RES (101)..(101): Selenocysteine
  MOD_RES (127)..(127): Selenocysteine
  MOD_RES (131)..(131): Selenocysteine
  MOD_RES (136)..(136): Selenocysteine
  MOD_RES (171)..(171): Selenocysteine
  MOD_RES (181)..(181): Selenocysteine
  MOD_RES (183)..(183): Selenocysteine
  MOD_RES (190)..(190): Selenocysteine
  MOD_RES (200)..(200): Selenocysteine
  MOD_RES (261)..(261): Selenocysteine
  MOD_RES (316)..(316): Selenocysteine
  MOD_RES (336)..(336): Selenocysteine
  MOD_RES (365)..(365): Selenocysteine
MEFPLAQICPQGSHEAPIPXFSXFQIXDMXRRSCQNLGYXAASPQAPEAASNXGNAERAEEVPGEGSLFLQAEXRAWFQKXQAHWLLQHGAAPAWFHGFIXRREAERLLEPKPQGCYLVRFSESAVXFVLXYRSRXCCRHFLLAQLRDGRHVVLGEDSAHARLQDLLLHYXAHPLSPYGEXLXEPLARQXPEPAGLSLRXEESNFGSKSQDPNPQYSPIIKQGQAPVPMQKEGAGEKEPSQLLRPKPPIPAKPQLPPEVYXIPVPRHRPAPRPKPSNPIYNEPDEPIAFYAMGRGSPGEAPSNIYVEVEDEGLPAXLGHPVLRKSWSRPVPGGQNXGGSQLHSENSVIGQGPPLPHQPPPAWRHXLPHNLSRQVLQDRGQAWLPLGPPQ

SEQ ID NO: 25175 - protein, 399 aa, Homo sapiens
  MOD_RES (20)..(20): Selenocysteine
  MOD_RES (23)..(23): Selenocysteine
  MOD_RES (27)..(27): Selenocysteine
  MOD_RES (30)..(30): Selenocysteine
  MOD_RES (40)..(40): Selenocysteine
  MOD_RES (53)..(53): Selenocysteine
  MOD_RES (74)..(74): Selenocysteine
  MOD_RES (81)..(81): Selenocysteine
  MOD_RES (101)..(101): Selenocysteine
  MOD_RES (111)..(111): Selenocysteine
  MOD_RES (137)..(137): Selenocysteine
  MOD_RES (141)..(141): Selenocysteine
  MOD_RES (146)..(146): Selenocysteine
  MOD_RES (181)..(181): Selenocysteine
  MOD_RES (191)..(191): Selenocysteine
  MOD_RES (193)..(193): Selenocysteine
  MOD_RES (200)..(200): Selenocysteine
  MOD_RES (210)..(210): Selenocysteine
  MOD_RES (271)..(271): Selenocysteine
  MOD_RES (326)..(326): Selenocysteine
  MOD_RES (346)..(346): Selenocysteine
  MOD_RES (375)..(375): Selenocysteine
MEFPLAQICPQGSHEAPIPXFSXFQIXDMXRRSCQNLGYXAASPQAPEAASNXGNAERAEEVPGEGSLFLQAEXRAWFQKXQAHWLLQHGAAPAWFHGFIXRRVRPPLSVXHREAERLLEPKPQGCYLVRFSESAVXFVLXYRSRXCCRHFLLAQLRDGRHVVLGEDSAHARLQDLLLHYXAHPLSPYGEXLXEPLARQXPEPAGLSLRXEESNFGSKSQDPNPQYSPIIKQGQAPVPMQKEGAGEKEPSQLLRPKPPIPAKPQLPPEVYXIPVPRHRPAPRPKPSNPIYNEPDEPIAFYAMGRGSPGEAPSNIYVEVEDEGLPAXLGHPVLRKSWSRPVPGGQNXGGSQLHSENSVIGQGPPLPHQPPPAWRHXLPHNLSRQVLQDRGQAWLPLGPPQ

SEQ ID NO: 25176 - protein, 371 aa, Homo sapiens
  MOD_RES (5)..(5): Selenocysteine
  MOD_RES (9)..(9): Selenocysteine
  MOD_RES (12)..(12): Selenocysteine
  MOD_RES (22)..(22): Selenocysteine
  MOD_RES (35)..(35): Selenocysteine
  MOD_RES (56)..(56): Selenocysteine
  MOD_RES (63)..(63): Selenocysteine
  MOD_RES (83)..(83): Selenocysteine
  MOD_RES (109)..(109): Selenocysteine
  MOD_RES (113)..(113): Selenocysteine
  MOD_RES (118)..(118): Selenocysteine
  MOD_RES (153)..(153): Selenocysteine
  MOD_RES (163)..(163): Selenocysteine
  MOD_RES (165)..(165): Selenocysteine
  MOD_RES (172)..(172): Selenocysteine
  MOD_RES (182)..(182): Selenocysteine
  MOD_RES (243)..(243): Selenocysteine
  MOD_RES (298)..(298): Selenocysteine
  MOD_RES (318)..(318): Selenocysteine
  MOD_RES (347)..(347): Selenocysteine
MSPSXFQIXDMXRRSCQNLGYXAASPQAPEAASNXGNAERAEEVPGEGSLFLQAEXRAWFQKXQAHWLLQHGAAPAWFHGFIXRREAERLLEPKPQGCYLVRFSESAVXFVLXYRSRXCCRHFLLAQLRDGRHVVLGEDSAHARLQDLLLHYXAHPLSPYGEXLXEPLARQXPEPAGLSLRXEESNFGSKSQDPNPQYSPIIKQGQAPVPMQKEGAGEKEPSQLLRPKPPIPAKPQLPPEVYXIPVPRHRPAPRPKPSNPIYNEPDEPIAFYAMGRGSPGEAPSNIYVEVEDEGLPAXLGHPVLRKSWSRPVPGGQNXGGSQLHSENSVIGQGPPLPHQPPPAWRHXLPHNLSRQVLQDRGQAWLPLGPPQ

SEQ ID NO: 25177 - protein, 483 aa, Homo sapiens
  MOD_RES (4)..(4): Selenocysteine
  MOD_RES (11)..(12): Selenocysteine
  MOD_RES (47)..(47): Selenocysteine
  MOD_RES (56)..(56): Selenocysteine
  MOD_RES (71)..(71): Selenocysteine
  MOD_RES (89)..(89): Selenocysteine
  MOD_RES (94)..(94): Selenocysteine
  MOD_RES (108)..(108): Selenocysteine
  MOD_RES (122)..(122): Selenocysteine
  MOD_RES (150)..(150): Selenocysteine
  MOD_RES (182)..(182): Selenocysteine
  MOD_RES (195)..(195): Selenocysteine
  MOD_RES (207)..(207): Selenocysteine
  MOD_RES (213)..(213): Selenocysteine
  MOD_RES (230)..(230): Selenocysteine
  MOD_RES (247)..(247): Selenocysteine
  MOD_RES (317)..(317): Selenocysteine
  MOD_RES (320)..(320): Selenocysteine
  MOD_RES (338)..(338): Selenocysteine
  MOD_RES (347)..(347): Selenocysteine
  MOD_RES (407)..(407): Selenocysteine
  MOD_RES (443)..(444): Selenocysteine
MEKXLLANLGXXASCPARARKWSNSQPADLAHMGRSREDPAGMEASXMPISALPRXSSDPVLLKAPAPLGXVADSLRASDGQLQAKAPXKPPRXPSFELPDASERPPXYCELVPRVPSVQGXSPSQSCPEPEAPWWEAEEDEEEENRCFXRPQAEISFCPHDAPSCLLGPQNRPLEPQVLHXLRGLFLEHHPGSXALHLLLVDCQAXGLLGVXRDQRGNMGVSSGLELLXLPHGHHLRLELLERHQXLALAGALAVLGCSGPLEERAAALRGLVELALALRPGAAGDLPGLAAVMGALLMPQVRGEQGLEEAGVRVXGKXGEEACSDLFSQVSRLEHXWRQLRRSHXEAALAFEQELKPLMRALDEGAGPCDPGEVALPHVAPMVRLLEGEEVAGPLDESCERLLRXLHGARHMVRDAPKFRKVAAQRLRGFRPNPELREALXXGFVRRLLWGSRGAGAPRAERFEKFQRVLGVLSQRLEPDR

SEQ ID NO: 25178 - protein, 576 aa, Homo sapiens
  MOD_RES (75)..(75): Selenocysteine
  MOD_RES (97)..(97): Selenocysteine
  MOD_RES (106)..(106): Selenocysteine
  MOD_RES (115)..(115): Selenocysteine
  MOD_RES (128)..(128): Selenocysteine
  MOD_RES (169)..(169): Selenocysteine
  MOD_RES (178)..(178): Selenocysteine
  MOD_RES (193)..(193): Selenocysteine
  MOD_RES (211)..(211): Selenocysteine
  MOD_RES (216)..(216): Selenocysteine
  MOD_RES (230)..(230): Selenocysteine
  MOD_RES (244)..(244): Selenocysteine
  MOD_RES (272)..(272): Selenocysteine
  MOD_RES (304)..(304): Selenocysteine
  MOD_RES (317)..(317): Selenocysteine
  MOD_RES (329)..(329): Selenocysteine
  MOD_RES (335)..(335): Selenocysteine
  MOD_RES (352)..(352): Selenocysteine
  MOD_RES (369)..(369): Selenocysteine
  MOD_RES (431)..(431): Selenocysteine
  MOD_RES (440)..(440): Selenocysteine
  MOD_RES (500)..(500): Selenocysteine
  MOD_RES (536)..(537): Selenocysteine
MQVPQDGEDLAGQPWYHGLLSRQKAEALLQQNGDFLVRASGSRGGNPVISCRWRGSALHFEVFRVALRPRPGRPXALFQLEDEQFPSIPALVHSYMXGRRPLSQAXGAVVSRPVXWQGPLRRSFSEDXLMDGPARIEPLRARKWSNSQPADLAHMGRSREDPAGMEASXMPISALPRXSSDPVLLKAPAPLGXVADSLRASDGQLQAKAPXKPPRXPSFELPDASERPPXYCELVPRVPSVQGXSPSQSCPEPEAPWWEAEEDEEEENRCFXRPQAEISFCPHDAPSCLLGPQNRPLEPQVLHXLRGLFLEHHPGSXALHLLLVDCQAXGLLGVXRDQRGNMGVSSGLELLXLPHGHHLRLELLERHQXLALAGALAVLGCSGPLEERAAALRGLVELALALRPGAAGDLPGLAAVMGALLMPQVSRLEHXWRQLRRSHXEAALAFEQELKPLMRALDEGAGPCDPGEVALPHVAPMVRLLEGEEVAGPLDESCERLLRXLHGARHMVRDAPKFRKVAAQRLRGFRPNPELREALXXGFVRRLLWGSRGAGAPRAERFEKFQRVLGVLSQRLEPDR

SEQ ID NO: 25179 - protein, 238 aa, Homo sapiens
  MOD_RES (75)..(75): Selenocysteine
  MOD_RES (97)..(97): Selenocysteine
  MOD_RES (106)..(106): Selenocysteine
  MOD_RES (115)..(115): Selenocysteine
  MOD_RES (128)..(128): Selenocysteine
  MOD_RES (171)..(171): Selenocysteine
  MOD_RES (229)..(229): Selenocysteine
  MOD_RES (235)..(235): Selenocysteine
MQVPQDGEDLAGQPWYHGLLSRQKAEALLQQNGDFLVRASGSRGGNPVISCRWRGSALHFEVFRVALRPRPGRPXALFQLEDEQFPSIPALVHSYMXGRRPLSQAXGAVVSRPVXWQGPLRRSFSEDXLMDGPARIEPLRARKWSNSQPADLAHMGRSREDPAGMESAPGXPSPAYPPWPVPGAPSWEHRPSPAIGRLPGHRPPGSDQRSAGQHGSLIWPGAAHSSPWXPLEVGXAGE

SEQ ID NO: 25180 - protein, 792 aa, Homo sapiens
  MOD_RES (21)..(21): Selenocysteine
  MOD_RES (89)..(89): Selenocysteine
  MOD_RES (145)..(145): Selenocysteine
  MOD_RES (164)..(164): Selenocysteine
  MOD_RES (179)..(179): Selenocysteine
  MOD_RES (187)..(187): Selenocysteine
  MOD_RES (211)..(211): Selenocysteine
  MOD_RES (254)..(254): Selenocysteine
  MOD_RES (293)..(293): Selenocysteine
  MOD_RES (295)..(295): Selenocysteine
  MOD_RES (299)..(299): Selenocysteine
  MOD_RES (304)..(304): Selenocysteine
  MOD_RES (311)..(311): Selenocysteine
  MOD_RES (313)..(313): Selenocysteine
  MOD_RES (353)..(353): Selenocysteine
  MOD_RES (355)..(355): Selenocysteine
  MOD_RES (367)..(367): Selenocysteine
  MOD_RES (391)..(391): Selenocysteine
  MOD_RES (401)..(401): Selenocysteine
  MOD_RES (406)..(406): Selenocysteine
  MOD_RES (443)..(443): Selenocysteine
  MOD_RES (445)..(445): Selenocysteine
  MOD_RES (473)..(473): Selenocysteine
  MOD_RES (475)..(475): Selenocysteine
  MOD_RES (482)..(482): Selenocysteine
  MOD_RES (489)..(489): Selenocysteine
  MOD_RES (521)..(521): Selenocysteine
  MOD_RES (527)..(527): Selenocysteine
  MOD_RES (540)..(540): Selenocysteine
  MOD_RES (545)..(545): Selenocysteine
  MOD_RES (557)..(557): Selenocysteine
  MOD_RES (574)..(574): Selenocysteine
  MOD_RES (587)..(587): Selenocysteine
  MOD_RES (600)..(600): Selenocysteine
  MOD_RES (610)..(610): Selenocysteine
  MOD_RES (635)..(635): Selenocysteine
  MOD_RES (638)..(638): Selenocysteine
  MOD_RES (644)..(644): Selenocysteine
  MOD_RES (673)..(674): Selenocysteine
  MOD_RES (683)..(683): Selenocysteine
  MOD_RES (701)..(701): Selenocysteine
  MOD_RES (717)..(717): Selenocysteine
  MOD_RES (727)..(727): Selenocysteine
  MOD_RES (748)..(748): Selenocysteine
  MOD_RES (777)..(777): Selenocysteine
MAPALPSPHKAVARPELLLDXAAHSGKLRAPDGGEGAECAGHNGGPSWGVGQGQSQEPSRQGIPQAPWLVSWQRRGFPPSSFCPGPLRXEKLRAGRCPLLLCGGAAGEPEAGSDYVKFSKEKYILDSSPEKLHKELEEELKLSSXDLRSHAWYHGRIPREVSEXLVQRNGDFLIRDSLXSLGDYVLXCRWRNQALHFKINKVVVKAGESYXHIQYLFEQESFDHVPALVRYHVGSRKAVSEQSGAIIYCPVNRXFPLRYLEASYGLGQGSSKPASPVSPSGPKGSHMKRRSVXMXDGLXADKVXRSDGCPXSXSLPRPRDSIRSCALSMDQIPDLHSPMSPISESPSSPAYSXVXRVHAAPAAPSAXALPASPVARRSSEPQLCPGSAPKXHGESDKGPHXSPSHXLGKASPSPSLSSYSDPDSGHYCQLQPPVRGSREWAAXEXSSQQARSYGERLKELSENGAPEGDWGKXFXVPIVEVXSSFNPAXFQSLLIPRDNRPLEVGLLRKVKELLAEVDARXLARHVXKVDCLVARILGVXKEMQXLMGVRWGMELLXLPHGRQLRLDLLERFHXMSIMLAVDILGCXGSAEERAALLHKXIQLAAELRGXMGNMFSFAAVMGALDMAQISRLEQXWVXLRQRHXEGAILYEKKLKPFLKSLNEGKEGPPLSNXXFPHVLPLIXLLECDSAPPEGPEPWGSXEHGVEVVLAHLEAARXVAHHGGLYHXNAEVKLQGFQARPELLEVFSXEFQMRLLWGSQGASSSQARRYEKFDKVLXALSHKLEPAVRSSEL

SEQ ID NO: 25181 - protein, 134 aa, Homo sapiens
  MOD_RES (7)..(7): Selenocysteine
  MOD_RES (9)..(9): Selenocysteine
  MOD_RES (13)..(13): Selenocysteine
  MOD_RES (18)..(18): Selenocysteine
  MOD_RES (25)..(25): Selenocysteine
  MOD_RES (27)..(27): Selenocysteine
  MOD_RES (67)..(67): Selenocysteine
  MOD_RES (69)..(69): Selenocysteine
  MOD_RES (81)..(81): Selenocysteine
  MOD_RES (105)..(105): Selenocysteine
  MOD_RES (115)..(115): Selenocysteine
  MOD_RES (120)..(120): Selenocysteine
MKRRSVXMXDGLXADKVXRSDGCPXSXSLPRPRDSIRSCALSMDQIPDLHSPMSPISESPSSPAYSXVXRVHAAPAAPSAXALPASPVARRSSEPQLCPGSAPKXHGESDKGPHXSPSHXLGKASPSPSLSSYS

SEQ ID NO: 25182 - protein, 506 aa, Homo sapiens
  MOD_RES (7)..(7): Selenocysteine
  MOD_RES (9)..(9): Selenocysteine
  MOD_RES (13)..(13): Selenocysteine
  MOD_RES (18)..(18): Selenocysteine
  MOD_RES (25)..(25): Selenocysteine
  MOD_RES (27)..(27): Selenocysteine
  MOD_RES (67)..(67): Selenocysteine
  MOD_RES (69)..(69): Selenocysteine
  MOD_RES (81)..(81): Selenocysteine
  MOD_RES (105)..(105): Selenocysteine
  MOD_RES (115)..(115): Selenocysteine
  MOD_RES (120)..(120): Selenocysteine
  MOD_RES (157)..(157): Selenocysteine
  MOD_RES (159)..(159): Selenocysteine
  MOD_RES (187)..(187): Selenocysteine
  MOD_RES (189)..(189): Selenocysteine
  MOD_RES (196)..(196): Selenocysteine
  MOD_RES (203)..(203): Selenocysteine
  MOD_RES (235)..(235): Selenocysteine
  MOD_RES (241)..(241): Selenocysteine
  MOD_RES (254)..(254): Selenocysteine
  MOD_RES (259)..(259): Selenocysteine
  MOD_RES (271)..(271): Selenocysteine
  MOD_RES (288)..(288): Selenocysteine
  MOD_RES (301)..(301): Selenocysteine
  MOD_RES (314)..(314): Selenocysteine
  MOD_RES (324)..(324): Selenocysteine
  MOD_RES (349)..(349): Selenocysteine
  MOD_RES (352)..(352): Selenocysteine
  MOD_RES (358)..(358): Selenocysteine
  MOD_RES (387)..(388): Selenocysteine
  MOD_RES (397)..(397): Selenocysteine
  MOD_RES (415)..(415): Selenocysteine
  MOD_RES (431)..(431): Selenocysteine
  MOD_RES (441)..(441): Selenocysteine
  MOD_RES (462)..(462): Selenocysteine
  MOD_RES (491)..(491): Selenocysteine
MKRRSVXMXDGLXADKVXRSDGCPXSXSLPRPRDSIRSCALSMDQIPDLHSPMSPISESPSSPAYSXVXRVHAAPAAPSAXALPASPVARRSSEPQLCPGSAPKXHGESDKGPHXSPSHXLGKASPSPSLSSYSDPDSGHYCQLQPPVRGSREWAAXEXSSQQARSYGERLKELSENGAPEGDWGKXFXVPIVEVXSSFNPAXFQSLLIPRDNRPLEVGLLRKVKELLAEVDARXLARHVXKVDCLVARILGVXKEMQXLMGVRWGMELLXLPHGRQLRLDLLERFHXMSIMLAVDILGCXGSAEERAALLHKXIQLAAELRGXMGNMFSFAAVMGALDMAQISRLEQXWVXLRQRHXEGAILYEKKLKPFLKSLNEGKEGPPLSNXXFPHVLPLIXLLECDSAPPEGPEPWGSXEHGVEVVLAHLEAARXVAHHGGLYHXNAEVKLQGFQARPELLEVFSXEFQMRLLWGSQGASSSQARRYEKFDKVLXALSHKLEPAVRSSEL

SEQ ID NO: 25183 - protein, 196 aa, Homo sapiens
  MOD_RES (30)..(30): Selenocysteine
  MOD_RES (49)..(49): Selenocysteine
  MOD_RES (64)..(64): Selenocysteine
  MOD_RES (72)..(72): Selenocysteine
  MOD_RES (96)..(96): Selenocysteine
  MOD_RES (139)..(139): Selenocysteine
  MOD_RES (178)..(178): Selenocysteine
  MOD_RES (180)..(180): Selenocysteine
  MOD_RES (184)..(184): Selenocysteine
  MOD_RES (189)..(189): Selenocysteine
  MOD_RES (196)..(196): Selenocysteine
MPFSKEKYILDSSPEKLHKELEEELKLSSXDLRSHAWYHGRIPREVSEXLVQRNGDFLIRDSLXSLGDYVLXCRWRNQALHFKINKVVVKAGESYXHIQYLFEQESFDHVPALVRYHVGSRKAVSEQSGAIIYCPVNRXFPLRYLEASYGLGQGSSKPASPVSPSGPKGSHMKRRSVXMXDGLXADKVXRSDGCPX

SEQ ID NO: 25184 - protein, 703 aa, Homo sapiens
  MOD_RES (2)..(2): Selenocysteine
  MOD_RES (56)..(56): Selenocysteine
  MOD_RES (75)..(75): Selenocysteine
  MOD_RES (90)..(90): Selenocysteine
  MOD_RES (98)..(98): Selenocysteine
  MOD_RES (122)..(122): Selenocysteine
  MOD_RES (165)..(165): Selenocysteine
  MOD_RES (204)..(204): Selenocysteine
  MOD_RES (206)..(206): Selenocysteine
  MOD_RES (210)..(210): Selenocysteine
  MOD_RES (215)..(215): Selenocysteine
  MOD_RES (222)..(222): Selenocysteine
  MOD_RES (224)..(224): Selenocysteine
  MOD_RES (264)..(264): Selenocysteine
  MOD_RES (266)..(266): Selenocysteine
  MOD_RES (278)..(278): Selenocysteine
  MOD_RES (302)..(302): Selenocysteine
  MOD_RES (312)..(312): Selenocysteine
  MOD_RES (317)..(317): Selenocysteine
  MOD_RES (354)..(354): Selenocysteine
  MOD_RES (356)..(356): Selenocysteine
  MOD_RES (384)..(384): Selenocysteine
  MOD_RES (386)..(386): Selenocysteine
  MOD_RES (393)..(393): Selenocysteine
  MOD_RES (400)..(400): Selenocysteine
  MOD_RES (432)..(432): Selenocysteine
  MOD_RES (438)..(438): Selenocysteine
  MOD_RES (451)..(451): Selenocysteine
  MOD_RES (456)..(456): Selenocysteine
  MOD_RES (468)..(468): Selenocysteine
  MOD_RES (485)..(485): Selenocysteine
  MOD_RES (498)..(498): Selenocysteine
  MOD_RES (511)..(511): Selenocysteine
  MOD_RES (521)..(521): Selenocysteine
  MOD_RES (546)..(546): Selenocysteine
  MOD_RES (549)..(549): Selenocysteine
  MOD_RES (555)..(555): Selenocysteine
  MOD_RES (584)..(585): Selenocysteine
  MOD_RES (594)..(594): Selenocysteine
  MOD_RES (612)..(612): Selenocysteine
  MOD_RES (628)..(628): Selenocysteine
  MOD_RES (638)..(638): Selenocysteine
  MOD_RES (659)..(659): Selenocysteine
  MOD_RES (688)..(688): Selenocysteine
MXAVGRRCPALGSRGAAGEPEAGSDYVKFSKEKYILDSSPEKLHKELEEELKLSSXDLRSHAWYHGRIPREVSEXLVQRNGDFLIRDSLXSLGDYVLXCRWRNQALHFKINKVVVKAGESYXHIQYLFEQESFDHVPALVRYHVGSRKAVSEQSGAIIYCPVNRXFPLRYLEASYGLGQGSSKPASPVSPSGPKGSHMKRRSVXMXDGLXADKVXRSDGCPXSXSLPRPRDSIRSCALSMDQIPDLHSPMSPISESPSSPAYSXVXRVHAAPAAPSAXALPASPVARRSSEPQLCPGSAPKXHGESDKGPHXSPSHXLGKASPSPSLSSYSDPDSGHYCQLQPPVRGSREWAAXEXSSQQARSYGERLKELSENGAPEGDWGKXFXVPIVEVXSSFNPAXFQSLLIPRDNRPLEVGLLRKVKELLAEVDARXLARHVXKVDCLVARILGVXKEMQXLMGVRWGMELLXLPHGRQLRLDLLERFHXMSIMLAVDILGCXGSAEERAALLHKXIQLAAELRGXMGNMFSFAAVMGALDMAQISRLEQXWVXLRQRHXEGAILYEKKLKPFLKSLNEGKEGPPLSNXXFPHVLPLIXLLECDSAPPEGPEPWGSXEHGVEVVLAHLEAARXVAHHGGLYHXNAEVKLQGFQARPELLEVFSXEFQMRLLWGSQGASSSQARRYEKFDKVLXALSHKLEPAVRSSEL

SEQ ID NO: 25185 - protein, 860 aa, Homo sapiens
  MOD_RES (2)..(2): Selenocysteine
  MOD_RES (5)..(5): Selenocysteine
  MOD_RES (8)..(8): Selenocysteine
  MOD_RES (31)..(31): Selenocysteine
  MOD_RES (49)..(49): Selenocysteine
  MOD_RES (53)..(53): Selenocysteine
  MOD_RES (59)..(59): Selenocysteine
  MOD_RES (79)..(79): Selenocysteine
  MOD_RES (128)..(128): Selenocysteine
  MOD_RES (134)..(134): Selenocysteine
  MOD_RES (156)..(156): Selenocysteine
  MOD_RES (213)..(213): Selenocysteine
  MOD_RES (232)..(232): Selenocysteine
  MOD_RES (247)..(247): Selenocysteine
  MOD_RES (255)..(255): Selenocysteine
  MOD_RES (279)..(279): Selenocysteine
  MOD_RES (322)..(322): Selenocysteine
  MOD_RES (361)..(361): Selenocysteine
  MOD_RES (363)..(363): Selenocysteine
  MOD_RES (367)..(367): Selenocysteine
  MOD_RES (372)..(372): Selenocysteine
  MOD_RES (379)..(379): Selenocysteine
  MOD_RES (381)..(381): Selenocysteine
  MOD_RES (421)..(421): Selenocysteine
  MOD_RES (423)..(423): Selenocysteine
  MOD_RES (435)..(435): Selenocysteine
  MOD_RES (459)..(459): Selenocysteine
  MOD_RES (469)..(469): Selenocysteine
  MOD_RES (474)..(474): Selenocysteine
  MOD_RES (511)..(511): Selenocysteine
  MOD_RES (513)..(513): Selenocysteine
  MOD_RES (541)..(541): Selenocysteine
  MOD_RES (543)..(543): Selenocysteine
  MOD_RES (550)..(550): Selenocysteine
  MOD_RES (557)..(557): Selenocysteine
  MOD_RES (589)..(589): Selenocysteine
  MOD_RES (595)..(595): Selenocysteine
  MOD_RES (608)..(608): Selenocysteine
  MOD_RES (613)..(613): Selenocysteine
  MOD_RES (625)..(625): Selenocysteine
  MOD_RES (642)..(642): Selenocysteine
  MOD_RES (655)..(655): Selenocysteine
  MOD_RES (668)..(668): Selenocysteine
  MOD_RES (678)..(678): Selenocysteine
  MOD_RES (703)..(703): Selenocysteine
  MOD_RES (706)..(706): Selenocysteine
  MOD_RES (712)..(712): Selenocysteine
  MOD_RES (741)..(742): Selenocysteine
  MOD_RES (751)..(751): Selenocysteine
  MOD_RES (769)..(769): Selenocysteine
  MOD_RES (785)..(785): Selenocysteine
  MOD_RES (795)..(795): Selenocysteine
  MOD_RES (816)..(816): Selenocysteine
  MOD_RES (845)..(845): Selenocysteine
MXEGXKKXSKKFKFFKFKGFGSLSNLPRSFXLRRSSASISRQSHLEPDXFEAXQDDMVXVPKSPPAYARSSDMYSHMGXMPRPSIKKAQNSQAARQAQEAGPKPNLVPGGVPDPPGLEAAKEVMVKAXGPLEDXPAMEPNPSAVEVDPIRKPEVPXGDVEEERPPRDVHSERAAGEPEAGSDYVKFSKEKYILDSSPEKLHKELEEELKLSSXDLRSHAWYHGRIPREVSEXLVQRNGDFLIRDSLXSLGDYVLXCRWRNQALHFKINKVVVKAGESYXHIQYLFEQESFDHVPALVRYHVGSRKAVSEQSGAIIYCPVNRXFPLRYLEASYGLGQGSSKPASPVSPSGPKGSHMKRRSVXMXDGLXADKVXRSDGCPXSXSLPRPRDSIRSCALSMDQIPDLHSPMSPISESPSSPAYSXVXRVHAAPAAPSAXALPASPVARRSSEPQLCPGSAPKXHGESDKGPHXSPSHXLGKASPSPSLSSYSDPDSGHYCQLQPPVRGSREWAAXEXSSQQARSYGERLKELSENGAPEGDWGKXFXVPIVEVXSSFNPAXFQSLLIPRDNRPLEVGLLRKVKELLAEVDARXLARHVXKVDCLVARILGVXKEMQXLMGVRWGMELLXLPHGRQLRLDLLERFHXMSIMLAVDILGCXGSAEERAALLHKXIQLAAELRGXMGNMFSFAAVMGALDMAQISRLEQXWVXLRQRHXEGAILYEKKLKPFLKSLNEGKEGPPLSNXXFPHVLPLIXLLECDSAPPEGPEPWGSXEHGVEVVLAHLEAARXVAHHGGLYHXNAEVKLQGFQARPELLEVFSXEFQMRLLWGSQGASSSQARRYEKFDKVLXALSHKLEPAVRSSEL

SEQ ID NO: 25186 - protein, 700 aa, Homo sapiens
  MOD_RES (2)..(2): Selenocysteine
  MOD_RES (53)..(53): Selenocysteine
  MOD_RES (72)..(72): Selenocysteine
  MOD_RES (87)..(87): Selenocysteine
  MOD_RES (95)..(95): Selenocysteine
  MOD_RES (119)..(119): Selenocysteine
  MOD_RES (162)..(162): Selenocysteine
  MOD_RES (201)..(201): Selenocysteine
  MOD_RES (203)..(203): Selenocysteine
  MOD_RES (207)..(207): Selenocysteine
  MOD_RES (212)..(212): Selenocysteine
  MOD_RES (219)..(219): Selenocysteine
  MOD_RES (221)..(221): Selenocysteine
  MOD_RES (261)..(261): Selenocysteine
  MOD_RES (263)..(263): Selenocysteine
  MOD_RES (275)..(275): Selenocysteine
  MOD_RES (299)..(299): Selenocysteine
  MOD_RES (309)..(309): Selenocysteine
  MOD_RES (314)..(314): Selenocysteine
  MOD_RES (351)..(351): Selenocysteine
  MOD_RES (353)..(353): Selenocysteine
  MOD_RES (381)..(381): Selenocysteine
  MOD_RES (383)..(383): Selenocysteine
  MOD_RES (390)..(390): Selenocysteine
  MOD_RES (397)..(397): Selenocysteine
  MOD_RES (429)..(429): Selenocysteine
  MOD_RES (435)..(435): Selenocysteine
  MOD_RES (448)..(448): Selenocysteine
  MOD_RES (453)..(453): Selenocysteine
  MOD_RES (465)..(465): Selenocysteine
  MOD_RES (482)..(482): Selenocysteine
  MOD_RES (495)..(495): Selenocysteine
  MOD_RES (508)..(508): Selenocysteine
  MOD_RES (518)..(518): Selenocysteine
  MOD_RES (543)..(543): Selenocysteine
  MOD_RES (546)..(546): Selenocysteine
  MOD_RES (552)..(552): Selenocysteine
  MOD_RES (581)..(582): Selenocysteine
  MOD_RES (591)..(591): Selenocysteine
  MOD_RES (609)..(609): Selenocysteine
  MOD_RES (625)..(625): Selenocysteine
  MOD_RES (635)..(635): Selenocysteine
  MOD_RES (656)..(656): Selenocysteine
  MOD_RES (685)..(685): Selenocysteine
MXERCSLWSALSAAACCFYRGSFVQFSKEKYILDSSPEKLHKELEEELKLSSXDLRSHAWYHGRIPREVSEXLVQRNGDFLIRDSLXSLGDYVLXCRWRNQALHFKINKVVVKAGESYXHIQYLFEQESFDHVPALVRYHVGSRKAVSEQSGAIIYCPVNRXFPLRYLEASYGLGQGSSKPASPVSPSGPKGSHMKRRSVXMXDGLXADKVXRSDGCPXSXSLPRPRDSIRSCALSMDQIPDLHSPMSPISESPSSPAYSXVXRVHAAPAAPSAXALPASPVARRSSEPQLCPGSAPKXHGESDKGPHXSPSHXLGKASPSPSLSSYSDPDSGHYCQLQPPVRGSREWAAXEXSSQQARSYGERLKELSENGAPEGDWGKXFXVPIVEVXSSFNPAXFQSLLIPRDNRPLEVGLLRKVKELLAEVDARXLARHVXKVDCLVARILGVXKEMQXLMGVRWGMELLXLPHGRQLRLDLLERFHXMSIMLAVDILGCXGSAEERAALLHKXIQLAAELRGXMGNMFSFAAVMGALDMAQISRLEQXWVXLRQRHXEGAILYEKKLKPFLKSLNEGKEGPPLSNXXFPHVLPLIXLLECDSAPPEGPEPWGSXEHGVEVVLAHLEAARXVAHHGGLYHXNAEVKLQGFQARPELLEVFSXEFQMRLLWGSQGASSSQARRYEKFDKVLXALSHKLEPAVRSSEL

SEQ ID NO: 25187 - protein, 702 aa, Homo sapiens
  MOD_RES (2)..(2): Selenocysteine
  MOD_RES (55)..(55): Selenocysteine
  MOD_RES (74)..(74): Selenocysteine
  MOD_RES (89)..(89): Selenocysteine
  MOD_RES (97)..(97): Selenocysteine
  MOD_RES (121)..(121): Selenocysteine
  MOD_RES (164)..(164): Selenocysteine
  MOD_RES (203)..(203): Selenocysteine
  MOD_RES (205)..(205): Selenocysteine
  MOD_RES (209)..(209): Selenocysteine
  MOD_RES (214)..(214): Selenocysteine
  MOD_RES (221)..(221): Selenocysteine
  MOD_RES (223)..(223): Selenocysteine
  MOD_RES (263)..(263): Selenocysteine
  MOD_RES (265)..(265): Selenocysteine
  MOD_RES (277)..(277): Selenocysteine
  MOD_RES (301)..(301): Selenocysteine
  MOD_RES (311)..(311): Selenocysteine
  MOD_RES (316)..(316): Selenocysteine
  MOD_RES (353)..(353): Selenocysteine
  MOD_RES (355)..(355): Selenocysteine
  MOD_RES (383)..(383): Selenocysteine
  MOD_RES (385)..(385): Selenocysteine
  MOD_RES (392)..(392): Selenocysteine
  MOD_RES (399)..(399): Selenocysteine
  MOD_RES (431)..(431): Selenocysteine
  MOD_RES (437)..(437): Selenocysteine
  MOD_RES (450)..(450): Selenocysteine
  MOD_RES (455)..(455): Selenocysteine
  MOD_RES (467)..(467): Selenocysteine
  MOD_RES (484)..(484): Selenocysteine
  MOD_RES (497)..(497): Selenocysteine
  MOD_RES (510)..(510): Selenocysteine
  MOD_RES (520)..(520): Selenocysteine
  MOD_RES (545)..(545): Selenocysteine
  MOD_RES (548)..(548): Selenocysteine
  MOD_RES (554)..(554): Selenocysteine
  MOD_RES (583)..(584): Selenocysteine
  MOD_RES (593)..(593): Selenocysteine
  MOD_RES (611)..(611): Selenocysteine
  MOD_RES (627)..(627): Selenocysteine
  MOD_RES (637)..(637): Selenocysteine
  MOD_RES (658)..(658): Selenocysteine
  MOD_RES (687)..(687): Selenocysteine
MXERCSLWSALSAAACCFYRGSFVQVQFSKEKYILDSSPEKLHKELEEELKLSSXDLRSHAWYHGRIPREVSEXLVQRNGDFLIRDSLXSLGDYVLXCRWRNQALHFKINKVVVKAGESYXHIQYLFEQESFDHVPALVRYHVGSRKAVSEQSGAIIYCPVNRXFPLRYLEASYGLGQGSSKPASPVSPSGPKGSHMKRRSVXMXDGLXADKVXRSDGCPXSXSLPRPRDSIRSCALSMDQIPDLHSPMSPISESPSSPAYSXVXRVHAAPAAPSAXALPASPVARRSSEPQLCPGSAPKXHGESDKGPHXSPSHXLGKASPSPSLSSYSDPDSGHYCQLQPPVRGSREWAAXEXSSQQARSYGERLKELSENGAPEGDWGKXFXVPIVEVXSSFNPAXFQSLLIPRDNRPLEVGLLRKVKELLAEVDARXLARHVXKVDCLVARILGVXKEMQXLMGVRWGMELLXLPHGRQLRLDLLERFHXMSIMLAVDILGCXGSAEERAALLHKXIQLAAELRGXMGNMFSFAAVMGALDMAQISRLEQXWVXLRQRHXEGAILYEKKLKPFLKSLNEGKEGPPLSNXXFPHVLPLIXLLECDSAPPEGPEPWGSXEHGVEVVLAHLEAARXVAHHGGLYHXNAEVKLQGFQARPELLEVFSXEFQMRLLWGSQGASSSQARRYEKFDKVLXALSHKLEPAVRSSEL

SEQ ID NO: 25188 - protein, 143 aa, Homo sapiens
  MOD_RES (9)..(9): Selenocysteine
  MOD_RES (16)..(17): Selenocysteine
  MOD_RES (22)..(22): Selenocysteine
  MOD_RES (26)..(26): Selenocysteine
  MOD_RES (45)..(45): Selenocysteine
  MOD_RES (57)..(57): Selenocysteine
  MOD_RES (71)..(71): Selenocysteine
  MOD_RES (135)..(135): Selenocysteine
  MOD_RES (141)..(141): Selenocysteine
MPSGPLPRXSVVPRPXXAPQEXRNGXADAASKEGRKSSLPSVAPXGSASAAEDGAYXVRPSSGPHGSQPFXLAVLLRGRVFNIPIRRLDGGRHYALGREGRNREELFSSVAAMVQHFMWHPLPLVDRHSGSRELXCLLFPXKP

SEQ ID NO: 25189 - protein, 175 aa, Homo sapiens
  MOD_RES (26)..(26): Selenocysteine
  MOD_RES (49)..(49): Selenocysteine
  MOD_RES (62)..(62): Selenocysteine
  MOD_RES (89)..(89): Selenocysteine
  MOD_RES (103)..(103): Selenocysteine
  MOD_RES (167)..(167): Selenocysteine
  MOD_RES (173)..(173): Selenocysteine
MYASSYPPPPQLSPRSHLCPPPPHPXPPQLNNLLLLEGRKSSLPSVAPXGSASAAEDSDLLXQPWYSGNCDRYAVESALLHLQKDGAYXVRPSSGPHGSQPFXLAVLLRGRVFNIPIRRLDGGRHYALGREGRNREELFSSVAAMVQHFMWHPLPLVDRHSGSRELXCLLFPXKP

SEQ ID NO: 25190 - protein, 54 aa, Homo sapiens
  MOD_RES (11)..(11): Selenocysteine
  MOD_RES (45)..(45): Selenocysteine
  MOD_RES (48)..(48): Selenocysteine
  MOD_RES (52)..(52): Selenocysteine
GSEKAEEGGEXEAQKEGSEDVGNLPEAQEKNKMEAMKQHFKCLSXNQXQQNXLA

SEQ ID NO: 25191 - protein, 81 aa, Homo sapiens
  MOD_RES (20)..(20): Selenocysteine
  MOD_RES (46)..(46): Selenocysteine
  MOD_RES (48)..(48): Selenocysteine
  MOD_RES (51)..(51): Selenocysteine
  MOD_RES (69)..(69): Selenocysteine
IFNEEQYCGGSEKAEEGGEXEAQKEGSEDVGNLPEAQEKNEEEGEXAXEEXEEIAMEGAEGEAEEEEEXAEGEEPGEDEDS

SEQ ID NO: 25192 - protein, 239 aa, Homo sapiens
  MOD_RES (9)..(9): Selenocysteine
  MOD_RES (61)..(61): Selenocysteine
  MOD_RES (72)..(72): Selenocysteine
  MOD_RES (178)..(178): Selenocysteine
  MOD_RES (204)..(204): Selenocysteine
  MOD_RES (206)..(206): Selenocysteine
  MOD_RES (209)..(209): Selenocysteine
  MOD_RES (227)..(227): Selenocysteine
MPLLLLGEXEPLKLERDCRSPVDPWAAASPDLALACLCHCQDLSSGAFPDRGVLGGVLFPXVEMVIKVFVAXSSGSIAIRKKQQEVVGFLEANKIDFKELDIAGDEDNRRWMRENVPGEKKPQNGIPLPPQIFNEEQYCGDFDSFFSAKEENIIYSFLGLAPPPDSKGSEKAEEGGEXEAQKEGSEDVGNLPEAQEKNEEEGEXAXEEXEEIAMEGAEGEAEEEEEXAEGEEPGEDEDS

SEQ ID NO: 25193 - protein, 97 aa, Homo sapiens
  MOD_RES (62)..(62): Selenocysteine
  MOD_RES (64)..(64): Selenocysteine
  MOD_RES (67)..(67): Selenocysteine
  MOD_RES (85)..(85): Selenocysteine
MRENVPGEKKPQNGIPLPPQIFNEEQYCGDFDSFFSAKEENIIYSFLGLAPPPDSKEEEGEXAXEEXEEIAMEGAEGEAEEEEEXAEGEEPGEDEDS

SEQ ID NO: 25194 - protein, 106 aa, Homo sapiens
  MOD_RES (67)..(67): Selenocysteine
  MOD_RES (93)..(93): Selenocysteine
  MOD_RES (95)..(95): Selenocysteine
  MOD_RES (98)..(98): Selenocysteine
MRENVPGEKKPQNGIPLPPQIFNEEQYCGDFDSFFSAKEENIIYSFLGLAPPPDSKGSEKAEEGGEXEAQKEGSEDVGNLPEAQEKNEEEGEXAXEEXEEIAMEGA

SEQ ID NO: 25195 - protein, 128 aa, Homo sapiens
  MOD_RES (67)..(67): Selenocysteine
  MOD_RES (93)..(93): Selenocysteine
  MOD_RES (95)..(95): Selenocysteine
  MOD_RES (98)..(98): Selenocysteine
  MOD_RES (116)..(116): Selenocysteine
MRENVPGEKKPQNGIPLPPQIFNEEQYCGDFDSFFSAKEENIIYSFLGLAPPPDSKGSEKAEEGGEXEAQKEGSEDVGNLPEAQEKNEEEGEXAXEEXEEIAMEGAEGEAEEEEEXAEGEEPGEDEDS

SEQ ID NO: 25196 - protein, 137 aa, Homo sapiens
  MOD_RES (1)..(1): Any amino acid
  MOD_RES (102)..(102): Selenocysteine
  MOD_RES (104)..(104): Selenocysteine
  MOD_RES (107)..(107): Selenocysteine
  MOD_RES (125)..(125): Selenocysteine
XSSGSIAIRKKQQEVVGFLEANKIDFKELDIAGDEDNRRWMRENVPGEKKPQNGIPLPPQIFNEEQYCGDFDSFFSAKEENIIYSFLGLAPPPDSKEEEGEXAXEEXEEIAMEGAEGEAEEEEEXAEGEEPGEDEDS

SEQ ID NO: 25197 - protein, 114 aa, Homo sapiens
  MOD_RES (14)..(14): Selenocysteine
  MOD_RES (61)..(61): Selenocysteine
  MOD_RES (98)..(98): Selenocysteine
MVIRVYIASSSGSXAIKKKQQDVLGFLEANKIGFEEKDIAANEENRKWMRENVPENSRPAXGYPLPPQIFNESQYRGDYDAFFEARENNAVYAFLGLXAPPGSKEAEVQAKQQA

SEQ ID NO: 25198 - protein, 20 aa, Homo sapiens
  MOD_RES (15)..(15): Selenocysteine
MMKRQLHRMRQLAQXGSLGR

SEQ ID NO: 25199 - protein, 452 aa, Homo sapiens
  MOD_RES (15)..(15): Selenocysteine
  MOD_RES (21)..(21): Selenocysteine
  MOD_RES (24)..(24): Selenocysteine
  MOD_RES (79)..(80): Selenocysteine
  MOD_RES (118)..(118): Selenocysteine
  MOD_RES (154)..(154): Selenocysteine
  MOD_RES (163)..(163): Selenocysteine
  MOD_RES (182)..(183): Selenocysteine
  MOD_RES (190)..(190): Selenocysteine
  MOD_RES (218)..(218): Selenocysteine
  MOD_RES (247)..(247): Selenocysteine
  MOD_RES (266)..(266): Selenocysteine
  MOD_RES (268)..(268): Selenocysteine
  MOD_RES (280)..(280): Selenocysteine
  MOD_RES (326)..(326): Selenocysteine
  MOD_RES (361)..(361): Selenocysteine
  MOD_RES (419)..(419): Selenocysteine
  MOD_RES (440)..(440): Selenocysteine
  MOD_RES (450)..(450): Selenocysteine
MMKRQLHRMRQLAQXGSLGRXPEXAEFLGEDLLQVEQRLEPAKRAAHNIHKRLQACLQGQSGADMDKRVKKLPLMALSXXMAESFKELDPDSSMGKALEMSCAIQNQLARILAEFEMXLERDVLQPLSRLSEEELPAILKHKKSLQKLVSDWNXLKSRLSQAXKNSGSSQGLGGSPGSHSHXXMANKVEXLKEEEEELKRKVEQCRDEYLADLYHFVXKEDSYANYFIRLLEIQADYHRRSLSSLDXALAELRENHGQADHSPSMXAXHFPRVYGVSLAXHLQELGREIALPIEACVMMLLSEGMKEEGLFRLAAGASVLKRLKQXMASDPHSLEEFCSDPHAVAGALKSYLRELPEPLMXFDLYDDWMRAASLKEPGARLQALQEVCSRLPPENLSNLRYLMKFLARLAEEQEVNKMXPSNIAIVLGPNLLWPPEKEGXEPARELGSQXLC

SEQ ID NO: 25200 - protein, 701 aa, Homo sapiens
  MOD_RES (15)..(15): Selenocysteine
  MOD_RES (21)..(21): Selenocysteine
  MOD_RES (24)..(24): Selenocysteine
  MOD_RES (79)..(80): Selenocysteine
  MOD_RES (118)..(118): Selenocysteine
  MOD_RES (154)..(154): Selenocysteine
  MOD_RES (163)..(163): Selenocysteine
  MOD_RES (182)..(183): Selenocysteine
  MOD_RES (190)..(190): Selenocysteine
  MOD_RES (218)..(218): Selenocysteine
  MOD_RES (247)..(247): Selenocysteine
  MOD_RES (266)..(266): Selenocysteine
  MOD_RES (268)..(268): Selenocysteine
  MOD_RES (280)..(280): Selenocysteine
  MOD_RES (326)..(326): Selenocysteine
  MOD_RES (361)..(361): Selenocysteine
  MOD_RES (419)..(419): Selenocysteine
  MOD_RES (467)..(467): Selenocysteine
  MOD_RES (485)..(485): Selenocysteine
  MOD_RES (489)..(489): Selenocysteine
  MOD_RES (502)..(502): Selenocysteine
  MOD_RES (506)..(506): Selenocysteine
  MOD_RES (509)..(510): Selenocysteine
  MOD_RES (530)..(530): Selenocysteine
  MOD_RES (534)..(534): Selenocysteine
  MOD_RES (548)..(548): Selenocysteine
  MOD_RES (554)..(554): Selenocysteine
  MOD_RES (565)..(565): Selenocysteine
  MOD_RES (574)..(574): Selenocysteine
  MOD_RES (601)..(601): Selenocysteine
  MOD_RES (618)..(618): Selenocysteine
  MOD_RES (626)..(626): Selenocysteine
  MOD_RES (669)..(669): Selenocysteine
  MOD_RES (683)..(683): Selenocysteine
  MOD_RES (700)..(700): Selenocysteine
MMKRQLHRMRQLAQXGSLGRXPEXAEFLGEDLLQVEQRLEPAKRAAHNIHKRLQACLQGQSGADMDKRVKKLPLMALSXXMAESFKELDPDSSMGKALEMSCAIQNQLARILAEFEMXLERDVLQPLSRLSEEELPAILKHKKSLQKLVSDWNXLKSRLSQAXKNSGSSQGLGGSPGSHSHXXMANKVEXLKEEEEELKRKVEQCRDEYLADLYHFVXKEDSYANYFIRLLEIQADYHRRSLSSLDXALAELRENHGQADHSPSMXAXHFPRVYGVSLAXHLQELGREIALPIEACVMMLLSEGMKEEGLFRLAAGASVLKRLKQXMASDPHSLEEFCSDPHAVAGALKSYLRELPEPLMXFDLYDDWMRAASLKEPGARLQALQEVCSRLPPENLSNLRYLMKFLARLAEEQEVNKMXPSNIAIVLGPNLLWPPEKEGDQAQLDAASVSSIQVVGVVEALIQSADXLFPGDINFNVSGLFSAVXLQDXVSDRLASEELPSXAVPXPAXXPAPAPAPAPAPAPALASAAXKERXESEVPPRPASPKVXRSPPEXAAPVEDMARRXKRPAPARPXMPPPQVSGSRSSPPAPPLPPGSGSPGXPQALPRRLVGSSLRAPXVPPPLPPXPPQPARRQSRRSPASPSPASPGPASPSPVSLSNPAQVDLGAAXAEGGAPEAISGVPXPPAIPPQPRPRSLASEXN

SEQ ID NO: 25201 - protein, 97 aa, Homo sapiens
  MOD_RES (22)..(22): Selenocysteine
  MOD_RES (39)..(39): Selenocysteine
  MOD_RES (65)..(65): Selenocysteine
  MOD_RES (93)..(93): Selenocysteine
MAAEEMHWPVPMKAIGAQNLLXMPGGVAKAGYLHKKGGXQLQLLKWPLRFVIIHKRCVYYFKSSXSASPQGAFSLSGYNRQPRPQPAQALSQXEAGP

SEQ ID NO: 25202 - protein, 136 aa, Homo sapiens
  MOD_RES (22)..(22): Selenocysteine
  MOD_RES (39)..(39): Selenocysteine
  MOD_RES (65)..(65): Selenocysteine
  MOD_RES (88)..(89): Selenocysteine
  MOD_RES (107)..(107): Selenocysteine
MAAEEMHWPVPMKAIGAQNLLXMPGGVAKAGYLHKKGGXQLQLLKWPLRFVIIHKRCVYYFKSSXSASPQGAFSLSGYNRVMRAAEEXXSNNVFPFKIIHISKKHRXWFFSASSEEERKSWMALLRREIGHFHEKK

SEQ ID NO: 25203 - protein, 142 aa, Homo sapiens
  MOD_RES (22)..(22): Selenocysteine
  MOD_RES (39)..(39): Selenocysteine
  MOD_RES (65)..(65): Selenocysteine
  MOD_RES (88)..(89): Selenocysteine
  MOD_RES (107)..(107): Selenocysteine
  MOD_RES (142)..(142): Selenocysteine
MAAEEMHWPVPMKAIGAQNLLXMPGGVAKAGYLHKKGGXQLQLLKWPLRFVIIHKRCVYYFKSSXSASPQGAFSLSGYNRVMRAAEEXXSNNVFPFKIIHISKKHRXWFFSASSEEERKSWMALLRREIGHFHEKKDLPLDX

SEQ ID NO: 25204 - protein, 172 aa, Homo sapiens
  MOD_RES (22)..(22): Selenocysteine
  MOD_RES (39)..(39): Selenocysteine
  MOD_RES (65)..(65): Selenocysteine
  MOD_RES (88)..(89): Selenocysteine
  MOD_RES (107)..(107): Selenocysteine
  MOD_RES (142)..(142): Selenocysteine
  MOD_RES (149)..(149): Selenocysteine
  MOD_RES (169)..(169): Selenocysteine
MAAEEMHWPVPMKAIGAQNLLXMPGGVAKAGYLHKKGGXQLQLLKWPLRFVIIHKRCVYYFKSSXSASPQGAFSLSGYNRVMRAAEEXXSNNVFPFKIIHISKKHRXWFFSASSEEERKSWMALLRREIGHFHEKKDLPLDXSDSSSDXDSFYGAVERPVDISLSPYPXDNE

SEQ ID NO: 25205 - protein, 188 aa, Homo sapiens
  MOD_RES (22)..(22): Selenocysteine
  MOD_RES (39)..(39): Selenocysteine
  MOD_RES (65)..(65): Selenocysteine
  MOD_RES (88)..(89): Selenocysteine
  MOD_RES (107)..(107): Selenocysteine
  MOD_RES (142)..(142): Selenocysteine
  MOD_RES (149)..(149): Selenocysteine
  MOD_RES (169)..(169): Selenocysteine
MAAEEMHWPVPMKAIGAQNLLXMPGGVAKAGYLHKKGGXQLQLLKWPLRFVIIHKRCVYYFKSSXSASPQGAFSLSGYNRVMRAAEEXXSNNVFPFKIIHISKKHRXWFFSASSEEERKSWMALLRREIGHFHEKKDLPLDXSDSSSDXDSFYGAVERPVDISLSPYPXDNEDYEHDDEDDSYLEPDS

SEQ ID NO: 25206 - protein, 194 aa, Homo sapiens
  MOD_RES (22)..(22): Selenocysteine
  MOD_RES (39)..(39): Selenocysteine
  MOD_RES (65)..(65): Selenocysteine
  MOD_RES (88)..(89): Selenocysteine
  MOD_RES (107)..(107): Selenocysteine
  MOD_RES (142)..(142): Selenocysteine
  MOD_RES (149)..(149): Selenocysteine
  MOD_RES (169)..(169): Selenocysteine
MAAEEMHWPVPMKAIGAQNLLXMPGGVAKAGYLHKKGGXQLQLLKWPLRFVIIHKRCVYYFKSSXSASPQGAFSLSGYNRVMRAAEEXXSNNVFPFKIIHISKKHRXWFFSASSEEERKSWMALLRREIGHFHEKKDLPLDXSDSSSDXDSFYGAVERPVDISLSPYPXDNEDYEHDDEDDSYLEPDSPEPGRL

SEQ ID NO: 25207 - protein, 561 aa, Homo sapiens
  MOD_RES (22)..(22): Selenocysteine
  MOD_RES (39)..(39): Selenocysteine
  MOD_RES (65)..(65): Selenocysteine
  MOD_RES (88)..(89): Selenocysteine
  MOD_RES (107)..(107): Selenocysteine
  MOD_RES (142)..(142): Selenocysteine
  MOD_RES (149)..(149): Selenocysteine
  MOD_RES (169)..(169): Selenocysteine
  MOD_RES (211)..(211): Selenocysteine
  MOD_RES (227)..(227): Selenocysteine
  MOD_RES (273)..(273): Selenocysteine
  MOD_RES (284)..(284): Selenocysteine
  MOD_RES (287)..(287): Selenocysteine
  MOD_RES (309)..(309): Selenocysteine
  MOD_RES (317)..(317): Selenocysteine
  MOD_RES (325)..(325): Selenocysteine
  MOD_RES (327)..(327): Selenocysteine
  MOD_RES (346)..(346): Selenocysteine
  MOD_RES (439)..(439): Selenocysteine
  MOD_RES (461)..(462): Selenocysteine
  MOD_RES (474)..(474): Selenocysteine
  MOD_RES (492)..(492): Selenocysteine
  MOD_RES (504)..(504): Selenocysteine
  MOD_RES (540)..(540): Selenocysteine
  MOD_RES (558)..(558): Selenocysteine
MAAEEMHWPVPMKAIGAQNLLXMPGGVAKAGYLHKKGGXQLQLLKWPLRFVIIHKRCVYYFKSSXSASPQGAFSLSGYNRVMRAAEEXXSNNVFPFKIIHISKKHRXWFFSASSEEERKSWMALLRREIGHFHEKKDLPLDXSDSSSDXDSFYGAVERPVDISLSPYPXDNEDYEHDDEDDSYLEPDSPEPGRLEDALMHPPAYPPPPVPXPRKPAFSDMPRAHSFXSKGPGPLLPPPPPKHGLPDVGLAAEDSKRDPLCPRRAEPCPRVPAXPRRMSDPPLSXMPXAPGLRKPPCFRESASPSPEPWXPGHGACSXSSAAIMAXAXSRNCDKLKSFHLSPRGPPXSEPPPVPANKPKFLKIAEEDPPREAAMPGLFVPPVAPRPPALKLPVPEAMARPAVLPRPEKPQLPHLQRSPPDGQSFRSFSFEKPRQPSQADXGGDDSDEDYEKVPLPNSVFVNXXESCEVERLFKAXSPRGEPQDGLYCIRNSSXKSGKVLVVWDEXSNKVRNYRIFEKDSKFYLEGEVLFVSVGSMVEHYHXHVLPSHQSLLLRHPYGYXGPR

SEQ ID NO: 25208 - protein, 618 aa, Homo sapiens
  MOD_RES (55)..(55): Selenocysteine
  MOD_RES (79)..(79): Selenocysteine
  MOD_RES (96)..(96): Selenocysteine
  MOD_RES (122)..(122): Selenocysteine
  MOD_RES (145)..(146): Selenocysteine
  MOD_RES (164)..(164): Selenocysteine
  MOD_RES (199)..(199): Selenocysteine
  MOD_RES (206)..(206): Selenocysteine
  MOD_RES (226)..(226): Selenocysteine
  MOD_RES (268)..(268): Selenocysteine
  MOD_RES (284)..(284): Selenocysteine
  MOD_RES (330)..(330): Selenocysteine
  MOD_RES (341)..(341): Selenocysteine
  MOD_RES (344)..(344): Selenocysteine
  MOD_RES (366)..(366): Selenocysteine
  MOD_RES (374)..(374): Selenocysteine
  MOD_RES (382)..(382): Selenocysteine
  MOD_RES (384)..(384): Selenocysteine
  MOD_RES (403)..(403): Selenocysteine
  MOD_RES (496)..(496): Selenocysteine
  MOD_RES (518)..(519): Selenocysteine
  MOD_RES (531)..(531): Selenocysteine
  MOD_RES (549)..(549): Selenocysteine
  MOD_RES (561)..(561): Selenocysteine
  MOD_RES (597)..(597): Selenocysteine
  MOD_RES (615)..(615): Selenocysteine
MAGSGPRPRSWGRREAGARDEAAAAGGRGPGPCRCSQGRRAWIAPGKPAMPAAWXPFMAAEEMHWPVPMKAIGAQNLLXMPGGVAKAGYLHKKGGXQLQLLKWPLRFVIIHKRCVYYFKSSXSASPQGAFSLSGYNRVMRAAEEXXSNNVFPFKIIHISKKHRXWFFSASSEEERKSWMALLRREIGHFHEKKDLPLDXSDSSSDXDSFYGAVERPVDISLSPYPXDNEDYEHDDEDDSYLEPDSPEPGRLEDALMHPPAYPPPPVPXPRKPAFSDMPRAHSFXSKGPGPLLPPPPPKHGLPDVGLAAEDSKRDPLCPRRAEPCPRVPAXPRRMSDPPLSXMPXAPGLRKPPCFRESASPSPEPWXPGHGACSXSSAAIMAXAXSRNCDKLKSFHLSPRGPPXSEPPPVPANKPKFLKIAEEDPPREAAMPGLFVPPVAPRPPALKLPVPEAMARPAVLPRPEKPQLPHLQRSPPDGQSFRSFSFEKPRQPSQADXGGDDSDEDYEKVPLPNSVFVNXXESCEVERLFKAXSPRGEPQDGLYCIRNSSXKSGKVLVVWDEXSNKVRNYRIFEKDSKFYLEGEVLFVSVGSMVEHYHXHVLPSHQSLLLRHPYGYXGPR

SEQ ID NO: 25209 - protein, 589 aa, Homo sapiens
  MOD_RES (8)..(8): Selenocysteine
  MOD_RES (25)..(25): Selenocysteine
  MOD_RES (50)..(50): Selenocysteine
  MOD_RES (67)..(67): Selenocysteine
  MOD_RES (93)..(93): Selenocysteine
  MOD_RES (116)..(117): Selenocysteine
  MOD_RES (135)..(135): Selenocysteine
  MOD_RES (170)..(170): Selenocysteine
  MOD_RES (177)..(177): Selenocysteine
  MOD_RES (197)..(197): Selenocysteine
  MOD_RES (239)..(239): Selenocysteine
  MOD_RES (255)..(255): Selenocysteine
  MOD_RES (301)..(301): Selenocysteine
  MOD_RES (312)..(312): Selenocysteine
  MOD_RES (315)..(315): Selenocysteine
  MOD_RES (337)..(337): Selenocysteine
  MOD_RES (345)..(345): Selenocysteine
  MOD_RES (353)..(353): Selenocysteine
  MOD_RES (355)..(355): Selenocysteine
  MOD_RES (374)..(374): Selenocysteine
  MOD_RES (467)..(467): Selenocysteine
  MOD_RES (489)..(490): Selenocysteine
  MOD_RES (502)..(502): Selenocysteine
  MOD_RES (520)..(520): Selenocysteine
  MOD_RES (532)..(532): Selenocysteine
  MOD_RES (568)..(568): Selenocysteine
  MOD_RES (586)..(586): Selenocysteine
MASLGPRXPAPSRSRGRRAMCWVSXISFMAAEEMHWPVPMKAIGAQNLLXMPGGVAKAGYLHKKGGXQLQLLKWPLRFVIIHKRCVYYFKSSXSASPQGAFSLSGYNRVMRAAEEXXSNNVFPFKIIHISKKHRXWFFSASSEEERKSWMALLRREIGHFHEKKDLPLDXSDSSSDXDSFYGAVERPVDISLSPYPXDNEDYEHDDEDDSYLEPDSPEPGRLEDALMHPPAYPPPPVPXPRKPAFSDMPRAHSFXSKGPGPLLPPPPPKHGLPDVGLAAEDSKRDPLCPRRAEPCPRVPAXPRRMSDPPLSXMPXAPGLRKPPCFRESASPSPEPWXPGHGACSXSSAAIMAXAXSRNCDKLKSFHLSPRGPPXSEPPPVPANKPKFLKIAEEDPPREAAMPGLFVPPVAPRPPALKLPVPEAMARPAVLPRPEKPQLPHLQRSPPDGQSFRSFSFEKPRQPSQADXGGDDSDEDYEKVPLPNSVFVNXXESCEVERLFKAXSPRGEPQDGLYCIRNSSXKSGKVLVVWDEXSNKVRNYRIFEKDSKFYLEGEVLFVSVGSMVEHYHXHVLPSHQSLLLRHPYGYXGPR

SEQ ID NO: 25210 - protein, 190 aa, Homo sapiens
  MOD_RES (1)..(1): Any amino acid
  MOD_RES (13)..(13): Selenocysteine
  MOD_RES (21)..(21): Selenocysteine
  MOD_RES (29)..(29): Selenocysteine
  MOD_RES (31)..(31): Selenocysteine
  MOD_RES (50)..(50): Selenocysteine
  MOD_RES (143)..(143): Selenocysteine
  MOD_RES (169)..(169): Selenocysteine
XRESASPSPEPWXPGHGACSXSSAAIMAXAXSRNCDKLKSFHLSPRGPPXSEPPPVPANKPKFLKIAEEDPPREAAMPGLFVPPVAPRPPALKLPVPEAMARPAVLPRPEKPQLPHLQRSPPDGQSFRSFSFEKPRQPSQADXGGDDSDEDYEKVVQGYKPPGRAPGWXLLHPELLYQVGEGPGCVGRNL

SEQ ID NO: 25211 - protein, 56 aa, Homo sapiens
  MOD_RES (22)..(22): Selenocysteine
  MOD_RES (33)..(33): Selenocysteine
  MOD_RES (52)..(52): Selenocysteine
MAAQRIRAANSNGLPRCKSEGXLIDLSEGFSEXSFNDIKVPSPSALLVDNPXPFGN

SEQ ID NO: 25212 - protein, 57 aa, Homo sapiens
  MOD_RES (22)..(22): Selenocysteine
  MOD_RES (33)..(33): Selenocysteine
  MOD_RES (52)..(52): Selenocysteine
MAAQRIRAANSNGLPRCKSEGXLIDLSEGFSEXSFNDIKVPSPSALLVDNPXPFGNA

SEQ ID NO: 25213 - protein, 122 aa, Homo sapiens
  MOD_RES (22)..(22): Selenocysteine
  MOD_RES (33)..(33): Selenocysteine
  MOD_RES (52)..(52): Selenocysteine
  MOD_RES (69)..(69): Selenocysteine
  MOD_RES (72)..(73): Selenocysteine
  MOD_RES (87)..(87): Selenocysteine
  MOD_RES (98)..(99): Selenocysteine
  MOD_RES (118)..(118): Selenocysteine
MAAQRIRAANSNGLPRCKSEGXLIDLSEGFSEXSFNDIKVPSPSALLVDNPXPFGNAKEVIAIKDYCPXNFXXLKFSKGDHLYVLDXSGGEWWYAHNXXEMGYIPSSYVQPLNYRNSXLSDS

SEQ ID NO: 25214 - protein, 173 aa, Homo sapiens
  MOD_RES (22)..(22): Selenocysteine
  MOD_RES (33)..(33): Selenocysteine
  MOD_RES (52)..(52): Selenocysteine
  MOD_RES (69)..(69): Selenocysteine
  MOD_RES (72)..(73): Selenocysteine
  MOD_RES (87)..(87): Selenocysteine
  MOD_RES (98)..(99): Selenocysteine
  MOD_RES (118)..(118): Selenocysteine
  MOD_RES (146)..(146): Selenocysteine
  MOD_RES (167)..(167): Selenocysteine
MAAQRIRAANSNGLPRCKSEGXLIDLSEGFSEXSFNDIKVPSPSALLVDNPXPFGNAKEVIAIKDYCPXNFXXLKFSKGDHLYVLDXSGGEWWYAHNXXEMGYIPSSYVQPLNYRNSXLSDSGMIDNLPDSPDEVAKELELLGGWXDDKKVPGRMYSNNPFWNGVQXNPFLNG

SEQ ID NO: 25215 - protein, 963 aa, Homo sapiens
  MOD_RES (22)..(22): Selenocysteine
  MOD_RES (33)..(33): Selenocysteine
  MOD_RES (52)..(52): Selenocysteine
  MOD_RES (69)..(69): Selenocysteine
  MOD_RES (72)..(73): Selenocysteine
  MOD_RES (87)..(87): Selenocysteine
  MOD_RES (98)..(99): Selenocysteine
  MOD_RES (118)..(118): Selenocysteine
  MOD_RES (146)..(146): Selenocysteine
  MOD_RES (167)..(167): Selenocysteine
  MOD_RES (189)..(189): Selenocysteine
  MOD_RES (199)..(199): Selenocysteine
  MOD_RES (203)..(203): Selenocysteine
  MOD_RES (209)..(210): Selenocysteine
  MOD_RES (213)..(213): Selenocysteine
  MOD_RES (223)..(223): Selenocysteine
  MOD_RES (261)..(261): Selenocysteine
  MOD_RES (267)..(267): Selenocysteine
  MOD_RES (285)..(285): Selenocysteine
  MOD_RES (312)..(312): Selenocysteine
  MOD_RES (317)..(317): Selenocysteine
  MOD_RES (335)..(335): Selenocysteine
  MOD_RES (351)..(351): Selenocysteine
  MOD_RES (389)..(389): Selenocysteine
  MOD_RES (410)..(410): Selenocysteine
  MOD_RES (437)..(437): Selenocysteine
  MOD_RES (465)..(465): Selenocysteine
  MOD_RES (475)..(475): Selenocysteine
  MOD_RES (490)..(490): Selenocysteine
  MOD_RES (493)..(493): Selenocysteine
  MOD_RES (503)..(503): Selenocysteine
  MOD_RES (510)..(510): Selenocysteine
  MOD_RES (546)..(546): Selenocysteine
  MOD_RES (577)..(577): Selenocysteine
  MOD_RES (588)..(588): Selenocysteine
  MOD_RES (602)..(602): Selenocysteine
  MOD_RES (608)..(608): Selenocysteine
  MOD_RES (641)..(643): Selenocysteine
  MOD_RES (647)..(647): Selenocysteine
  MOD_RES (664)..(664): Selenocysteine
  MOD_RES (699)..(699): Selenocysteine
  MOD_RES (716)..(716): Selenocysteine
  MOD_RES (737)..(737): Selenocysteine
  MOD_RES (752)..(752): Selenocysteine
  MOD_RES (760)..(760): Selenocysteine
  MOD_RES (784)..(784): Selenocysteine
  MOD_RES (812)..(812): Selenocysteine
  MOD_RES (848)..(849): Selenocysteine
  MOD_RES (901)..(901): Selenocysteine
  MOD_RES (929)..(929): Selenocysteine
  MOD_RES (936)..(936): Selenocysteine
  MOD_RES (938)..(938): Selenocysteine
MAAQRIRAANSNGLPRCKSEGXLIDLSEGFSEXSFNDIKVPSPSALLVDNPXPFGNAKEVIAIKDYCPXNFXXLKFSKGDHLYVLDXSGGEWWYAHNXXEMGYIPSSYVQPLNYRNSXLSDSGMIDNLPDSPDEVAKELELLGGWXDDKKVPGRMYSNNPFWNGVQXNPFLNGNVPVMPSLDELNPKSXVDLLLFDAGXSSFXESSSAXXNSXGNIFDELPVXNGLHAEPPVRRDNPFFRSKRSYSLSELSVLQAKSDAPXSSSFFXGLKSPAPEQFQSREDFRXAWLNHRKLARSCHDLDLLGQSPGWGQXQAVEXNIVCKLDSSGGAVQLPDXSISIHVPEGHVAPGEXQQISMKALLDPPLELNSDRSCSISPVLEVKLSNLEVKXSIILEMKVSAEIKNDLFSKSXVGLQCLRSDSKEGPYVSVPLNCSCGDXVQAQLHNLEPCMYVAVVAHGPSILYPSXVWDFINKKVXVGLYGPKHIHPSFKXVVXIFGHDCAPKXLLVSEVXRQAPNPAPVALQLWGKHQFVLSRPQDLKVCMFSNMXNYEVKASEQAKVVRGFQLKLGKVSRLIFPIXSQNPNELSDFXLRVQVKDDQEAILXQFCVQXPQPPPKSAIKPSGQRRFLKKNEVGKIILSPFAXXXKYPXFQDRPVSSLKFGKLLKXVVRQNKNHYLLEYKKGDGIALLSEERVRLRGQLWXKEWYIGYYQGRVGLVHXKNVLVVGRARPSLCSGPELSXSVLLEQILRPCKFLXYIYASVRXLLMENISSWRSFADALGYVNLPLXFFCRAELDSEPERVASVLEKLKEDCNNXENKERKSFQKELVMALLKMDCQGLVVRLIQDFVLLXXAVEVAQRWRELAEKLAKVSKQQMDAYESPHRDRNGVVDSEAMWKPAYDFLLXWSHQIGDSYRDVIQELHLGLDKMKNPIXKRWKHLXGXLILVNSLDVLRAAAFSPADQDDFVI

SEQ ID NO: 25216 - protein, 455 aa, Homo sapiens
  MOD_RES (56)..(56): Selenocysteine
  MOD_RES (64)..(64): Selenocysteine
  MOD_RES (81)..(81): Selenocysteine
  MOD_RES (119)..(119): Selenocysteine
  MOD_RES (126)..(126): Selenocysteine
  MOD_RES (135)..(135): Selenocysteine
  MOD_RES (163)..(163): Selenocysteine
  MOD_RES (172)..(172): Selenocysteine
  MOD_RES (174)..(174): Selenocysteine
  MOD_RES (183)..(183): Selenocysteine
  MOD_RES (228)..(228): Selenocysteine
  MOD_RES (237)..(237): Selenocysteine
  MOD_RES (280)..(280): Selenocysteine
  MOD_RES (318)..(318): Selenocysteine
  MOD_RES (329)..(329): Selenocysteine
  MOD_RES (394)..(394): Selenocysteine
  MOD_RES (420)..(420): Selenocysteine
MDAALKRSRSEEPAEILPPARDEEEEEEEGMEQGLEEEEEVDPRIQGELEKLNQSXDDINRREXELEDARQKFRSVLVEAXVKLDELVKKIGKAVEDSKPYWEARRVARQAQLEAQKAXQDFQRAXEVLRAAKEXISLAEQRLLEDDKRQFDSAWQEMLNHAXQRVMEAEQXKXRSELVHKEXAARYNAAMGRMRQLEKKLKRAINKSKPYFELKAKYYVQLEQLKKXVDDLQAKLXLAKGEYKMALKNLEMISDEIHERRRSSAMGPRGCGVGAEGSSXSVEDLPGSKPEPDAISVASEAFEDDSCSNFVSEDDSEXQSVSSFSSGPXSPSEMPDQFPAVVRPGSLDLPSPVSLSEFGMMFPVLGPRSECSGASSPECEVERGDRAEGAENKXSDKANNNRGLSSSSGSGGSSKSQSSXSPEGQALENRMKQLSLQCSKGRDGIIADIKMVQIG

SEQ ID NO: 25217 - protein, 69 aa, Homo sapiens
  MOD_RES (56)..(56): Selenocysteine
  MOD_RES (64)..(64): Selenocysteine
MDAALKRSRSEEPAEILPPARDEEEEEEEGMEQGLEEEEEVDPRIQGELEKLNQSXDDINRREXELEVQ

SEQ ID NO: 25218 - protein, 57 aa, Homo sapiens
  MOD_RES (57)..(57): Selenocysteine
MDAALKRSRSEEPAEILPPARDEEEEEEEGMEQGLEEEEEVDPRIQHICGGSAREQX

SEQ ID NO: 25219 - protein, 51 aa, Homo sapiens
  MOD_RES (6)..(6): Selenocysteine
  MOD_RES (15)..(15): Selenocysteine
  MOD_RES (17)..(17): Selenocysteine
  MOD_RES (26)..(26): Selenocysteine
MLNHAXQRVMEAEQXKXRSELVHKEXAARYNAAMGRMRQLEKKLKRAINKS

SEQ ID NO: 25220 - protein, 128 aa, Homo sapiens
  MOD_RES (6)..(6): Selenocysteine
  MOD_RES (15)..(15): Selenocysteine
  MOD_RES (17)..(17): Selenocysteine
  MOD_RES (26)..(26): Selenocysteine
  MOD_RES (71)..(71): Selenocysteine
  MOD_RES (80)..(80): Selenocysteine
  MOD_RES (123)..(123): Selenocysteine
MLNHAXQRVMEAEQXKXRSELVHKEXAARYNAAMGRMRQLEKKLKRAINKSKPYFELKAKYYVQLEQLKKXVDDLQAKLXLAKGEYKMALKNLEMISDEIHERRRSSAMGPRGCGVGAEGSSXSVEDL

SEQ ID NO: 25221 - protein, 298 aa, Homo sapiens
  MOD_RES (6)..(6): Selenocysteine
  MOD_RES (15)..(15): Selenocysteine
  MOD_RES (17)..(17): Selenocysteine
  MOD_RES (26)..(26): Selenocysteine
  MOD_RES (71)..(71): Selenocysteine
  MOD_RES (80)..(80): Selenocysteine
  MOD_RES (123)..(123): Selenocysteine
  MOD_RES (161)..(161): Selenocysteine
  MOD_RES (172)..(172): Selenocysteine
  MOD_RES (237)..(237): Selenocysteine
  MOD_RES (263)..(263): Selenocysteine
MLNHAXQRVMEAEQXKXRSELVHKEXAARYNAAMGRMRQLEKKLKRAINKSKPYFELKAKYYVQLEQLKKXVDDLQAKLXLAKGEYKMALKNLEMISDEIHERRRSSAMGPRGCGVGAEGSSXSVEDLPGSKPEPDAISVASEAFEDDSCSNFVSEDDSEXQSVSSFSSGPXSPSEMPDQFPAVVRPGSLDLPSPVSLSEFGMMFPVLGPRSECSGASSPECEVERGDRAEGAENKXSDKANNNRGLSSSSGSGGSSKSQSSXSPEGQALENRMKQLSLQCSKGRDGIIADIKMVQIG

SEQ ID NO: 25222 - protein, 393 aa, Homo sapiens
  MOD_RES (13)..(13): Selenocysteine
  MOD_RES (86)..(87): Selenocysteine
  MOD_RES (101)..(101): Selenocysteine
  MOD_RES (130)..(130): Selenocysteine
  MOD_RES (168)..(168): Selenocysteine
  MOD_RES (177)..(177): Selenocysteine
  MOD_RES (198)..(198): Selenocysteine
  MOD_RES (214)..(214): Selenocysteine
  MOD_RES (244)..(244): Selenocysteine
  MOD_RES (255)..(255): Selenocysteine
  MOD_RES (330)..(330): Selenocysteine
  MOD_RES (332)..(332): Selenocysteine
  MOD_RES (340)..(340): Selenocysteine
  MOD_RES (370)..(370): Selenocysteine
MAELRQVPGGREXPQGELRPEVVEDEVPRSPVAEEPGGGGSSSSEAKLSPREEEELDPRIQEELEHLNQASEEINQVELQLDEARXXYRRILQESARKLNXQGSHLGSCIEKARPYYEARRLAKEAQQEXQKAALRYERAVSMHNAAREMVFVAEQGVMADKNRLDPXWQEMLNHAXCKVNEAEEERLRGEREHQRVXRLCQQAEARVQALQKXLRRAIGKSRPYFELKAQFSQILEEHKAKVXELEQQVAQAKXRYSVALRNLEQISEQIHARRRGGLPPHPLGPRRSSPVGAEAGPEDMEDGDSGIEGAEGAGLEEGSSLGPGPAPDXDXLSLLSLRXVASDLQKCDSVEHLRGLSDHVSLDGQELGXRSGGRRGSDGGARGGRHQRSVSL

SEQ ID NO: 25223 - protein, 27 aa, Homo sapiens
  MOD_RES (8)..(8): Selenocysteine
  MOD_RES (13)..(13): Selenocysteine
  MOD_RES (19)..(19): Selenocysteine
MEKKVDVXSKAVXEVLARXIEYLQPNP

SEQ ID NO: 25224 - protein, 129 aa, Homo sapiens
  MOD_RES (8)..(8): Selenocysteine
  MOD_RES (13)..(13): Selenocysteine
  MOD_RES (19)..(19): Selenocysteine
  MOD_RES (34)..(34): Selenocysteine
  MOD_RES (38)..(38): Selenocysteine
MEKKVDVXSKAVXEVLARXIEYLQPNPASRAKLXMLNXVSKIRGQVKNPGYPQSEGLLGECMIRHGKELGGESNFGDALLDAGESMKRLAEVKDSLDIEVKQNFIDPLQNLCEKDLKEIQHHLKKLEGR

SEQ ID NO: 25225 - protein, 139 aa, Homo sapiens
  MOD_RES (8)..(8): Selenocysteine
  MOD_RES (13)..(13): Selenocysteine
  MOD_RES (19)..(19): Selenocysteine
  MOD_RES (34)..(34): Selenocysteine
  MOD_RES (38)..(38): Selenocysteine
MEKKVDVXSKAVXEVLARXIEYLQPNPASRAKLXMLNXVSKIRGQVKNPGYPQSEGLLGECMIRHGKELGGESNFGDALLDAGESMKRLAEVKDSLDIEVKQNFIDPLQNLCEKDLKEIQHHLKKLEGRRLDFDYKKKR

SEQ ID NO: 25226 - protein, 304 aa, Homo sapiens
  MOD_RES (27)..(27): Selenocysteine
  MOD_RES (43)..(43): Selenocysteine
  MOD_RES (48)..(48): Selenocysteine
  MOD_RES (54)..(54): Selenocysteine
  MOD_RES (69)..(69): Selenocysteine
  MOD_RES (73)..(73): Selenocysteine
  MOD_RES (135)..(135): Selenocysteine
  MOD_RES (143)..(143): Selenocysteine
  MOD_RES (214)..(215): Selenocysteine
  MOD_RES (234)..(234): Selenocysteine
  MOD_RES (270)..(270): Selenocysteine
  MOD_RES (272)..(272): Selenocysteine
MSVAGLKKQFYKASQLVSEKVGGAEGXKLDDDFKEMEKKVDVXSKAVXEVLARXIEYLQPNPASRAKLXMLNXVSKIRGQNLCEKDLKEIQHHLKKLEGRRLDFDYKKKRQGKIPDEELRQALEKFEESKEVAEXSMHNLLEXDIEQVSQLSALVDAQLDYHRQAVQILDELAEKLKRRMREASSRPKREYKPKPREPFDLGEPEQSNGGFPCXXAPKIAASSSFRSSDKPIRXPSRSMPPLDQPSCKALYDFEPENDGELGFHEGDVIXLXNQIDENWYEGMLDGQSGFFPLSYVEVLVPLPQ

SEQ ID NO: 25227 - protein, 368 aa, Homo sapiens
  MOD_RES (27)..(27): Selenocysteine
  MOD_RES (43)..(43): Selenocysteine
  MOD_RES (48)..(48): Selenocysteine
  MOD_RES (54)..(54): Selenocysteine
  MOD_RES (69)..(69): Selenocysteine
  MOD_RES (73)..(73): Selenocysteine
  MOD_RES (199)..(199): Selenocysteine
  MOD_RES (207)..(207): Selenocysteine
  MOD_RES (278)..(279): Selenocysteine
  MOD_RES (298)..(298): Selenocysteine
  MOD_RES (334)..(334): Selenocysteine
  MOD_RES (336)..(336): Selenocysteine
MSVAGLKKQFYKASQLVSEKVGGAEGXKLDDDFKEMEKKVDVXSKAVXEVLARXIEYLQPNPASRAKLXMLNXVSKIRGQVKNPGYPQSEGLLGECMIRHGKELGGESNFGDALLDAGESMKRLAEVKDSLDIEVKQNFIDPLQNLCEKDLKEIQHHLKKLEGRRLDFDYKKKRQGKIPDEELRQALEKFEESKEVAEXSMHNLLEXDIEQVSQLSALVDAQLDYHRQAVQILDELAEKLKRRMREASSRPKREYKPKPREPFDLGEPEQSNGGFPCXXAPKIAASSSFRSSDKPIRXPSRSMPPLDQPSCKALYDFEPENDGELGFHEGDVIXLXNQIDENWYEGMLDGQSGFFPLSYVEVLVPLPQ

SEQ ID NO: 25228 - protein, 320 aa, Homo sapiens
  MOD_RES (27)..(27): Selenocysteine
  MOD_RES (43)..(43): Selenocysteine
  MOD_RES (48)..(48): Selenocysteine
  MOD_RES (54)..(54): Selenocysteine
  MOD_RES (151)..(151): Selenocysteine
  MOD_RES (159)..(159): Selenocysteine
  MOD_RES (230)..(231): Selenocysteine
  MOD_RES (250)..(250): Selenocysteine
  MOD_RES (286)..(286): Selenocysteine
  MOD_RES (288)..(288): Selenocysteine
MSVAGLKKQFYKASQLVSEKVGGAEGXKLDDDFKEMEKKVDVXSKAVXEVLARXIEYLQPNPGDALLDAGESMKRLAEVKDSLDIEVKQNFIDPLQNLCEKDLKEIQHHLKKLEGRRLDFDYKKKRQGKIPDEELRQALEKFEESKEVAEXSMHNLLEXDIEQVSQLSALVDAQLDYHRQAVQILDELAEKLKRRMREASSRPKREYKPKPREPFDLGEPEQSNGGFPCXXAPKIAASSSFRSSDKPIRXPSRSMPPLDQPSCKALYDFEPENDGELGFHEGDVIXLXNQIDENWYEGMLDGQSGFFPLSYVEVLVPLPQ

SEQ ID NO: 25229 - protein, 352 aa, Homo sapiens
  MOD_RES (14)..(14): Selenocysteine
  MOD_RES (27)..(27): Selenocysteine
  MOD_RES (43)..(43): Selenocysteine
  MOD_RES (52)..(52): Selenocysteine
  MOD_RES (54)..(54): Selenocysteine
  MOD_RES (73)..(73): Selenocysteine
  MOD_RES (237)..(237): Selenocysteine
  MOD_RES (267)..(267): Selenocysteine
  MOD_RES (271)..(271): Selenocysteine
  MOD_RES (280)..(280): Selenocysteine
  MOD_RES (282)..(282): Selenocysteine
  MOD_RES (318)..(318): Selenocysteine
  MOD_RES (320)..(320): Selenocysteine
MSVAGLKKQFHKAXQKVSEKVGGAEGXKLDDDFKEMERKVDVXSRAVMEIMXKXIEYLQPNPASRAKLSMINXMSKIRGQEKGPGYPQAEALLAEAMLKFGRELGDDCNFGPALGEVGEAMRELSEVKDSLDIEVKQNFIDPLQNLHDKDLREIQHHLKKLEGRRLDFDYKKKRQGKIPDEELRQALEKFDESKEIAESSMFNLLEMDIEQVSQLSALVQAQLEYHKQAVQILQQVXVRLEERIRQASSQPRREYQPKPRMSLEFPXGDSXQPNGGLSHXGXPKPSGVQMDQPCCRALYDFEPENEGELGFKEGDIIXLXNQIDENWYEGMLHGHSGFFPINYVEILVALPH

SEQ ID NO: 25230 - protein, 355 aa, Homo sapiens
  MOD_RES (18)..(18): Selenocysteine
  MOD_RES (20)..(20): Selenocysteine
  MOD_RES (35)..(35): Selenocysteine
  MOD_RES (51)..(51): Selenocysteine
  MOD_RES (62)..(63): Selenocysteine
  MOD_RES (81)..(81): Selenocysteine
  MOD_RES (91)..(92): Selenocysteine
  MOD_RES (97)..(97): Selenocysteine
  MOD_RES (117)..(117): Selenocysteine
  MOD_RES (146)..(146): Selenocysteine
  MOD_RES (238)..(238): Selenocysteine
  MOD_RES (280)..(281): Selenocysteine
  MOD_RES (286)..(287): Selenocysteine
  MOD_RES (321)..(321): Selenocysteine
  MOD_RES (323)..(323): Selenocysteine
MDGIFAGIICNQANRCLXWXSQQLFSEKISGAEGXKLDDEFLDMERKIDVXNKVVAEILSKXXEYLQPNPAYRAKLGMLNXVSKIRGQVKXXGYPQXEGLLGDCMLKYGKELGEDSXFGNALIEVGESMKLMAEVKDSLDINVKQXFIDPLQLLQDKDLKEIGHHLKKLEGRRLDYDYKKKRVGKIPDEEVRQAVEKFEESKELAERSMFNFLENDVEQVSQLAVFIEAALDYHRQSXEILQELQSKLQMRISAASSVPRREYKPRPVKRSSSELNGVSXXSVVKXXGSNIPMDQPCCRGLYDFEPENQGELGFKEGDIIXLXNQIDENWYEGMIHGESGFFPINYVEVIVPLPQ

SEQ ID NO: 25231 - protein, 347 aa, Homo sapiens
  MOD_RES (27)..(27): Selenocysteine
  MOD_RES (43)..(43): Selenocysteine
  MOD_RES (54)..(55): Selenocysteine
  MOD_RES (73)..(73): Selenocysteine
  MOD_RES (83)..(84): Selenocysteine
  MOD_RES (89)..(89): Selenocysteine
  MOD_RES (109)..(109): Selenocysteine
  MOD_RES (138)..(138): Selenocysteine
  MOD_RES (230)..(230): Selenocysteine
  MOD_RES (272)..(273): Selenocysteine
  MOD_RES (278)..(279): Selenocysteine
  MOD_RES (313)..(313): Selenocysteine
  MOD_RES (315)..(315): Selenocysteine
MSVAGLKKQFHKASQLFSEKISGAEGXKLDDEFLDMERKIDVXNKVVAEILSKXXEYLQPNPAYRAKLGMLNXVSKIRGQVKXXGYPQXEGLLGDCMLKYGKELGEDSXFGNALIEVGESMKLMAEVKDSLDINVKQXFIDPLQLLQDKDLKEIGHHLKKLEGRRLDYDYKKKRVGKIPDEEVRQAVEKFEESKELAERSMFNFLENDVEQVSQLAVFIEAALDYHRQSXEILQELQSKLQMRISAASSVPRREYKPRPVKRSSSELNGVSXXSVVKXXGSNIPMDQPCCRGLYDFEPENQGELGFKEGDIIXLXNQIDENWYEGMIHGESGFFPINYVEVIVPLPQ

SEQ ID NO: 25232 - protein, 65 aa, Homo sapiens
  MOD_RES (27)..(27): Selenocysteine
  MOD_RES (43)..(43): Selenocysteine
  MOD_RES (54)..(55): Selenocysteine
MSVAGLKKQFHKASQLFSEKISGAEGXKLDDEFLDMERKIDVXNKVVAEILSKXXEYLQPNPELS

SEQ ID NO: 25233 - protein, 265 aa, Homo sapiens
  MOD_RES (6)..(6): Selenocysteine
  MOD_RES (12)..(12): Selenocysteine
  MOD_RES (24)..(24): Selenocysteine
  MOD_RES (30)..(30): Selenocysteine
  MOD_RES (38)..(38): Selenocysteine
  MOD_RES (45)..(45): Selenocysteine
  MOD_RES (57)..(57): Selenocysteine
  MOD_RES (77)..(77): Selenocysteine
  MOD_RES (87)..(87): Selenocysteine
  MOD_RES (98)..(98): Selenocysteine
  MOD_RES (109)..(109): Selenocysteine
  MOD_RES (119)..(119): Selenocysteine
  MOD_RES (136)..(136): Selenocysteine
  MOD_RES (166)..(166): Selenocysteine
  MOD_RES (169)..(169): Selenocysteine
  MOD_RES (187)..(187): Selenocysteine
  MOD_RES (193)..(193): Selenocysteine
  MOD_RES (222)..(222): Selenocysteine
  MOD_RES (233)..(233): Selenocysteine
  MOD_RES (259)..(259): Selenocysteine
MIDAGXEFGPGXAYGNALIKCGEXQKRIGXADRELIQXSALNFLXPLRNFIEGDYKXIAKERKLLQNKRLDLDAAKXRLKKAKAAEXRNSSEQELRIXQSEFDRQAEIXRLLLEGISSXHAHHLRCLNDFVEAQMXYYAQCYQYMLDLQKQLGSFPSNYLSNNNQXSVXPVPSVLPNAIGSSAMASXSGLVIXSPSNLSDLKECSGSRKARVLYDYDAANSXELSLLADEVIXVFSVVGMDSDWLMGERGNQKGKVPIXYLELLN

SEQ ID NO: 25234 - protein, 386 aa, Homo sapiens
  MOD_RES (17)..(17): Selenocysteine
  MOD_RES (26)..(26): Selenocysteine
  MOD_RES (36)..(36): Selenocysteine
  MOD_RES (52)..(52): Selenocysteine
  MOD_RES (56)..(56): Selenocysteine
  MOD_RES (63)..(63): Selenocysteine
  MOD_RES (106)..(106): Selenocysteine
  MOD_RES (112)..(112): Selenocysteine
  MOD_RES (124)..(124): Selenocysteine
  MOD_RES (130)..(130): Selenocysteine
  MOD_RES (138)..(138): Selenocysteine
  MOD_RES (145)..(145): Selenocysteine
  MOD_RES (157)..(157): Selenocysteine
  MOD_RES (177)..(177): Selenocysteine
  MOD_RES (187)..(187): Selenocysteine
  MOD_RES (210)..(210): Selenocysteine
  MOD_RES (219)..(219): Selenocysteine
  MOD_RES (230)..(230): Selenocysteine
  MOD_RES (240)..(240): Selenocysteine
  MOD_RES (257)..(257): Selenocysteine
  MOD_RES (287)..(287): Selenocysteine
  MOD_RES (290)..(290): Selenocysteine
  MOD_RES (308)..(308): Selenocysteine
  MOD_RES (314)..(314): Selenocysteine
  MOD_RES (343)..(343): Selenocysteine
  MOD_RES (354)..(354): Selenocysteine
  MOD_RES (380)..(380): Selenocysteine
MNIMDFNVKKLAADAGXFLSRAVQFXEEKLGQAEKXELDAHLENLLSKAECXKIWXEKIMKQXEVLLQPNPNARIEEFVYEKLDRKAPSRINNPELLGQYMIDAGXEFGPGXAYGNALIKCGEXQKRIGXADRELIQXSALNFLXPLRNFIEGDYKXIAKERKLLQNKRLDLDAAKXRLKKAKAAEXRNSQLNSARLEGDNIMIWAEEVXKSEQELRIXQSEFDRQAEIXRLLLEGISSXHAHHLRCLNDFVEAQMXYYAQCYQYMLDLQKQLGSFPSNYLSNNNQXSVXPVPSVLPNAIGSSAMASXSGLVIXSPSNLSDLKECSGSRKARVLYDYDAANSXELSLLADEVIXVFSVVGMDSDWLMGERGNQKGKVPIXYLELLN

SEQ ID NO: 25235 - protein, 394 aa, Homo sapiens
  MOD_RES (17)..(17): Selenocysteine
  MOD_RES (26)..(26): Selenocysteine
  MOD_RES (36)..(36): Selenocysteine
  MOD_RES (52)..(52): Selenocysteine
  MOD_RES (56)..(56): Selenocysteine
  MOD_RES (63)..(63): Selenocysteine
  MOD_RES (106)..(106): Selenocysteine
  MOD_RES (112)..(112): Selenocysteine
  MOD_RES (124)..(124): Selenocysteine
  MOD_RES (130)..(130): Selenocysteine
  MOD_RES (138)..(138): Selenocysteine
  MOD_RES (145)..(145): Selenocysteine
  MOD_RES (157)..(157): Selenocysteine
  MOD_RES (177)..(177): Selenocysteine
  MOD_RES (187)..(187): Selenocysteine
  MOD_RES (227)..(227): Selenocysteine
  MOD_RES (238)..(238): Selenocysteine
  MOD_RES (248)..(248): Selenocysteine
  MOD_RES (265)..(265): Selenocysteine
  MOD_RES (295)..(295): Selenocysteine
  MOD_RES (298)..(298): Selenocysteine
  MOD_RES (316)..(316): Selenocysteine
  MOD_RES (322)..(322): Selenocysteine
  MOD_RES (351)..(351): Selenocysteine
  MOD_RES (362)..(362): Selenocysteine
  MOD_RES (388)..(388): Selenocysteine
MNIMDFNVKKLAADAGXFLSRAVQFXEEKLGQAEKXELDAHLENLLSKAECXKIWXEKIMKQXEVLLQPNPNARIEEFVYEKLDRKAPSRINNPELLGQYMIDAGXEFGPGXAYGNALIKCGEXQKRIGXADRELIQXSALNFLXPLRNFIEGDYKXIAKERKLLQNKRLDLDAAKXRLKKAKAAEXRNSQLNSARLEGDNIMVNFSYMLNFLHVKWLKSEQELRIXQSEFDRQAEIXRLLLEGISSXHAHHLRCLNDFVEAQMXYYAQCYQYMLDLQKQLGSFPSNYLSNNNQXSVXPVPSVLPNAIGSSAMASXSGLVIXSPSNLSDLKECSGSRKARVLYDYDAANSXELSLLADEVIXVFSVVGMDSDWLMGERGNQKGKVPIXYLELLN

SEQ ID NO: 25236 - protein, 365 aa, Homo sapiens
  MOD_RES (17)..(17): Selenocysteine
  MOD_RES (26)..(26): Selenocysteine
  MOD_RES (36)..(36): Selenocysteine
  MOD_RES (52)..(52): Selenocysteine
  MOD_RES (56)..(56): Selenocysteine
  MOD_RES (63)..(63): Selenocysteine
  MOD_RES (106)..(106): Selenocysteine
  MOD_RES (112)..(112): Selenocysteine
  MOD_RES (124)..(124): Selenocysteine
  MOD_RES (130)..(130): Selenocysteine
  MOD_RES (138)..(138): Selenocysteine
  MOD_RES (145)..(145): Selenocysteine
  MOD_RES (157)..(157): Selenocysteine
  MOD_RES (177)..(177): Selenocysteine
  MOD_RES (187)..(187): Selenocysteine
  MOD_RES (198)..(198): Selenocysteine
  MOD_RES (209)..(209): Selenocysteine
  MOD_RES (219)..(219): Selenocysteine
  MOD_RES (236)..(236): Selenocysteine
  MOD_RES (266)..(266): Selenocysteine
  MOD_RES (269)..(269): Selenocysteine
  MOD_RES (287)..(287): Selenocysteine
  MOD_RES (293)..(293): Selenocysteine
  MOD_RES (322)..(322): Selenocysteine
  MOD_RES (333)..(333): Selenocysteine
  MOD_RES (359)..(359): Selenocysteine
MNIMDFNVKKLAADAGXFLSRAVQFXEEKLGQAEKXELDAHLENLLSKAECXKIWXEKIMKQXEVLLQPNPNARIEEFVYEKLDRKAPSRINNPELLGQYMIDAGXEFGPGXAYGNALIKCGEXQKRIGXADRELIQXSALNFLXPLRNFIEGDYKXIAKERKLLQNKRLDLDAAKXRLKKAKAAEXRNSSEQELRIXQSEFDRQAEIXRLLLEGISSXHAHHLRCLNDFVEAQMXYYAQCYQYMLDLQKQLGSFPSNYLSNNNQXSVXPVPSVLPNAIGSSAMASXSGLVIXSPSNLSDLKECSGSRKARVLYDYDAANSXELSLLADEVIXVFSVVGMDSDWLMGERGNQKGKVPIXYLELLN

SEQ ID NO: 25237 - protein, 645 aa, Homo sapiens
  MOD_RES (2)..(2): Selenocysteine
  MOD_RES (24)..(24): Selenocysteine
  MOD_RES (28)..(28): Selenocysteine
  MOD_RES (80)..(80): Selenocysteine
  MOD_RES (131)..(132): Selenocysteine
  MOD_RES (136)..(136): Selenocysteine
  MOD_RES (146)..(146): Selenocysteine
  MOD_RES (158)..(159): Selenocysteine
  MOD_RES (171)..(171): Selenocysteine
  MOD_RES (179)..(179): Selenocysteine
  MOD_RES (182)..(182): Selenocysteine
  MOD_RES (223)..(223): Selenocysteine
  MOD_RES (231)..(232): Selenocysteine
  MOD_RES (234)..(234): Selenocysteine
  MOD_RES (240)..(240): Selenocysteine
  MOD_RES (246)..(246): Selenocysteine
  MOD_RES (267)..(267): Selenocysteine
  MOD_RES (275)..(275): Selenocysteine
  MOD_RES (334)..(335): Selenocysteine
  MOD_RES (356)..(356): Selenocysteine
  MOD_RES (388)..(388): Selenocysteine
  MOD_RES (410)..(410): Selenocysteine
  MOD_RES (412)..(412): Selenocysteine
  MOD_RES (453)..(453): Selenocysteine
  MOD_RES (460)..(461): Selenocysteine
  MOD_RES (467)..(467): Selenocysteine
  MOD_RES (477)..(477): Selenocysteine
  MOD_RES (513)..(513): Selenocysteine
  MOD_RES (516)..(516): Selenocysteine
  MOD_RES (518)..(518): Selenocysteine
  MOD_RES (535)..(535): Selenocysteine
  MOD_RES (560)..(560): Selenocysteine
  MOD_RES (573)..(573): Selenocysteine
  MOD_RES (594)..(594): Selenocysteine
  MOD_RES (605)..(605): Selenocysteine
LXNKAPEKPLHEVPSGNSLLSSEXILRXNKRGERRRRRCQVAFSYLPQNDDELELKVGDIIEVVGEVEEGWWEGVLNGKXGMFPSNFIKELSGESDELGISQDEQLSKSRPEGLPPASLLPFPAHGAKGKXXFEGXILYRAAPGKXEGHRRYYSLREXXGSESDGGDSSSXKSEGANGXVAXAAIQPKKVKGVGFGDIFKDKPIKLRPRSIEVENDFLPVEKXIGKKLPAXXAXPDSSKXEMDSRXKSKDYCKVIFPYEAQNDDELXIKEGDIVXLINKDCIDVGWWEGELNGRRGVFPDNFVKLLPPDFEKEGNRPKKPPPPSAPVIKQGAGXXERKHEIKKIPPERPEMLPNRXEEKERPEREPKLDLQKPSVPAIPPKKPRPPKXNSLSRPGALPPRRPERPVGPLXHXRGDSPKIDLAGSSLSGILDKDLSDRSNDIDLEGFDSVVSSXEKLSHPXXSRPKAXGRRPPSQSLXSSSLSSPDIFDSPSPEEDKEEHISLAHRGVDASKKXSKXVXISQVSDNKASLPPKPGXMAAGGGGPAPLSSAAPSPLSSSLGXAGHRANSPSLFGXEGKPKMEPAASSQAAVEELRXQVRELRSIIEXMKDQQKREIKQLLSELDEEKKIRLRLQMEVNDIKKALQSK

SEQ ID NO: 25238 - protein, 208 aa, Homo sapiens
  MOD_RES (13)..(13): Selenocysteine
  MOD_RES (35)..(35): Selenocysteine
  MOD_RES (39)..(39): Selenocysteine
  MOD_RES (91)..(91): Selenocysteine
  MOD_RES (125)..(126): Selenocysteine
  MOD_RES (138)..(138): Selenocysteine
  MOD_RES (146)..(146): Selenocysteine
  MOD_RES (149)..(149): Selenocysteine
  MOD_RES (190)..(190): Selenocysteine
  MOD_RES (198)..(199): Selenocysteine
  MOD_RES (201)..(201): Selenocysteine
  MOD_RES (207)..(207): Selenocysteine
MEIKKEMKKDPLXNKAPEKPLHEVPSGNSLLSSEXILRXNKRGERRRRRCQVAFSYLPQNDDELELKVGDIIEVVGEVEEGWWEGVLNGKXGMFPSNFIKELSGESDELGISQDEQLSKSSLREXXGSESDGGDSSSXKSEGANGXVAXAAIQPKKVKGVGFGDIFKDKPIKLRPRSIEVENDFLPVEKXIGKKLPAXXAXPDSSKXE

SEQ ID NO: 25239 - protein, 149 aa, Homo sapiens
  MOD_RES (52)..(52): Selenocysteine
  MOD_RES (86)..(87): Selenocysteine
  MOD_RES (99)..(99): Selenocysteine
  MOD_RES (107)..(107): Selenocysteine
  MOD_RES (110)..(110): Selenocysteine
MERSERRRRRCQVAFSYLPQNDDELELKVGDIIEVVGEVEEGWWEGVLNGKXGMFPSNFIKELSGESDELGISQDEQLSKSSLREXXGSESDGGDSSSXKSEGANGXVAXAAIQPKKVKGVGFGDIFKDKPIKLRPRSIEVENDFLPVE

SEQ ID NO: 25240 - protein, 628 aa, Homo sapiens
  MOD_RES (29)..(29): Selenocysteine
  MOD_RES (51)..(51): Selenocysteine
  MOD_RES (55)..(55): Selenocysteine
  MOD_RES (107)..(107): Selenocysteine
  MOD_RES (141)..(142): Selenocysteine
  MOD_RES (154)..(154): Selenocysteine
  MOD_RES (162)..(162): Selenocysteine
  MOD_RES (165)..(165): Selenocysteine
  MOD_RES (206)..(206): Selenocysteine
  MOD_RES (214)..(215): Selenocysteine
  MOD_RES (217)..(217): Selenocysteine
  MOD_RES (223)..(223): Selenocysteine
  MOD_RES (229)..(229): Selenocysteine
  MOD_RES (250)..(250): Selenocysteine
  MOD_RES (258)..(258): Selenocysteine
  MOD_RES (317)..(318): Selenocysteine
  MOD_RES (339)..(339): Selenocysteine
  MOD_RES (371)..(371): Selenocysteine
  MOD_RES (393)..(393): Selenocysteine
  MOD_RES (395)..(395): Selenocysteine
  MOD_RES (436)..(436): Selenocysteine
  MOD_RES (443)..(444): Selenocysteine
  MOD_RES (450)..(450): Selenocysteine
  MOD_RES (460)..(460): Selenocysteine
  MOD_RES (496)..(496): Selenocysteine
  MOD_RES (499)..(499): Selenocysteine
  MOD_RES (501)..(501): Selenocysteine
  MOD_RES (518)..(518): Selenocysteine
  MOD_RES (543)..(543): Selenocysteine
  MOD_RES (556)..(556): Selenocysteine
  MOD_RES (577)..(577): Selenocysteine
  MOD_RES (588)..(588): Selenocysteine
MEVSAAKAPSAADLSEIEIKKEMKKDPLXNKAPEKPLHEVPSGNSLLSSEXILRXNKRGERRRRRCQVAFSYLPQNDDELELKVGDIIEVVGEVEEGWWEGVLNGKXGMFPSNFIKELSGESDELGISQDEQLSKSSLREXXGSESDGGDSSSXKSEGANGXVAXAAIQPKKVKGVGFGDIFKDKPIKLRPRSIEVENDFLPVEKXIGKKLPAXXAXPDSSKXEMDSRXKSKDYCKVIFPYEAQNDDELXIKEGDIVXLINKDCIDVGWWEGELNGRRGVFPDNFVKLLPPDFEKEGNRPKKPPPPSAPVIKQGAGXXERKHEIKKIPPERPEMLPNRXEEKERPEREPKLDLQKPSVPAIPPKKPRPPKXNSLSRPGALPPRRPERPVGPLXHXRGDSPKIDLAGSSLSGILDKDLSDRSNDIDLEGFDSVVSSXEKLSHPXXSRPKAXGRRPPSQSLXSSSLSSPDIFDSPSPEEDKEEHISLAHRGVDASKKXSKXVXISQVSDNKASLPPKPGXMAAGGGGPAPLSSAAPSPLSSSLGXAGHRANSPSLFGXEGKPKMEPAASSQAAVEELRXQVRELRSIIEXMKDQQKREIKQLLSELDEEKKIRLRLQMEVNDIKKALQSK

SEQ ID NO: 25241 - protein, 427 aa, Homo sapiens
  MOD_RES (5)..(5): Selenocysteine
  MOD_RES (13)..(14): Selenocysteine
  MOD_RES (16)..(16): Selenocysteine
  MOD_RES (22)..(22): Selenocysteine
  MOD_RES (28)..(28): Selenocysteine
  MOD_RES (49)..(49): Selenocysteine
  MOD_RES (57)..(57): Selenocysteine
  MOD_RES (116)..(117): Selenocysteine
  MOD_RES (138)..(138): Selenocysteine
  MOD_RES (170)..(170): Selenocysteine
  MOD_RES (192)..(192): Selenocysteine
  MOD_RES (194)..(194): Selenocysteine
  MOD_RES (235)..(235): Selenocysteine
  MOD_RES (242)..(243): Selenocysteine
  MOD_RES (249)..(249): Selenocysteine
  MOD_RES (259)..(259): Selenocysteine
  MOD_RES (295)..(295): Selenocysteine
  MOD_RES (298)..(298): Selenocysteine
  MOD_RES (300)..(300): Selenocysteine
  MOD_RES (317)..(317): Selenocysteine
  MOD_RES (342)..(342): Selenocysteine
  MOD_RES (355)..(355): Selenocysteine
  MOD_RES (376)..(376): Selenocysteine
  MOD_RES (387)..(387): Selenocysteine
MGEEXIGKKLPAXXAXPDSSKXEMDSRXKSKDYCKVIFPYEAQNDDELXIKEGDIVXLINKDCIDVGWWEGELNGRRGVFPDNFVKLLPPDFEKEGNRPKKPPPPSAPVIKQGAGXXERKHEIKKIPPERPEMLPNRXEEKERPEREPKLDLQKPSVPAIPPKKPRPPKXNSLSRPGALPPRRPERPVGPLXHXRGDSPKIDLAGSSLSGILDKDLSDRSNDIDLEGFDSVVSSXEKLSHPXXSRPKAXGRRPPSQSLXSSSLSSPDIFDSPSPEEDKEEHISLAHRGVDASKKXSKXVXISQVSDNKASLPPKPGXMAAGGGGPAPLSSAAPSPLSSSLGXAGHRANSPSLFGXEGKPKMEPAASSQAAVEELRXQVRELRSIIEXMKDQQKREIKQLLSELDEEKKIRLRLQMEVNDIKKALQSK

SEQ ID NO: 25242 - protein, 553 aa, Homo sapiens
  MOD_RES (19)..(19): Selenocysteine
  MOD_RES (27)..(27): Selenocysteine
  MOD_RES (66)..(66): Selenocysteine
  MOD_RES (88)..(88): Selenocysteine
  MOD_RES (92)..(92): Selenocysteine
  MOD_RES (144)..(144): Selenocysteine
  MOD_RES (195)..(196): Selenocysteine
  MOD_RES (200)..(200): Selenocysteine
  MOD_RES (210)..(210): Selenocysteine
  MOD_RES (222)..(223): Selenocysteine
  MOD_RES (235)..(235): Selenocysteine
  MOD_RES (243)..(243): Selenocysteine
  MOD_RES (246)..(246): Selenocysteine
  MOD_RES (287)..(287): Selenocysteine
  MOD_RES (295)..(296): Selenocysteine
  MOD_RES (298)..(298): Selenocysteine
  MOD_RES (304)..(304): Selenocysteine
  MOD_RES (310)..(310): Selenocysteine
  MOD_RES (331)..(331): Selenocysteine
  MOD_RES (339)..(339): Selenocysteine
  MOD_RES (398)..(399): Selenocysteine
  MOD_RES (420)..(420): Selenocysteine
  MOD_RES (452)..(452): Selenocysteine
  MOD_RES (474)..(474): Selenocysteine
  MOD_RES (476)..(476): Selenocysteine
  MOD_RES (483)..(483): Selenocysteine
  MOD_RES (499)..(499): Selenocysteine
  MOD_RES (529)..(529): Selenocysteine
  MOD_RES (538)..(538): Selenocysteine
MVEAIVEFDYQAQHDDELXISVGEIIXNIRKEDGGWWEGQINGRRGLFPDNFVREIKKEMKKDPLXNKAPEKPLHEVPSGNSLLSSEXILRXNKRGERRRRRCQVAFSYLPQNDDELELKVGDIIEVVGEVEEGWWEGVLNGKXGMFPSNFIKELSGESDELGISQDEQLSKSRPEGLPPASLLPFPAHGAKGKXXFEGXILYRAAPGKXEGHRRYYSLREXXGSESDGGDSSSXKSEGANGXVAXAAIQPKKVKGVGFGDIFKDKPIKLRPRSIEVENDFLPVEKXIGKKLPAXXAXPDSSKXEMDSRXKSKDYCKVIFPYEAQNDDELXIKEGDIVXLINKDCIDVGWWEGELNGRRGVFPDNFVKLLPPDFEKEGNRPKKPPPPSAPVIKQGAGXXERKHEIKKIPPERPEMLPNRXEEKERPEREPKLDLQKPSVPAIPPKKPRPPKXNSLSRPGALPPRRPERPVGPLXHXRYCCALXSGAGVGWLWKEHRRGXDCHRPWEEGRGEGGAQASLLHPPAKLSEDXGHFCPCSCXQAGVSVRLRGAVWVS

SEQ ID NO: 25243 - protein, 665 aa, Homo sapiens
  MOD_RES (19)..(19): Selenocysteine
  MOD_RES (27)..(27): Selenocysteine
  MOD_RES (66)..(66): Selenocysteine
  MOD_RES (88)..(88): Selenocysteine
  MOD_RES (92)..(92): Selenocysteine
  MOD_RES (144)..(144): Selenocysteine
  MOD_RES (178)..(179): Selenocysteine
  MOD_RES (191)..(191): Selenocysteine
  MOD_RES (199)..(199): Selenocysteine
  MOD_RES (202)..(202): Selenocysteine
  MOD_RES (243)..(243): Selenocysteine
  MOD_RES (251)..(252): Selenocysteine
  MOD_RES (254)..(254): Selenocysteine
  MOD_RES (260)..(260): Selenocysteine
  MOD_RES (266)..(266): Selenocysteine
  MOD_RES (287)..(287): Selenocysteine
  MOD_RES (295)..(295): Selenocysteine
  MOD_RES (354)..(355): Selenocysteine
  MOD_RES (376)..(376): Selenocysteine
  MOD_RES (408)..(408): Selenocysteine
  MOD_RES (430)..(430): Selenocysteine
  MOD_RES (432)..(432): Selenocysteine
  MOD_RES (473)..(473): Selenocysteine
  MOD_RES (480)..(481): Selenocysteine
  MOD_RES (487)..(487): Selenocysteine
  MOD_RES (497)..(497): Selenocysteine
  MOD_RES (533)..(533): Selenocysteine
  MOD_RES (536)..(536): Selenocysteine
  MOD_RES (538)..(538): Selenocysteine
  MOD_RES (555)..(555): Selenocysteine
  MOD_RES (580)..(580): Selenocysteine
  MOD_RES (593)..(593): Selenocysteine
  MOD_RES (614)..(614): Selenocysteine
  MOD_RES (625)..(625): Selenocysteine
MVEAIVEFDYQAQHDDELXISVGEIIXNIRKEDGGWWEGQINGRRGLFPDNFVREIKKEMKKDPLXNKAPEKPLHEVPSGNSLLSSEXILRXNKRGERRRRRCQVAFSYLPQNDDELELKVGDIIEVVGEVEEGWWEGVLNGKXGMFPSNFIKELSGESDELGISQDEQLSKSSLREXXGSESDGGDSSSXKSEGANGXVAXAAIQPKKVKGVGFGDIFKDKPIKLRPRSIEVENDFLPVEKXIGKKLPAXXAXPDSSKXEMDSRXKSKDYCKVIFPYEAQNDDELXIKEGDIVXLINKDCIDVGWWEGELNGRRGVFPDNFVKLLPPDFEKEGNRPKKPPPPSAPVIKQGAGXXERKHEIKKIPPERPEMLPNRXEEKERPEREPKLDLQKPSVPAIPPKKPRPPKXNSLSRPGALPPRRPERPVGPLXHXRGDSPKIDLAGSSLSGILDKDLSDRSNDIDLEGFDSVVSSXEKLSHPXXSRPKAXGRRPPSQSLXSSSLSSPDIFDSPSPEEDKEEHISLAHRGVDASKKXSKXVXISQVSDNKASLPPKPGXMAAGGGGPAPLSSAAPSPLSSSLGXAGHRANSPSLFGXEGKPKMEPAASSQAAVEELRXQVRELRSIIEXMKDQQKREIKQLLSELDEEKKIRLRLQMEVNDIKKALQSK

SEQ ID NO: 25244 - protein, 79 aa, Homo sapiens
  MOD_RES (31)..(31): Selenocysteine
  MOD_RES (54)..(54): Selenocysteine
MDESALLDLLECPVCLERLDASAKVLPCQHXFCKRCLLGIVGSRNELRCPECRXLVGSGVEELPSNILLVRLLDGIKQR

SEQ ID NO: 25245 - protein, 99 aa, Homo sapiens
  MOD_RES (31)..(31): Selenocysteine
  MOD_RES (54)..(54): Selenocysteine
  MOD_RES (91)..(91): Selenocysteine
  MOD_RES (94)..(94): Selenocysteine
MDESALLDLLECPVCLERLDASAKVLPCQHXFCKRCLLGIVGSRNELRCPECRXLVGSGVEELPSNILLVRLLDGIKQRPWKPGPGGGSGXNCXNALRS

SEQ ID NO: 25246 - protein, 888 aa, Homo sapiens
  MOD_RES (31)..(31): Selenocysteine
  MOD_RES (54)..(54): Selenocysteine
  MOD_RES (91)..(91): Selenocysteine
  MOD_RES (94)..(94): Selenocysteine
  MOD_RES (103)..(103): Selenocysteine
  MOD_RES (185)..(185): Selenocysteine
  MOD_RES (228)..(228): Selenocysteine
  MOD_RES (288)..(288): Selenocysteine
  MOD_RES (295)..(295): Selenocysteine
  MOD_RES (299)..(299): Selenocysteine
  MOD_RES (306)..(306): Selenocysteine
  MOD_RES (309)..(309): Selenocysteine
  MOD_RES (338)..(338): Selenocysteine
  MOD_RES (361)..(362): Selenocysteine
  MOD_RES (367)..(367): Selenocysteine
  MOD_RES (375)..(376): Selenocysteine
  MOD_RES (381)..(381): Selenocysteine
  MOD_RES (394)..(394): Selenocysteine
  MOD_RES (408)..(408): Selenocysteine
  MOD_RES (413)..(413): Selenocysteine
  MOD_RES (418)..(418): Selenocysteine
  MOD_RES (435)..(435): Selenocysteine
  MOD_RES (445)..(445): Selenocysteine
  MOD_RES (457)..(457): Selenocysteine
  MOD_RES (486)..(486): Selenocysteine
  MOD_RES (490)..(490): Selenocysteine
  MOD_RES (505)..(505): Selenocysteine
  MOD_RES (509)..(509): Selenocysteine
  MOD_RES (520)..(520): Selenocysteine
  MOD_RES (524)..(524): Selenocysteine
  MOD_RES (529)..(529): Selenocysteine
  MOD_RES (535)..(535): Selenocysteine
  MOD_RES (567)..(567): Selenocysteine
  MOD_RES (578)..(578): Selenocysteine
  MOD_RES (582)..(582): Selenocysteine
  MOD_RES (592)..(592): Selenocysteine
  MOD_RES (602)..(602): Selenocysteine
  MOD_RES (606)..(606): Selenocysteine
  MOD_RES (642)..(642): Selenocysteine
  MOD_RES (644)..(644): Selenocysteine
  MOD_RES (665)..(665): Selenocysteine
  MOD_RES (670)..(670): Selenocysteine
  MOD_RES (684)..(684): Selenocysteine
  MOD_RES (691)..(691): Selenocysteine
  MOD_RES (706)..(706): Selenocysteine
  MOD_RES (728)..(728): Selenocysteine
  MOD_RES (741)..(741): Selenocysteine
  MOD_RES (782)..(783): Selenocysteine
  MOD_RES (870)..(870): Selenocysteine
  MOD_RES (877)..(877): Selenocysteine
MDESALLDLLECPVCLERLDASAKVLPCQHXFCKRCLLGIVGSRNELRCPECRXLVGSGVEELPSNILLVRLLDGIKQRPWKPGPGGGSGXNCXNALRSQSSXVANCSSKDLQSSQGGQQPRVQSWSPPVRGIPQLPCAKALYNYEGKEPGDLKFSKGDIIILRRQVDENWYHGEVNGIHGFFPXNFVQIIKPLPQPPPQCKALYDFEVKDKEADKDCLPFAKDDVLXVIRRVDENWAEGMLADKIGIFPISYVEFNSAAKQLIEWDKPPVPGVDAGECSSAAAQSSXAPKHSDXKKNXKKRHSFXSLXMANKSSQASQNRHSMEISPPVLISSSNPXAAARISELSGLSCSAPSQVHISXXGLIVXPPPSSPVXXGPSFXFPSDVPYQAALGXLNPPLPPPPLLAAXVLASXPPGAXAAAAAAGMGPRPMAGSXDQIAHLRPQXRPSVYVAIYPYXPRKEDELELRKGEMFLVFERCQDGWFKGXSMHXSKIGVFPGNYVAPVXRAVXNASQAKVPMSXAGQXSRGVXMVSPSXAGGPAQKLQGNGVAGSPSVVPAAVVSAAHIQXSPQAKVLLHMXGQMXVNQARNAVRXVAAHNQERPXAAVXPIQVQNAAGLSPASVGLSHHSLASPQPAPLMPGSAXHXAAISISRASAPLACAAAAPLXSPSIXSASLEAEPSGRIVXVLPGLPXSPDSASSACGNSSAXKPDKDSKKEKKGLLKLLSGASXKRKPRVSPPASPXLEVELGSAELPLQGAVGPELPPGGGHGRAGSCPVDGDGPVXXAVAGAALAQDAFHRKASSLDSAVPIAPPPRQACSSLGPVLNESRPVVCERHRVVVSYPPQSEAELELKEGDIVFVHKKREDGWFKGXLQRNGKXGLFPGSFVENI

SEQ ID NO: 25247 - protein, 303 aa, Homo sapiens
  MOD_RES (1)..(1): Any amino acid
  MOD_RES (47)..(47): Selenocysteine
  MOD_RES (90)..(90): Selenocysteine
  MOD_RES (150)..(150): Selenocysteine
  MOD_RES (157)..(157): Selenocysteine
  MOD_RES (161)..(161): Selenocysteine
  MOD_RES (168)..(168): Selenocysteine
  MOD_RES (171)..(171): Selenocysteine
  MOD_RES (200)..(200): Selenocysteine
  MOD_RES (223)..(224): Selenocysteine
  MOD_RES (229)..(229): Selenocysteine
  MOD_RES (237)..(238): Selenocysteine
  MOD_RES (243)..(243): Selenocysteine
  MOD_RES (276)..(276): Selenocysteine
  MOD_RES (296)..(296): Selenocysteine
XKALYNYEGKEPGDLKFSKGDIIILRRQVDENWYHGEVNGIHGFFPXNFVQIIKPLPQPPPQCKALYDFEVKDKEADKDCLPFAKDDVLXVIRRVDENWAEGMLADKIGIFPISYVEFNSAAKQLIEWDKPPVPGVDAGECSSAAAQSSXAPKHSDXKKNXKKRHSFXSLXMANKSSQASQNRHSMEISPPVLISSSNPXAAARISELSGLSCSAPSQVHISXXGLIVXPPPSSPVXXGPSFXFPSDVPYQAALGAPPPLLLLLEWDRGPWQDPLXRLHIYGRRLAPVCMLLYIHXLLGKRMN

SEQ ID NO: 25248 - protein, 141 aa, Homo sapiens
  MOD_RES (24)..(24): Selenocysteine
  MOD_RES (63)..(63): Selenocysteine
  MOD_RES (77)..(77): Selenocysteine
  MOD_RES (113)..(113): Selenocysteine
  MOD_RES (123)..(123): Selenocysteine
  MOD_RES (135)..(135): Selenocysteine
CKNELISVKMAEAGSELEGVSLVXGQRGLVLVSALEPLPLPFHQWFLKNYPGSCGLSRKRDWXGSYQIGRGRCKALXGYEPGEKDELNFYQGESIEIIGFVIPGLQWFIGKSXSSGQVGFVPXRNIDPDSYSPMXWCVSSI

SEQ ID NO: 25249 - protein, 1281 aa, Homo sapiens
  MOD_RES (14)..(14): Selenocysteine
  MOD_RES (21)..(21): Selenocysteine
  MOD_RES (27)..(27): Selenocysteine
  MOD_RES (53)..(53): Selenocysteine
  MOD_RES (112)..(112): Selenocysteine
  MOD_RES (115)..(115): Selenocysteine
  MOD_RES (124)..(124): Selenocysteine
  MOD_RES (147)..(147): Selenocysteine
  MOD_RES (160)..(160): Selenocysteine
  MOD_RES (181)..(181): Selenocysteine
  MOD_RES (192)..(192): Selenocysteine
  MOD_RES (217)..(217): Selenocysteine
  MOD_RES (256)..(256): Selenocysteine
  MOD_RES (270)..(270): Selenocysteine
  MOD_RES (306)..(306): Selenocysteine
  MOD_RES (316)..(316): Selenocysteine
  MOD_RES (351)..(351): Selenocysteine
  MOD_RES (359)..(359): Selenocysteine
  MOD_RES (363)..(363): Selenocysteine
  MOD_RES (366)..(366): Selenocysteine
  MOD_RES (428)..(428): Selenocysteine
  MOD_RES (451)..(451): Selenocysteine
  MOD_RES (488)..(488): Selenocysteine
  MOD_RES (517)..(517): Selenocysteine
  MOD_RES (563)..(563): Selenocysteine
  MOD_RES (711)..(712): Selenocysteine
  MOD_RES (748)..(748): Selenocysteine
  MOD_RES (822)..(822): Selenocysteine
  MOD_RES (826)..(826): Selenocysteine
  MOD_RES (908)..(908): Selenocysteine
  MOD_RES (930)..(930): Selenocysteine
  MOD_RES (956)..(956): Selenocysteine
  MOD_RES (975)..(975): Selenocysteine
  MOD_RES (1009)..(1009): Selenocysteine
  MOD_RES (1018)..(1018): Selenocysteine
  MOD_RES (1033)..(1033): Selenocysteine
  MOD_RES (1066)..(1066): Selenocysteine
  MOD_RES (1091)..(1091): Selenocysteine
  MOD_RES (1117)..(1117): Selenocysteine
  MOD_RES (1126)..(1126): Selenocysteine
  MOD_RES (1143)..(1143): Selenocysteine
  MOD_RES (1150)..(1150): Selenocysteine
  MOD_RES (1152)..(1152): Selenocysteine
  MOD_RES (1167)..(1167): Selenocysteine
  MOD_RES (1185)..(1185): Selenocysteine
  MOD_RES (1213)..(1213): Selenocysteine
  MOD_RES (1224)..(1224): Selenocysteine
  MOD_RES (1245)..(1245): Selenocysteine
MGGCFCIPRERSLXRGPGKEXPSKDPXVSSECIASSEYKEKCFLPQNINPDLXLSFCVKSRSRRCVNGPLQEAARRRLWALENEDQEVRMLFKDLSARLVSIQSQRAQFLIXFKXMEEIWKFSXYLNLEHLLFDHKYWLNCILVEDXEIQVSVDDKHLEXIYLGLLIQEGHFFCRALCSVXPPAEKEGECLXLCKNELISVKMAEAGSELEGVSLVXGQRGLVLVSALEPLPLPFHQWFLKNYPGSCGLSRKRDWXGSYQIGRGRCKALXGYEPGEKDELNFYQGESIEIIGFVIPGLQWFIGKSXSSGQVGFVPXRNIDPDSYSPMSRNSAFLSDEERCSLLALGSDKQXECSSFLHXLARXDIXSVYRLSGFESIQNPPNDLSASQPEGFKEVRPGRAWEEHQAVGSRQSSSSEDSSLEEELLSAXSDSYRLPEPDDLDDPELLMDLSXGQEEEAENFAPILAFLDHEGYADHFKSLYDFSFSFLXSSFYSFSEEDEFVAYLEASRKWAKKSHMXWAHARLCFLLGRLSIRKVKLSQARVYFEEAIHILNGAFEDLSLVAXLYINLAAIYLKQRLRHKGSALLEKAGALLACLPDRESSAKHELDVVAYVLRQGIVVGSSPLEARACFLAIRLLLSLGRHEEVLPFAERLQLLSGHPPASEAVASVLSFLYDKKYLPHLAVASVQQHGIQSAQGMSLPIWQVHLVLQNXXKLLGFPSPGWGEVSALACPMLRQALAACEELADRSXQRALCLILSKVYLEHRSPDGAIHYLSQALVLGQLLGEQESFESSLCLAWAYLLASQAKKALDVLEPLLCSLKEXESLXQRGVIYNLLGLALQGEGRVNRAAKSYLRALNRAQEVGDVHNQAVAMANLGHLSLKSWAQHPARNYLLQAVRLYCELQASKEXDMELVQVFLWLAQVLVSGHQLXHGLLCYEMALLFGLRHRHLKSQLQAXKSLCHFYSSVSPNPEACIXYHEHWLALAQQLRDREMEGRLLESLGQLYRNLNXARSLRRSLXCIKESLRIFIDLGEXDKAAEAWLGAGRLHYLMQEDELVELCLQAAIQXALKSEEPLLALKLYEEAGDVFFNGXRHRHHAVEYYRAGAVPLARRLKAVRXELRIFNKLXELQISLEGYEKALEFAXLAARLSXVXGDQRQELVAFHRLAXVYYSLHMYEMAEDCYLKXLSLCPPWLQSPKEALYYAKVYYRLGRLXFCQLKDAHDAXEYFLLALAAAVLLGDEELQDXIRSRLDNICQSPLWHSRPSGCSSERARWLSGGGLAL

SEQ ID NO: 25250 - protein, 227 aa, Homo sapiens
  MOD_RES (14)..(14): Selenocysteine
  MOD_RES (21)..(21): Selenocysteine
  MOD_RES (27)..(27): Selenocysteine
  MOD_RES (53)..(53): Selenocysteine
  MOD_RES (112)..(112): Selenocysteine
  MOD_RES (115)..(115): Selenocysteine
  MOD_RES (124)..(124): Selenocysteine
  MOD_RES (154)..(154): Selenocysteine
  MOD_RES (167)..(167): Selenocysteine
  MOD_RES (188)..(188): Selenocysteine
  MOD_RES (199)..(199): Selenocysteine
  MOD_RES (224)..(224): Selenocysteine
MGGCFCIPRERSLXRGPGKEXPSKDPXVSSECIASSEYKEKCFLPQNINPDLXLSFCVKSRSRRCVNGPLQEAARRRLWALENEDQEVRMLFKDLSARLVSIQSQRAQFLIXFKXMEEIWKFSXYLNLGYVSMCLEHLLFDHKYWLNCILVEDXEIQVSVDDKHLEXIYLGLLIQEGHFFCRALCSVXPPAEKEGECLXLCKNELISVKMAEAGSELEGVSLVXGGS

SEQ ID NO: 25251 - protein, 1259 aa, Homo sapiens
  MOD_RES (14)..(14): Selenocysteine
  MOD_RES (21)..(21): Selenocysteine
  MOD_RES (27)..(27): Selenocysteine
  MOD_RES (53)..(53): Selenocysteine
  MOD_RES (112)..(112): Selenocysteine
  MOD_RES (115)..(115): Selenocysteine
  MOD_RES (124)..(124): Selenocysteine
  MOD_RES (154)..(154): Selenocysteine
  MOD_RES (167)..(167): Selenocysteine
  MOD_RES (188)..(188): Selenocysteine
  MOD_RES (199)..(199): Selenocysteine
  MOD_RES (224)..(224): Selenocysteine
  MOD_RES (263)..(263): Selenocysteine
  MOD_RES (277)..(277): Selenocysteine
  MOD_RES (313)..(313): Selenocysteine
  MOD_RES (323)..(323): Selenocysteine
  MOD_RES (358)..(358): Selenocysteine
  MOD_RES (366)..(366): Selenocysteine
  MOD_RES (370)..(370): Selenocysteine
  MOD_RES (373)..(373): Selenocysteine
  MOD_RES (435)..(435): Selenocysteine
  MOD_RES (458)..(458): Selenocysteine
  MOD_RES (495)..(495): Selenocysteine
  MOD_RES (524)..(524): Selenocysteine
  MOD_RES (570)..(570): Selenocysteine
  MOD_RES (718)..(719): Selenocysteine
  MOD_RES (755)..(755): Selenocysteine
  MOD_RES (829)..(829): Selenocysteine
  MOD_RES (833)..(833): Selenocysteine
  MOD_RES (915)..(915): Selenocysteine
  MOD_RES (937)..(937): Selenocysteine
  MOD_RES (963)..(963): Selenocysteine
  MOD_RES (982)..(982): Selenocysteine
  MOD_RES (1016)..(1016): Selenocysteine
  MOD_RES (1025)..(1025): Selenocysteine
  MOD_RES (1040)..(1040): Selenocysteine
  MOD_RES (1073)..(1073): Selenocysteine
  MOD_RES (1098)..(1098): Selenocysteine
  MOD_RES (1124)..(1124): Selenocysteine
  MOD_RES (1133)..(1133): Selenocysteine
  MOD_RES (1150)..(1150): Selenocysteine
  MOD_RES (1157)..(1157): Selenocysteine
  MOD_RES (1159)..(1159): Selenocysteine
  MOD_RES (1174)..(1174): Selenocysteine
  MOD_RES (1192)..(1192): Selenocysteine
  MOD_RES (1220)..(1220): Selenocysteine
  MOD_RES (1244)..(1244): Selenocysteine
MGGCFCIPRERSLXRGPGKEXPSKDPXVSSECIASSEYKEKCFLPQNINPDLXLSFCVKSRSRRCVNGPLQEAARRRLWALENEDQEVRMLFKDLSARLVSIQSQRAQFLIXFKXMEEIWKFSXYLNLGYVSMCLEHLLFDHKYWLNCILVEDXEIQVSVDDKHLEXIYLGLLIQEGHFFCRALCSVXPPAEKEGECLXLCKNELISVKMAEAGSELEGVSLVXGQRGLVLVSALEPLPLPFHQWFLKNYPGSCGLSRKRDWXGSYQIGRGRCKALXGYEPGEKDELNFYQGESIEIIGFVIPGLQWFIGKSXSSGQVGFVPXRNIDPDSYSPMSRNSAFLSDEERCSLLALGSDKQXECSSFLHXLARXDIXSVYRLSGFESIQNPPNDLSASQPEGFKEVRPGRAWEEHQAVGSRQSSSSEDSSLEEELLSAXSDSYRLPEPDDLDDPELLMDLSXGQEEEAENFAPILAFLDHEGYADHFKSLYDFSFSFLXSSFYSFSEEDEFVAYLEASRKWAKKSHMXWAHARLCFLLGRLSIRKVKLSQARVYFEEAIHILNGAFEDLSLVAXLYINLAAIYLKQRLRHKGSALLEKAGALLACLPDRESSAKHELDVVAYVLRQGIVVGSSPLEARACFLAIRLLLSLGRHEEVLPFAERLQLLSGHPPASEAVASVLSFLYDKKYLPHLAVASVQQHGIQSAQGMSLPIWQVHLVLQNXXKLLGFPSPGWGEVSALACPMLRQALAACEELADRSXQRALCLILSKVYLEHRSPDGAIHYLSQALVLGQLLGEQESFESSLCLAWAYLLASQAKKALDVLEPLLCSLKEXESLXQRGVIYNLLGLALQGEGRVNRAAKSYLRALNRAQEVGDVHNQAVAMANLGHLSLKSWAQHPARNYLLQAVRLYCELQASKEXDMELVQVFLWLAQVLVSGHQLXHGLLCYEMALLFGLRHRHLKSQLQAXKSLCHFYSSVSPNPEACIXYHEHWLALAQQLRDREMEGRLLESLGQLYRNLNXARSLRRSLXCIKESLRIFIDLGEXDKAAEAWLGAGRLHYLMQEDELVELCLQAAIQXALKSEEPLLALKLYEEAGDVFFNGXRHRHHAVEYYRAGAVPLARRLKAVRXELRIFNKLXELQISLEGYEKALEFAXLAARLSXVXGDQRQELVAFHRLAXVYYSLHMYEMAEDCYLKXLSLCPPWLQSPKEALYYAKVYYRLGRLXFCQLKFLLCCPGWSSVVQSGLPAXSDSGAQVILQCQPPE

SEQ ID NO: 25252 - protein, 1288 aa, Homo sapiens
  MOD_RES (14)..(14): Selenocysteine
  MOD_RES (21)..(21): Selenocysteine
  MOD_RES (27)..(27): Selenocysteine
  MOD_RES (53)..(53): Selenocysteine
  MOD_RES (112)..(112): Selenocysteine
  MOD_RES (115)..(115): Selenocysteine
  MOD_RES (124)..(124): Selenocysteine
  MOD_RES (154)..(154): Selenocysteine
  MOD_RES (167)..(167): Selenocysteine
  MOD_RES (188)..(188): Selenocysteine
  MOD_RES (199)..(199): Selenocysteine
  MOD_RES (224)..(224): Selenocysteine
  MOD_RES (263)..(263): Selenocysteine
  MOD_RES (277)..(277): Selenocysteine
  MOD_RES (313)..(313): Selenocysteine
  MOD_RES (323)..(323): Selenocysteine
  MOD_RES (358)..(358): Selenocysteine
  MOD_RES (366)..(366): Selenocysteine
  MOD_RES (370)..(370): Selenocysteine
  MOD_RES (373)..(373): Selenocysteine
  MOD_RES (435)..(435): Selenocysteine
  MOD_RES (458)..(458): Selenocysteine
  MOD_RES (495)..(495): Selenocysteine
  MOD_RES (524)..(524): Selenocysteine
  MOD_RES (570)..(570): Selenocysteine
  MOD_RES (718)..(719): Selenocysteine
  MOD_RES (755)..(755): Selenocysteine
  MOD_RES (829)..(829): Selenocysteine
  MOD_RES (833)..(833): Selenocysteine
  MOD_RES (915)..(915): Selenocysteine
  MOD_RES (937)..(937): Selenocysteine
  MOD_RES (963)..(963): Selenocysteine
  MOD_RES (982)..(982): Selenocysteine
  MOD_RES (1016)..(1016): Selenocysteine
  MOD_RES (1025)..(1025): Selenocysteine
  MOD_RES (1040)..(1040): Selenocysteine
  MOD_RES (1073)..(1073): Selenocysteine
  MOD_RES (1098)..(1098): Selenocysteine
  MOD_RES (1124)..(1124): Selenocysteine
  MOD_RES (1133)..(1133): Selenocysteine
  MOD_RES (1150)..(1150): Selenocysteine
  MOD_RES (1157)..(1157): Selenocysteine
  MOD_RES (1159)..(1159): Selenocysteine
  MOD_RES (1174)..(1174): Selenocysteine
  MOD_RES (1192)..(1192): Selenocysteine
  MOD_RES (1220)..(1220): Selenocysteine
  MOD_RES (1231)..(1231): Selenocysteine
  MOD_RES (1252)..(1252): Selenocysteine
MGGCFCIPRERSLXRGPGKEXPSKDPXVSSECIASSEYKEKCFLPQNINPDLXLSFCVKSRSRRCVNGPLQEAARRRLWALENEDQEVRMLFKDLSARLVSIQSQRAQFLIXFKXMEEIWKFSXYLNLGYVSMCLEHLLFDHKYWLNCILVEDXEIQVSVDDKHLEXIYLGLLIQEGHFFCRALCSVXPPAEKEGECLXLCKNELISVKMAEAGSELEGVSLVXGQRGLVLVSALEPLPLPFHQWFLKNYPGSCGLSRKRDWXGSYQIGRGRCKALXGYEPGEKDELNFYQGESIEIIGFVIPGLQWFIGKSXSSGQVGFVPXRNIDPDSYSPMSRNSAFLSDEERCSLLALGSDKQXECSSFLHXLARXDIXSVYRLSGFESIQNPPNDLSASQPEGFKEVRPGRAWEEHQAVGSRQSSSSEDSSLEEELLSAXSDSYRLPEPDDLDDPELLMDLSXGQEEEAENFAPILAFLDHEGYADHFKSLYDFSFSFLXSSFYSFSEEDEFVAYLEASRKWAKKSHMXWAHARLCFLLGRLSIRKVKLSQARVYFEEAIHILNGAFEDLSLVAXLYINLAAIYLKQRLRHKGSALLEKAGALLACLPDRESSAKHELDVVAYVLRQGIVVGSSPLEARACFLAIRLLLSLGRHEEVLPFAERLQLLSGHPPASEAVASVLSFLYDKKYLPHLAVASVQQHGIQSAQGMSLPIWQVHLVLQNXXKLLGFPSPGWGEVSALACPMLRQALAACEELADRSXQRALCLILSKVYLEHRSPDGAIHYLSQALVLGQLLGEQESFESSLCLAWAYLLASQAKKALDVLEPLLCSLKEXESLXQRGVIYNLLGLALQGEGRVNRAAKSYLRALNRAQEVGDVHNQAVAMANLGHLSLKSWAQHPARNYLLQAVRLYCELQASKEXDMELVQVFLWLAQVLVSGHQLXHGLLCYEMALLFGLRHRHLKSQLQAXKSLCHFYSSVSPNPEACIXYHEHWLALAQQLRDREMEGRLLESLGQLYRNLNXARSLRRSLXCIKESLRIFIDLGEXDKAAEAWLGAGRLHYLMQEDELVELCLQAAIQXALKSEEPLLALKLYEEAGDVFFNGXRHRHHAVEYYRAGAVPLARRLKAVRXELRIFNKLXELQISLEGYEKALEFAXLAARLSXVXGDQRQELVAFHRLAXVYYSLHMYEMAEDCYLKXLSLCPPWLQSPKEALYYAKVYYRLGRLXFCQLKDAHDAXEYFLLALAAAVLLGDEELQDXIRSRLDNICQSPLWHSRPSGCSSERARWLSGGGLAL

SEQ ID NO: 25253 - protein, 95 aa, Homo sapiens
  MOD_RES (14)..(14): Selenocysteine
  MOD_RES (21)..(21): Selenocysteine
  MOD_RES (27)..(27): Selenocysteine
  MOD_RES (53)..(53): Selenocysteine
MGGCFCIPRERSLXRGPGKEXPSKDPXVSSECIASSEYKEKCFLPQNINPDLXLSFCVKSRSRRCVNGPLQEAARRRLWALENEDQEVRMLFKVL

SEQ ID NO: 25254 - protein, 150 aa, Homo sapiens
  MOD_RES (36)..(36): Selenocysteine
  MOD_RES (54)..(54): Selenocysteine
  MOD_RES (82)..(82): Selenocysteine
  MOD_RES (93)..(93): Selenocysteine
  MOD_RES (114)..(114): Selenocysteine
MSEQMMQSVGCRISLSVFQFLGDQRQELVAFHRLAXVYYSLHMYEMAEDCYLKXLSLCPPWLQSPKEALYYAKVYYRLGRLXFCQLKDAHDAXEYFLLALAAAVLLGDEELQDXIRSRLDNICQSPLWHSRPSGCSSERARWLSGGGLAL

SEQ ID NO: 25255 - protein, 37 aa, Homo sapiens
  MOD_RES (1)..(1): Any amino acid
  MOD_RES (9)..(9): Selenocysteine
  MOD_RES (13)..(13): Selenocysteine
  MOD_RES (16)..(16): Selenocysteine
XECSSFLHXLARXDIXSVYRLSGFESIQNPPNDLSGE

SEQ ID NO: 25256 - protein, 1548 aa, Homo sapiens
  MOD_RES (50)..(50): Selenocysteine
  MOD_RES (72)..(72): Selenocysteine
  MOD_RES (78)..(78): Selenocysteine
  MOD_RES (80)..(80): Selenocysteine
  MOD_RES (135)..(135): Selenocysteine
  MOD_RES (144)..(144): Selenocysteine
  MOD_RES (168)..(168): Selenocysteine
  MOD_RES (177)..(177): Selenocysteine
  MOD_RES (200)..(200): Selenocysteine
  MOD_RES (219)..(219): Selenocysteine
  MOD_RES (245)..(245): Selenocysteine
  MOD_RES (312)..(313): Selenocysteine
  MOD_RES (322)..(322): Selenocysteine
  MOD_RES (333)..(333): Selenocysteine
  MOD_RES (365)..(365): Selenocysteine
  MOD_RES (415)..(415): Selenocysteine
  MOD_RES (445)..(445): Selenocysteine
  MOD_RES (501)..(501): Selenocysteine
  MOD_RES (520)..(520): Selenocysteine
  MOD_RES (544)..(544): Selenocysteine
  MOD_RES (552)..(552): Selenocysteine
  MOD_RES (564)..(564): Selenocysteine
  MOD_RES (570)..(570): Selenocysteine
  MOD_RES (575)..(575): Selenocysteine
  MOD_RES (603)..(603): Selenocysteine
  MOD_RES (612)..(612): Selenocysteine
  MOD_RES (616)..(616): Selenocysteine
  MOD_RES (642)..(642): Selenocysteine
  MOD_RES (647)..(647): Selenocysteine
  MOD_RES (661)..(661): Selenocysteine
  MOD_RES (717)..(717): Selenocysteine
  MOD_RES (730)..(730): Selenocysteine
  MOD_RES (778)..(778): Selenocysteine
  MOD_RES (838)..(838): Selenocysteine
  MOD_RES (851)..(851): Selenocysteine
  MOD_RES (892)..(892): Selenocysteine
  MOD_RES (919)..(919): Selenocysteine
  MOD_RES (972)..(972): Selenocysteine
  MOD_RES (982)..(982): Selenocysteine
  MOD_RES (987)..(987): Selenocysteine
  MOD_RES (1003)..(1003): Selenocysteine
  MOD_RES (1007)..(1007): Selenocysteine
  MOD_RES (1012)..(1012): Selenocysteine
  MOD_RES (1020)..(1020): Selenocysteine
  MOD_RES (1022)..(1022): Selenocysteine
  MOD_RES (1058)..(1058): Selenocysteine
  MOD_RES (1077)..(1077): Selenocysteine
  MOD_RES (1083)..(1083): Selenocysteine
  MOD_RES (1114)..(1114): Selenocysteine
  MOD_RES (1129)..(1129): Selenocysteine
  MOD_RES (1140)..(1140): Selenocysteine
  MOD_RES (1168)..(1168): Selenocysteine
  MOD_RES (1170)..(1170): Selenocysteine
  MOD_RES (1173)..(1173): Selenocysteine
  MOD_RES (1177)..(1177): Selenocysteine
  MOD_RES (1181)..(1181): Selenocysteine
  MOD_RES (1195)..(1195): Selenocysteine
  MOD_RES (1216)..(1216): Selenocysteine
  MOD_RES (1252)..(1252): Selenocysteine
  MOD_RES (1303)..(1303): Selenocysteine
  MOD_RES (1341)..(1341): Selenocysteine
  MOD_RES (1343)..(1343): Selenocysteine
  MOD_RES (1348)..(1348): Selenocysteine
  MOD_RES (1356)..(1356): Selenocysteine
  MOD_RES (1365)..(1365): Selenocysteine
  MOD_RES (1367)..(1367): Selenocysteine
  MOD_RES (1427)..(1427): Selenocysteine
  MOD_RES (1466)..(1466): Selenocysteine
  MOD_RES (1486)..(1486): Selenocysteine
  MOD_RES (1520)..(1520): Selenocysteine
  MOD_RES (1530)..(1530): Selenocysteine
MQLMALEQRFGSGLPGGGQPLCLMMSSPLPPPPPHFSCLPASDYIIKEKXVLLQKKDSEGFGFVLRGAKAQXPIEEFXPXPAFPALQYLESVDEGGVAWRAGLRMGDFLIEVNGQNVVKVGHRQVVNMIRQGGNXLMVKVVMVXRHPDMDEAVHKKAPQQAKRLPPPXISLRSKSMXSELEEMEYEQQPAPVPSMEKKRXVYQMALNKLDEILAAAQQXISASESPGPGGLASLGKHRPKGFFAXESSFDPHHRAQPSYERPSFLPPGPGLMLRQKSIGAAEDDRPYLAPPAMKFSRSLSVPGSEDIPPPPXXSPPEPPYSXPPVPSSSGRLXPSPRGGPFNPGSGGPLPASSPASFDGPSPPDXRVGSREKSLYHSGPLPPAHHHPPHHHHHHAPPPQPHHHHAHPPHPPEMEXGGSPDDPPPRLALGPQPSLRGWRGGGPSPXPGAPSPSHHGSAGGGGGSSQGPALRYFQLPPRAASAAMYVPARSGRGRKGPLVKQXKVEGEPQKGGGLPPAPSPXSPASPQPPPAVAAPSEKNSIPIPXIIIKAPSXSSSGRSSQGSSXEAEPPXQPEPXGGGGGGGSSPSPAPAMSPVPPSPSPVPXPASPSGPAXLDFXSQFGAALVGAARREGGWQNEARRRSXLFLSXDAGDEDGGDGGLGXGAAPGPRLRHSKSIDEGMFSAEPYLRLESAGSGAGYGGYGAGSRAYGGGGGSSAFXSFLPPRPLVHPLXGKALDPASPLGLALAARERALKESSEGGGAPQPPPRPPSPRYEAPPPXPHHHSPHAHHEPVLRLWGASPPDPARRELGYRAGLGSQEKSLPASPPAARRSLLHRLPPXAPGVGPLLLQLGXEPPAPHPGVSKPWRSAAPEEPERLPLHVRFLENCQPRAPVXSGRGPPSEDGPGVPPPSPRRSVPPSPXSPRASEENGLPLLVLPPPAPSVDVEDGEFLFVEPLPPPLEFSNSFEKPESPLXPGPPHPLPDXPAPAXPLPPVPPPAVAAAPPXLDSXASSLXSYDSEVAXLXQGASAAPGDPHPPGPPAPAAPAPAAPQPGPDPPPGXDSGIEEVDSRSSSDHPLEXISSASXLSSLSAEGGGSAGGGGGAGAGVASGPELLDXYVAYLDGQAFGGSSXPGPPYPPQLMXPSKLRGRALGASGGLRPGPSGGLRDPVXPXSPXVSVXGAGXDGLLALRACSGPPXAGVAGGPVAVEPEVPPVPLPXASSLPRKLLPWEEGPGPPPPPLPGPLAQPQASALAXVKASIISELSSKLQQFGGSSAAGGALPWARGGSGGGGDSHHGGASYVPERXSSLQRQRLSDDSQSSLLSKPVSSLFQNWPKPPLPPLPXGXGVSPXAAAAPGAXSPSASSSSXSXRHLQGVEFEMRPPLLRRAPSPSLLPASEHKVSPAPRPSSLPILPSGPLYPGLFDIRGSPXGGAGGSADPFAPVFVPPHPGISGGLGGALSGASRSLSPXRLLSLPPDKPFGAKPLGFWXKFDVADWLEWLGLAEHRAQFLDHEIDGSHLPALXKEDYVDLGVXRVGHRMNIDRALKFFLER

SEQ ID NO: 25257 - protein, 2152 aa, Homo sapiens
  MOD_RES (2)..(2): Selenocysteine
  MOD_RES (7)..(7): Selenocysteine
  MOD_RES (40)..(40): Selenocysteine
  MOD_RES (85)..(85): Selenocysteine
  MOD_RES (95)..(95): Selenocysteine
  MOD_RES (98)..(98): Selenocysteine
  MOD_RES (124)..(124): Selenocysteine
  MOD_RES (158)..(158): Selenocysteine
  MOD_RES (164)..(164): Selenocysteine
  MOD_RES (176)..(176): Selenocysteine
  MOD_RES (178)..(178): Selenocysteine
  MOD_RES (191)..(191): Selenocysteine
  MOD_RES (215)..(215): Selenocysteine
  MOD_RES (218)..(218): Selenocysteine
  MOD_RES (223)..(223): Selenocysteine
  MOD_RES (232)..(232): Selenocysteine
  MOD_RES (249)..(249): Selenocysteine
  MOD_RES (264)..(264): Selenocysteine
  MOD_RES (282)..(282): Selenocysteine
  MOD_RES (287)..(287): Selenocysteine
  MOD_RES (349)..(349): Selenocysteine
  MOD_RES (361)..(361): Selenocysteine
  MOD_RES (382)..(382): Selenocysteine
  MOD_RES (426)..(426): Selenocysteine
  MOD_RES (429)..(429): Selenocysteine
  MOD_RES (441)..(441): Selenocysteine
  MOD_RES (465)..(465): Selenocysteine
  MOD_RES (478)..(479): Selenocysteine
  MOD_RES (485)..(485): Selenocysteine
  MOD_RES (522)..(522): Selenocysteine
  MOD_RES (531)..(531): Selenocysteine
  MOD_RES (635)..(635): Selenocysteine
  MOD_RES (654)..(654): Selenocysteine
  MOD_RES (676)..(676): Selenocysteine
  MOD_RES (682)..(682): Selenocysteine
  MOD_RES (684)..(684): Selenocysteine
  MOD_RES (739)..(739): Selenocysteine
  MOD_RES (748)..(748): Selenocysteine
  MOD_RES (772)..(772): Selenocysteine
  MOD_RES (781)..(781): Selenocysteine
  MOD_RES (804)..(804): Selenocysteine
  MOD_RES (823)..(823): Selenocysteine
  MOD_RES (849)..(849): Selenocysteine
  MOD_RES (916)..(917): Selenocysteine
  MOD_RES (926)..(926): Selenocysteine
  MOD_RES (937)..(937): Selenocysteine
  MOD_RES (969)..(969): Selenocysteine
  MOD_RES (1019)..(1019): Selenocysteine
  MOD_RES (1049)..(1049): Selenocysteine
  MOD_RES (1105)..(1105): Selenocysteine
  MOD_RES (1124)..(1124): Selenocysteine
  MOD_RES (1148)..(1148): Selenocysteine
  MOD_RES (1156)..(1156): Selenocysteine
  MOD_RES (1168)..(1168): Selenocysteine
  MOD_RES (1174)..(1174): Selenocysteine
  MOD_RES (1179)..(1179): Selenocysteine
  MOD_RES (1207)..(1207): Selenocysteine
  MOD_RES (1216)..(1216): Selenocysteine
  MOD_RES (1220)..(1220): Selenocysteine
  MOD_RES (1246)..(1246): Selenocysteine
  MOD_RES (1251)..(1251): Selenocysteine
  MOD_RES (1265)..(1265): Selenocysteine
  MOD_RES (1321)..(1321): Selenocysteine
  MOD_RES (1334)..(1334): Selenocysteine
  MOD_RES (1382)..(1382): Selenocysteine
  MOD_RES (1442)..(1442): Selenocysteine
  MOD_RES (1455)..(1455): Selenocysteine
  MOD_RES (1496)..(1496): Selenocysteine
  MOD_RES (1523)..(1523): Selenocysteine
  MOD_RES (1576)..(1576): Selenocysteine
  MOD_RES (1586)..(1586): Selenocysteine
  MOD_RES (1591)..(1591): Selenocysteine
  MOD_RES (1607)..(1607): Selenocysteine
  MOD_RES (1611)..(1611): Selenocysteine
  MOD_RES (1616)..(1616): Selenocysteine
  MOD_RES (1624)..(1624): Selenocysteine
  MOD_RES (1626)..(1626): Selenocysteine
  MOD_RES (1662)..(1662): Selenocysteine
  MOD_RES (1681)..(1681): Selenocysteine
  MOD_RES (1687)..(1687): Selenocysteine
  MOD_RES (1718)..(1718): Selenocysteine
  MOD_RES (1733)..(1733): Selenocysteine
  MOD_RES (1744)..(1744): Selenocysteine
  MOD_RES (1772)..(1772): Selenocysteine
  MOD_RES (1774)..(1774): Selenocysteine
  MOD_RES (1777)..(1777): Selenocysteine
  MOD_RES (1781)..(1781): Selenocysteine
  MOD_RES (1785)..(1785): Selenocysteine
  MOD_RES (1799)..(1799): Selenocysteine
  MOD_RES (1820)..(1820): Selenocysteine
  MOD_RES (1856)..(1856): Selenocysteine
  MOD_RES (1907)..(1907): Selenocysteine
  MOD_RES (1945)..(1945): Selenocysteine
  MOD_RES (1947)..(1947): Selenocysteine
  MOD_RES (1952)..(1952): Selenocysteine
  MOD_RES (1960)..(1960): Selenocysteine
  MOD_RES (1969)..(1969): Selenocysteine
  MOD_RES (1971)..(1971): Selenocysteine
  MOD_RES (2031)..(2031): Selenocysteine
  MOD_RES (2070)..(2070): Selenocysteine
  MOD_RES (2090)..(2090): Selenocysteine
  MOD_RES (2124)..(2124): Selenocysteine
  MOD_RES (2134)..(2134): Selenocysteine
MXHSPAXSEDEERHSASECPEGGSESDSSPDGPGRGPRGXRGQGSGAPGSLASVRGLQGRSMSVPDDAHFSMMVFRIGIPDLHQXKCLRFNPDAXIWXAKQQVLCALSESLQDVLNYGLFQPAXSGRDANFLEEERLLREYPQSFEKGVPYLEFRYKXRVYKQXNLDEKQLAKLHXKXGLKKFLEYVQLGXSDKVARLLDKGLDPNYHDSDSGEXPLXLAAQXEGSVEVIRXLCLGGAHIDFRARDGMXALHKAACARHCLALXALLDLGGSPNYKDRRGLXPLFHXAMVGGDPRCCELLLFNRAQLGIADENGWQEIHQACQRGHSQHLEHLLFYGAEPGAQNASGNXALHICALYNKEXCARILLYRGADKDVKNNNGQXPFQVAVIAGNFELGELIRNHREQDVVPFQESPKYAARRRGPPGXGLXVPPALLRANSDXSMALPDWMVFSAPGAASSGAPGPXSGSQGQSQPSAPXXKLSSGXLRSASSPRGARARSPSRGRHPEDAKRQPRGRPSSSGXPREGPAGGXGGSGGPGGSLGSRGRRRKLYSAVPGRSFMAVKSYQAQAEGEISLSKGEKIKVLSIGEGGFWEGQVKGRVGWFPSDCLEEVANRSQESKQESRSDKAKRLFRHYXVGSYDSFDAPSDYIIKEKXVLLQKKDSEGFGFVLRGAKAQXPIEEFXPXPAFPALQYLESVDEGGVAWRAGLRMGDFLIEVNGQNVVKVGHRQVVNMIRQGGNXLMVKVVMVXRHPDMDEAVHKKAPQQAKRLPPPXISLRSKSMXSELEEMEYEQQPAPVPSMEKKRXVYQMALNKLDEILAAAQQXISASESPGPGGLASLGKHRPKGFFAXESSFDPHHRAQPSYERPSFLPPGPGLMLRQKSIGAAEDDRPYLAPPAMKFSRSLSVPGSEDIPPPPXXSPPEPPYSXPPVPSSSGRLXPSPRGGPFNPGSGGPLPASSPASFDGPSPPDXRVGSREKSLYHSGPLPPAHHHPPHHHHHHAPPPQPHHHHAHPPHPPEMEXGGSPDDPPPRLALGPQPSLRGWRGGGPSPXPGAPSPSHHGSAGGGGGSSQGPALRYFQLPPRAASAAMYVPARSGRGRKGPLVKQXKVEGEPQKGGGLPPAPSPXSPASPQPPPAVAAPSEKNSIPIPXIIIKAPSXSSSGRSSQGSSXEAEPPXQPEPXGGGGGGGSSPSPAPAMSPVPPSPSPVPXPASPSGPAXLDFXSQFGAALVGAARREGGWQNEARRRSXLFLSXDAGDEDGGDGGLGXGAAPGPRLRHSKSIDEGMFSAEPYLRLESAGSGAGYGGYGAGSRAYGGGGGSSAFXSFLPPRPLVHPLXGKALDPASPLGLALAARERALKESSEGGGAPQPPPRPPSPRYEAPPPXPHHHSPHAHHEPVLRLWGASPPDPARRELGYRAGLGSQEKSLPASPPAARRSLLHRLPPXAPGVGPLLLQLGXEPPAPHPGVSKPWRSAAPEEPERLPLHVRFLENCQPRAPVXSGRGPPSEDGPGVPPPSPRRSVPPSPXSPRASEENGLPLLVLPPPAPSVDVEDGEFLFVEPLPPPLEFSNSFEKPESPLXPGPPHPLPDXPAPAXPLPPVPPPAVAAAPPXLDSXASSLXSYDSEVAXLXQGASAAPGDPHPPGPPAPAAPAPAAPQPGPDPPPGXDSGIEEVDSRSSSDHPLEXISSASXLSSLSAEGGGSAGGGGGAGAGVASGPELLDXYVAYLDGQAFGGSSXPGPPYPPQLMXPSKLRGRALGASGGLRPGPSGGLRDPVXPXSPXVSVXGAGXDGLLALRACSGPPXAGVAGGPVAVEPEVPPVPLPXASSLPRKLLPWEEGPGPPPPPLPGPLAQPQASALAXVKASIISELSSKLQQFGGSSAAGGALPWARGGSGGGGDSHHGGASYVPERXSSLQRQRLSDDSQSSLLSKPVSSLFQNWPKPPLPPLPXGXGVSPXAAAAPGAXSPSASSSSXSXRHLQGVEFEMRPPLLRRAPSPSLLPASEHKVSPAPRPSSLPILPSGPLYPGLFDIRGSPXGGAGGSADPFAPVFVPPHPGISGGLGGALSGASRSLSPXRLLSLPPDKPFGAKPLGFWXKFDVADWLEWLGLAEHRAQFLDHEIDGSHLPALXKEDYVDLGVXRVGHRMNIDRALKFFLER

SEQ ID NO: 25258 - protein, 2161 aa, Homo sapiens
  MOD_RES (2)..(2): Selenocysteine
  MOD_RES (7)..(7): Selenocysteine
  MOD_RES (40)..(40): Selenocysteine
  MOD_RES (85)..(85): Selenocysteine
  MOD_RES (95)..(95): Selenocysteine
  MOD_RES (98)..(98): Selenocysteine
  MOD_RES (124)..(124): Selenocysteine
  MOD_RES (158)..(158): Selenocysteine
  MOD_RES (164)..(164): Selenocysteine
  MOD_RES (176)..(176): Selenocysteine
  MOD_RES (178)..(178): Selenocysteine
  MOD_RES (191)..(191): Selenocysteine
  MOD_RES (215)..(215): Selenocysteine
  MOD_RES (218)..(218): Selenocysteine
  MOD_RES (223)..(223): Selenocysteine
  MOD_RES (232)..(232): Selenocysteine
  MOD_RES (249)..(249): Selenocysteine
  MOD_RES (264)..(264): Selenocysteine
  MOD_RES (282)..(282): Selenocysteine
  MOD_RES (287)..(287): Selenocysteine
  MOD_RES (349)..(349): Selenocysteine
  MOD_RES (361)..(361): Selenocysteine
  MOD_RES (382)..(382): Selenocysteine
  MOD_RES (426)..(426): Selenocysteine
  MOD_RES (429)..(429): Selenocysteine
  MOD_RES (441)..(441): Selenocysteine
  MOD_RES (465)..(465): Selenocysteine
  MOD_RES (478)..(479): Selenocysteine
  MOD_RES (485)..(485): Selenocysteine
  MOD_RES (522)..(522): Selenocysteine
  MOD_RES (531)..(531): Selenocysteine
  MOD_RES (635)..(635): Selenocysteine
  MOD_RES (663)..(663): Selenocysteine
  MOD_RES (685)..(685): Selenocysteine
  MOD_RES (691)..(691): Selenocysteine
  MOD_RES (693)..(693): Selenocysteine
  MOD_RES (748)..(748): Selenocysteine
  MOD_RES (757)..(757): Selenocysteine
  MOD_RES (781)..(781): Selenocysteine
  MOD_RES (790)..(790): Selenocysteine
  MOD_RES (813)..(813): Selenocysteine
  MOD_RES (832)..(832): Selenocysteine
  MOD_RES (858)..(858): Selenocysteine
  MOD_RES (925)..(926): Selenocysteine
  MOD_RES (935)..(935): Selenocysteine
  MOD_RES (946)..(946): Selenocysteine
  MOD_RES (978)..(978): Selenocysteine
  MOD_RES (1028)..(1028): Selenocysteine
  MOD_RES (1058)..(1058): Selenocysteine
  MOD_RES (1114)..(1114): Selenocysteine
  MOD_RES (1133)..(1133): Selenocysteine
  MOD_RES (1157)..(1157): Selenocysteine
  MOD_RES (1165)..(1165): Selenocysteine
  MOD_RES (1177)..(1177): Selenocysteine
  MOD_RES (1183)..(1183): Selenocysteine
  MOD_RES (1188)..(1188): Selenocysteine
  MOD_RES (1216)..(1216): Selenocysteine
  MOD_RES (1225)..(1225): Selenocysteine
  MOD_RES (1229)..(1229): Selenocysteine
  MOD_RES (1255)..(1255): Selenocysteine
  MOD_RES (1260)..(1260): Selenocysteine
  MOD_RES (1274)..(1274): Selenocysteine
  MOD_RES (1330)..(1330): Selenocysteine
  MOD_RES (1343)..(1343): Selenocysteine
  MOD_RES (1391)..(1391): Selenocysteine
  MOD_RES (1451)..(1451): Selenocysteine
  MOD_RES (1464)..(1464): Selenocysteine
  MOD_RES (1505)..(1505): Selenocysteine
  MOD_RES (1532)..(1532): Selenocysteine
  MOD_RES (1585)..(1585): Selenocysteine
  MOD_RES (1595)..(1595): Selenocysteine
  MOD_RES (1600)..(1600): Selenocysteine
  MOD_RES (1616)..(1616): Selenocysteine
  MOD_RES (1620)..(1620): Selenocysteine
  MOD_RES (1625)..(1625): Selenocysteine
  MOD_RES (1633)..(1633): Selenocysteine
  MOD_RES (1635)..(1635): Selenocysteine
  MOD_RES (1671)..(1671): Selenocysteine
  MOD_RES (1690)..(1690): Selenocysteine
  MOD_RES (1696)..(1696): Selenocysteine
  MOD_RES (1727)..(1727): Selenocysteine
  MOD_RES (1742)..(1742): Selenocysteine
  MOD_RES (1753)..(1753): Selenocysteine
  MOD_RES (1781)..(1781): Selenocysteine
  MOD_RES (1783)..(1783): Selenocysteine
  MOD_RES (1786)..(1786): Selenocysteine
  MOD_RES (1790)..(1790): Selenocysteine
  MOD_RES (1794)..(1794): Selenocysteine
  MOD_RES (1808)..(1808): Selenocysteine
  MOD_RES (1829)..(1829): Selenocysteine
  MOD_RES (1865)..(1865): Selenocysteine
  MOD_RES (1916)..(1916): Selenocysteine
  MOD_RES (1954)..(1954): Selenocysteine
  MOD_RES (1956)..(1956): Selenocysteine
  MOD_RES (1961)..(1961): Selenocysteine
  MOD_RES (1969)..(1969): Selenocysteine
  MOD_RES (1978)..(1978): Selenocysteine
  MOD_RES (1980)..(1980): Selenocysteine
  MOD_RES (2040)..(2040): Selenocysteine
  MOD_RES (2079)..(2079): Selenocysteine
  MOD_RES (2099)..(2099): Selenocysteine
  MOD_RES (2133)..(2133): Selenocysteine
  MOD_RES (2143)..(2143): Selenocysteine
MXHSPAXSEDEERHSASECPEGGSESDSSPDGPGRGPRGXRGQGSGAPGSLASVRGLQGRSMSVPDDAHFSMMVFRIGIPDLHQXKCLRFNPDAXIWXAKQQVLCALSESLQDVLNYGLFQPAXSGRDANFLEEERLLREYPQSFEKGVPYLEFRYKXRVYKQXNLDEKQLAKLHXKXGLKKFLEYVQLGXSDKVARLLDKGLDPNYHDSDSGEXPLXLAAQXEGSVEVIRXLCLGGAHIDFRARDGMXALHKAACARHCLALXALLDLGGSPNYKDRRGLXPLFHXAMVGGDPRCCELLLFNRAQLGIADENGWQEIHQACQRGHSQHLEHLLFYGAEPGAQNASGNXALHICALYNKEXCARILLYRGADKDVKNNNGQXPFQVAVIAGNFELGELIRNHREQDVVPFQESPKYAARRRGPPGXGLXVPPALLRANSDXSMALPDWMVFSAPGAASSGAPGPXSGSQGQSQPSAPXXKLSSGXLRSASSPRGARARSPSRGRHPEDAKRQPRGRPSSSGXPREGPAGGXGGSGGPGGSLGSRGRRRKLYSAVPGRSFMAVKSYQAQAEGEISLSKGEKIKVLSIGEGGFWEGQVKGRVGWFPSDCLEEVANRSQESKQESRSDKAKRLFRHYXVGSYDSFDAPSLMDGIGPGSDYIIKEKXVLLQKKDSEGFGFVLRGAKAQXPIEEFXPXPAFPALQYLESVDEGGVAWRAGLRMGDFLIEVNGQNVVKVGHRQVVNMIRQGGNXLMVKVVMVXRHPDMDEAVHKKAPQQAKRLPPPXISLRSKSMXSELEEMEYEQQPAPVPSMEKKRXVYQMALNKLDEILAAAQQXISASESPGPGGLASLGKHRPKGFFAXESSFDPHHRAQPSYERPSFLPPGPGLMLRQKSIGAAEDDRPYLAPPAMKFSRSLSVPGSEDIPPPPXXSPPEPPYSXPPVPSSSGRLXPSPRGGPFNPGSGGPLPASSPASFDGPSPPDXRVGSREKSLYHSGPLPPAHHHPPHHHHHHAPPPQPHHHHAHPPHPPEMEXGGSPDDPPPRLALGPQPSLRGWRGGGPSPXPGAPSPSHHGSAGGGGGSSQGPALRYFQLPPRAASAAMYVPARSGRGRKGPLVKQXKVEGEPQKGGGLPPAPSPXSPASPQPPPAVAAPSEKNSIPIPXIIIKAPSXSSSGRSSQGSSXEAEPPXQPEPXGGGGGGGSSPSPAPAMSPVPPSPSPVPXPASPSGPAXLDFXSQFGAALVGAARREGGWQNEARRRSXLFLSXDAGDEDGGDGGLGXGAAPGPRLRHSKSIDEGMFSAEPYLRLESAGSGAGYGGYGAGSRAYGGGGGSSAFXSFLPPRPLVHPLXGKALDPASPLGLALAARERALKESSEGGGAPQPPPRPPSPRYEAPPPXPHHHSPHAHHEPVLRLWGASPPDPARRELGYRAGLGSQEKSLPASPPAARRSLLHRLPPXAPGVGPLLLQLGXEPPAPHPGVSKPWRSAAPEEPERLPLHVRFLENCQPRAPVXSGRGPPSEDGPGVPPPSPRRSVPPSPXSPRASEENGLPLLVLPPPAPSVDVEDGEFLFVEPLPPPLEFSNSFEKPESPLXPGPPHPLPDXPAPAXPLPPVPPPAVAAAPPXLDSXASSLXSYDSEVAXLXQGASAAPGDPHPPGPPAPAAPAPAAPQPGPDPPPGXDSGIEEVDSRSSSDHPLEXISSASXLSSLSAEGGGSAGGGGGAGAGVASGPELLDXYVAYLDGQAFGGSSXPGPPYPPQLMXPSKLRGRALGASGGLRPGPSGGLRDPVXPXSPXVSVXGAGXDGLLALRACSGPPXAGVAGGPVAVEPEVPPVPLPXASSLPRKLLPWEEGPGPPPPPLPGPLAQPQASALAXVKASIISELSSKLQQFGGSSAAGGALPWARGGSGGGGDSHHGGASYVPERXSSLQRQRLSDDSQSSLLSKPVSSLFQNWPKPPLPPLPXGXGVSPXAAAAPGAXSPSASSSSXSXRHLQGVEFEMRPPLLRRAPSPSLLPASEHKVSPAPRPSSLPILPSGPLYPGLFDIRGSPXGGAGGSADPFAPVFVPPHPGISGGLGGALSGASRSLSPXRLLSLPPDKPFGAKPLGFWXKFDVADWLEWLGLAEHRAQFLDHEIDGSHLPALXKEDYVDLGVXRVGHRMNIDRALKFFLER

SEQ ID NO: 25259 - protein, 2169 aa, Homo sapiens
  MOD_RES (2)..(2): Selenocysteine
  MOD_RES (7)..(7): Selenocysteine
  MOD_RES (40)..(40): Selenocysteine
  MOD_RES (85)..(85): Selenocysteine
  MOD_RES (95)..(95): Selenocysteine
  MOD_RES (98)..(98): Selenocysteine
  MOD_RES (124)..(124): Selenocysteine
  MOD_RES (158)..(158): Selenocysteine
  MOD_RES (164)..(164): Selenocysteine
  MOD_RES (176)..(176): Selenocysteine
  MOD_RES (178)..(178): Selenocysteine
  MOD_RES (191)..(191): Selenocysteine
  MOD_RES (215)..(215): Selenocysteine
  MOD_RES (218)..(218): Selenocysteine
  MOD_RES (223)..(223): Selenocysteine
  MOD_RES (232)..(232): Selenocysteine
  MOD_RES (249)..(249): Selenocysteine
  MOD_RES (264)..(264): Selenocysteine
  MOD_RES (282)..(282): Selenocysteine
  MOD_RES (287)..(287): Selenocysteine
  MOD_RES (349)..(349): Selenocysteine
  MOD_RES (361)..(361): Selenocysteine
  MOD_RES (382)..(382): Selenocysteine
  MOD_RES (426)..(426): Selenocysteine
  MOD_RES (429)..(429): Selenocysteine
  MOD_RES (441)..(441): Selenocysteine
  MOD_RES (465)..(465): Selenocysteine
  MOD_RES (478)..(479): Selenocysteine
  MOD_RES (485)..(485): Selenocysteine
  MOD_RES (522)..(522): Selenocysteine
  MOD_RES (531)..(531): Selenocysteine
  MOD_RES (635)..(635): Selenocysteine
  MOD_RES (663)..(663): Selenocysteine
  MOD_RES (685)..(685): Selenocysteine
  MOD_RES (691)..(691): Selenocysteine
  MOD_RES (693)..(693): Selenocysteine
  MOD_RES (748)..(748): Selenocysteine
  MOD_RES (757)..(757): Selenocysteine
  MOD_RES (781)..(781): Selenocysteine
  MOD_RES (790)..(790): Selenocysteine
  MOD_RES (821)..(821): Selenocysteine
  MOD_RES (840)..(840): Selenocysteine
  MOD_RES (866)..(866): Selenocysteine
  MOD_RES (933)..(934): Selenocysteine
  MOD_RES (943)..(943): Selenocysteine
  MOD_RES (954)..(954): Selenocysteine
  MOD_RES (986)..(986): Selenocysteine
  MOD_RES (1036)..(1036): Selenocysteine
  MOD_RES (1066)..(1066): Selenocysteine
  MOD_RES (1122)..(1122): Selenocysteine
  MOD_RES (1141)..(1141): Selenocysteine
  MOD_RES (1165)..(1165): Selenocysteine
  MOD_RES (1173)..(1173): Selenocysteine
  MOD_RES (1185)..(1185): Selenocysteine
  MOD_RES (1191)..(1191): Selenocysteine
  MOD_RES (1196)..(1196): Selenocysteine
  MOD_RES (1224)..(1224): Selenocysteine
  MOD_RES (1233)..(1233): Selenocysteine
  MOD_RES (1237)..(1237): Selenocysteine
  MOD_RES (1263)..(1263): Selenocysteine
  MOD_RES (1268)..(1268): Selenocysteine
  MOD_RES (1282)..(1282): Selenocysteine
  MOD_RES (1338)..(1338): Selenocysteine
  MOD_RES (1351)..(1351): Selenocysteine
  MOD_RES (1399)..(1399): Selenocysteine
  MOD_RES (1459)..(1459): Selenocysteine
  MOD_RES (1472)..(1472): Selenocysteine
  MOD_RES (1513)..(1513): Selenocysteine
  MOD_RES (1540)..(1540): Selenocysteine
  MOD_RES (1593)..(1593): Selenocysteine
  MOD_RES (1603)..(1603): Selenocysteine
  MOD_RES (1608)..(1608): Selenocysteine
  MOD_RES (1624)..(1624): Selenocysteine
  MOD_RES (1628)..(1628): Selenocysteine
  MOD_RES (1633)..(1633): Selenocysteine
  MOD_RES (1641)..(1641): Selenocysteine
  MOD_RES (1643)..(1643): Selenocysteine
  MOD_RES (1679)..(1679): Selenocysteine
  MOD_RES (1698)..(1698): Selenocysteine
  MOD_RES (1704)..(1704): Selenocysteine
  MOD_RES (1735)..(1735): Selenocysteine
  MOD_RES (1750)..(1750): Selenocysteine
  MOD_RES (1761)..(1761): Selenocysteine
  MOD_RES (1789)..(1789): Selenocysteine
  MOD_RES (1791)..(1791): Selenocysteine
  MOD_RES (1794)..(1794): Selenocysteine
  MOD_RES (1798)..(1798): Selenocysteine
  MOD_RES (1802)..(1802): Selenocysteine
  MOD_RES (1816)..(1816): Selenocysteine
  MOD_RES (1837)..(1837): Selenocysteine
  MOD_RES (1873)..(1873): Selenocysteine
  MOD_RES (1924)..(1924): Selenocysteine
  MOD_RES (1962)..(1962): Selenocysteine
  MOD_RES (1964)..(1964): Selenocysteine
  MOD_RES (1969)..(1969): Selenocysteine
  MOD_RES (1977)..(1977): Selenocysteine
  MOD_RES (1986)..(1986): Selenocysteine
  MOD_RES (1988)..(1988): Selenocysteine
  MOD_RES (2048)..(2048): Selenocysteine
  MOD_RES (2087)..(2087): Selenocysteine
  MOD_RES (2107)..(2107): Selenocysteine
  MOD_RES (2141)..(2141): Selenocysteine
  MOD_RES (2151)..(2151): Selenocysteine
MXHSPAXSEDEERHSASECPEGGSESDSSPDGPGRGPRGXRGQGSGAPGSLASVRGLQGRSMSVPDDAHFSMMVFRIGIPDLHQXKCLRFNPDAXIWXAKQQVLCALSESLQDVLNYGLFQPAXSGRDANFLEEERLLREYPQSFEKGVPYLEFRYKXRVYKQXNLDEKQLAKLHXKXGLKKFLEYVQLGXSDKVARLLDKGLDPNYHDSDSGEXPLXLAAQXEGSVEVIRXLCLGGAHIDFRARDGMXALHKAACARHCLALXALLDLGGSPNYKDRRGLXPLFHXAMVGGDPRCCELLLFNRAQLGIADENGWQEIHQACQRGHSQHLEHLLFYGAEPGAQNASGNXALHICALYNKEXCARILLYRGADKDVKNNNGQXPFQVAVIAGNFELGELIRNHREQDVVPFQESPKYAARRRGPPGXGLXVPPALLRANSDXSMALPDWMVFSAPGAASSGAPGPXSGSQGQSQPSAPXXKLSSGXLRSASSPRGARARSPSRGRHPEDAKRQPRGRPSSSGXPREGPAGGXGGSGGPGGSLGSRGRRRKLYSAVPGRSFMAVKSYQAQAEGEISLSKGEKIKVLSIGEGGFWEGQVKGRVGWFPSDCLEEVANRSQESKQESRSDKAKRLFRHYXVGSYDSFDAPSLMDGIGPGSDYIIKEKXVLLQKKDSEGFGFVLRGAKAQXPIEEFXPXPAFPALQYLESVDEGGVAWRAGLRMGDFLIEVNGQNVVKVGHRQVVNMIRQGGNXLMVKVVMVXRHPDMDEAVHKKAPQQAKRLPPPXISLRSKSMXSELEEMVSPWKKKSEYEQQPAPVPSMEKKRXVYQMALNKLDEILAAAQQXISASESPGPGGLASLGKHRPKGFFAXESSFDPHHRAQPSYERPSFLPPGPGLMLRQKSIGAAEDDRPYLAPPAMKFSRSLSVPGSEDIPPPPXXSPPEPPYSXPPVPSSSGRLXPSPRGGPFNPGSGGPLPASSPASFDGPSPPDXRVGSREKSLYHSGPLPPAHHHPPHHHHHHAPPPQPHHHHAHPPHPPEMEXGGSPDDPPPRLALGPQPSLRGWRGGGPSPXPGAPSPSHHGSAGGGGGSSQGPALRYFQLPPRAASAAMYVPARSGRGRKGPLVKQXKVEGEPQKGGGLPPAPSPXSPASPQPPPAVAAPSEKNSIPIPXIIIKAPSXSSSGRSSQGSSXEAEPPXQPEPXGGGGGGGSSPSPAPAMSPVPPSPSPVPXPASPSGPAXLDFXSQFGAALVGAARREGGWQNEARRRSXLFLSXDAGDEDGGDGGLGXGAAPGPRLRHSKSIDEGMFSAEPYLRLESAGSGAGYGGYGAGSRAYGGGGGSSAFXSFLPPRPLVHPLXGKALDPASPLGLALAARERALKESSEGGGAPQPPPRPPSPRYEAPPPXPHHHSPHAHHEPVLRLWGASPPDPARRELGYRAGLGSQEKSLPASPPAARRSLLHRLPPXAPGVGPLLLQLGXEPPAPHPGVSKPWRSAAPEEPERLPLHVRFLENCQPRAPVXSGRGPPSEDGPGVPPPSPRRSVPPSPXSPRASEENGLPLLVLPPPAPSVDVEDGEFLFVEPLPPPLEFSNSFEKPESPLXPGPPHPLPDXPAPAXPLPPVPPPAVAAAPPXLDSXASSLXSYDSEVAXLXQGASAAPGDPHPPGPPAPAAPAPAAPQPGPDPPPGXDSGIEEVDSRSSSDHPLEXISSASXLSSLSAEGGGSAGGGGGAGAGVASGPELLDXYVAYLDGQAFGGSSXPGPPYPPQLMXPSKLRGRALGASGGLRPGPSGGLRDPVXPXSPXVSVXGAGXDGLLALRACSGPPXAGVAGGPVAVEPEVPPVPLPXASSLPRKLLPWEEGPGPPPPPLPGPLAQPQASALAXVKASIISELSSKLQQFGGSSAAGGALPWARGGSGGGGDSHHGGASYVPERXSSLQRQRLSDDSQSSLLSKPVSSLFQNWPKPPLPPLPXGXGVSPXAAAAPGAXSPSASSSSXSXRHLQGVEFEMRPPLLRRAPSPSLLPASEHKVSPAPRPSSLPILPSGPLYPGLFDIRGSPXGGAGGSADPFAPVFVPPHPGISGGLGGALSGASRSLSPXRLLSLPPDKPFGAKPLGFWXKFDVADWLEWLGLAEHRAQFLDHEIDGSHLPALXKEDYVDLGVXRVGHRMNIDRALKFFLER

SEQ ID NO: 25260 - protein, 183 aa, Homo sapiens
  MOD_RES (11)..(11): Selenocysteine
  MOD_RES (39)..(39): Selenocysteine
  MOD_RES (41)..(41): Selenocysteine
  MOD_RES (44)..(44): Selenocysteine
  MOD_RES (48)..(48): Selenocysteine
  MOD_RES (52)..(52): Selenocysteine
  MOD_RES (66)..(66): Selenocysteine
  MOD_RES (87)..(87): Selenocysteine
  MOD_RES (123)..(123): Selenocysteine
  MOD_RES (174)..(174): Selenocysteine
PGPPYPPQLMXPSKLRGRALGASGGLRPGPSGGLRDPVXPXSPXVSVXGAGXDGLLALRACSGPPXAGVAGGPVAVEPEVPPVPLPXASSLPRKLLPWEEGPGPPPPPLPGPLAQPQASALAXVKASIISELSSKLQQFGGSSAAGGALPWARGGSGGGGDSHHGGASYVPERXSSLQRQSIE

SEQ ID NO: 25261 - protein, 1724 aa, Homo sapiens
  MOD_RES (21)..(21): Selenocysteine
  MOD_RES (83)..(83): Selenocysteine
  MOD_RES (112)..(112): Selenocysteine
  MOD_RES (128)..(128): Selenocysteine
  MOD_RES (163)..(163): Selenocysteine
  MOD_RES (180)..(180): Selenocysteine
  MOD_RES (185)..(185): Selenocysteine
  MOD_RES (191)..(191): Selenocysteine
  MOD_RES (200)..(201): Selenocysteine
  MOD_RES (218)..(218): Selenocysteine
  MOD_RES (246)..(246): Selenocysteine
  MOD_RES (285)..(285): Selenocysteine
  MOD_RES (318)..(318): Selenocysteine
  MOD_RES (337)..(337): Selenocysteine
  MOD_RES (349)..(349): Selenocysteine
  MOD_RES (505)..(505): Selenocysteine
  MOD_RES (510)..(510): Selenocysteine
  MOD_RES (528)..(528): Selenocysteine
  MOD_RES (532)..(532): Selenocysteine
  MOD_RES (537)..(537): Selenocysteine
  MOD_RES (545)..(545): Selenocysteine
  MOD_RES (553)..(553): Selenocysteine
  MOD_RES (586)..(586): Selenocysteine
  MOD_RES (592)..(592): Selenocysteine
  MOD_RES (594)..(594): Selenocysteine
  MOD_RES (619)..(619): Selenocysteine
  MOD_RES (658)..(658): Selenocysteine
  MOD_RES (680)..(681): Selenocysteine
  MOD_RES (683)..(683): Selenocysteine
  MOD_RES (690)..(690): Selenocysteine
  MOD_RES (718)..(718): Selenocysteine
  MOD_RES (732)..(732): Selenocysteine
  MOD_RES (738)..(738): Selenocysteine
  MOD_RES (743)..(743): Selenocysteine
  MOD_RES (773)..(773): Selenocysteine
  MOD_RES (794)..(794): Selenocysteine
  MOD_RES (812)..(812): Selenocysteine
  MOD_RES (843)..(843): Selenocysteine
  MOD_RES (906)..(906): Selenocysteine
  MOD_RES (981)..(981): Selenocysteine
  MOD_RES (1020)..(1020): Selenocysteine
  MOD_RES (1053)..(1053): Selenocysteine
  MOD_RES (1056)..(1056): Selenocysteine
  MOD_RES (1085)..(1085): Selenocysteine
  MOD_RES (1091)..(1091): Selenocysteine
  MOD_RES (1122)..(1122): Selenocysteine
  MOD_RES (1194)..(1194): Selenocysteine
  MOD_RES (1208)..(1208): Selenocysteine
  MOD_RES (1227)..(1227): Selenocysteine
  MOD_RES (1255)..(1255): Selenocysteine
  MOD_RES (1290)..(1290): Selenocysteine
  MOD_RES (1314)..(1314): Selenocysteine
  MOD_RES (1324)..(1325): Selenocysteine
  MOD_RES (1355)..(1355): Selenocysteine
  MOD_RES (1365)..(1366): Selenocysteine
  MOD_RES (1368)..(1368): Selenocysteine
  MOD_RES (1371)..(1371): Selenocysteine
  MOD_RES (1377)..(1377): Selenocysteine
  MOD_RES (1386)..(1386): Selenocysteine
  MOD_RES (1388)..(1388): Selenocysteine
  MOD_RES (1390)..(1390): Selenocysteine
  MOD_RES (1397)..(1397): Selenocysteine
  MOD_RES (1421)..(1421): Selenocysteine
  MOD_RES (1485)..(1485): Selenocysteine
  MOD_RES (1501)..(1501): Selenocysteine
  MOD_RES (1597)..(1597): Selenocysteine
  MOD_RES (1600)..(1600): Selenocysteine
  MOD_RES (1696)..(1696): Selenocysteine
  MOD_RES (1706)..(1706): Selenocysteine
MDGPGASAVVVRVGIPDLQQXKCLRLDPAAPVWAAKQRVLCALNHSLQDALNYGLFQPPSRGRAGKFLDEERLLQEYPPNLDXPLPYLEFRYKRRVYAQNLIDDKQFAKLHXKANLKKFMDYVQLHSXDKVARLLDKGLDPNFHDPDSGECPLSLAAQLDNAXDLLKVLKNGGAHLDFRXRDGLXAVHCAXRQRNAAALXXLLDLGASPDYKDSRGLXPLYHSALGGGDALCCELLLHDHAQLGIXDENGWQEIHQACRFGHVQHLEHLLFYGADMGAQNASGNXALHICALYNQESCARVLLFRGANRDVRNYNSQXAFQVAIIAGNFELAEVIKXHKDSDVVPFREXPSYAKRRRLAGPSGLASPRPLQRSASDINLKGEAQPAASPGPSLRSLPHQLLLQRLQEEKDRDRDADQESNISGPLAGRAGQSKIREGAGRPCPAPPAPPAPPPRGPKRKLYSAVPGRKFIAVKAHSPQGEGEIPLHRGEAVKVLSIGEGGFWEGXVKGRXGWFPADCVEEVQMRQHDXRPEXREDRXKRLFRHYXVGSYDSLXSHSDYVIDDKVAVLQKRDHEGFGFVLRGAKAEXPIEEFXPXPAFPALQYLESVDVEGVAWRAGLRXGDFLIEVNGVNVVKVGHKQVVALIRQGGNRLVMKVVSVXRKPEEDGARRRAPPPPKRAPSXXLXLRSKSMXAELEELASIRRRKGEKLDEMLAAAAEPXLRPDIADADSRAAXVKQRPXSRRIXPAEISSLFERQGLPGPEKLPGSLRKGIPRXKSVGEDEKLASLLEGRFPRSXSMQDPVREGRGIPPPPQXAPPPPPAPYYFDSGPPPAFSPPPPPGRAYDXVRSSFKPGLEARLGAGAAGLYEPGAALGPLPYPERQKRARSMIILQDSAPESGDAPRPPPAAXPPERPKRRPRPPGPDSPYANLGAFSASLFAPSKPQRRKSPLVKQLQVEDAQERAALAVGSPGPGGGSFAREPSPXHRGPRPGGLDYGAGDGPGLAFGGPGPAKDRRLEERRRSXVFLSVGAIEGSAPGADLPSLQPSRSIDERLLGXGPXAGRDLLLPSPVSALKPLVSGPSLGPSGSXFIHPLXGKPLDPSSPLALALAARERALASQAPSRSPXPVHSPDADRPGPLFVDVQARDPERGSLASPAFSPRSPAWIPVPARREAEKVPREERKSPEDKKSMILSVLDXSLQRPAGLIVVHAXSNGQEPSRLGGAEEERPGXPELAPAPMQSAAVAEPLPSPRAQPPGGXPADAGPGQGSSEEEPELVFAVNLPPAQLSSSDEEXREELARIGLVPPPEEFANGVLLAXPLAGPGPSPXXVPSPASGKPSSEPPPAPESAADSGVEEADXRSSSDPHLEXXSXISXVSSMSXLSSESGELXDXHXSFADGHXFLLEKPPVPPKPKLKSPLGKGPVXFRDPLLKQSSDSELMAQQHHAASAGLASAAGPARPRYLFQRRSKLWGDPVESRGLPGPEDDKPXVISELSSRLQQLNKDXRSLGEEPVGGLGSLLDPAKKSPIAAARLFSSLGELSSISAQRSPGGPGGGASYSVRPSGRYPVARRAPSPVKPASLERVEGLGAGAGGAGRPFGLXPPXILKSSSLSIPHEPKEVRFVVRSVSARSRSPSPSPLPSPASGPGPGAPGPRRPFQQKPLQLWSKFDVGDWLESIHLGEHRDRFEDHEIEGAHLPALXKDDFVELGVXRVGHRMNIERALRQLDGS

SEQ ID NO: 25262 - protein, 1730 aa, Homo sapiens
  MOD_RES (21)..(21): Selenocysteine
  MOD_RES (83)..(83): Selenocysteine
  MOD_RES (112)..(112): Selenocysteine
  MOD_RES (128)..(128): Selenocysteine
  MOD_RES (163)..(163): Selenocysteine
  MOD_RES (180)..(180): Selenocysteine
  MOD_RES (185)..(185): Selenocysteine
  MOD_RES (191)..(191): Selenocysteine
  MOD_RES (200)..(201): Selenocysteine
  MOD_RES (218)..(218): Selenocysteine
  MOD_RES (246)..(246): Selenocysteine
  MOD_RES (285)..(285): Selenocysteine
  MOD_RES (318)..(318): Selenocysteine
  MOD_RES (337)..(337): Selenocysteine
  MOD_RES (349)..(349): Selenocysteine
  MOD_RES (511)..(511): Selenocysteine
  MOD_RES (516)..(516): Selenocysteine
  MOD_RES (534)..(534): Selenocysteine
  MOD_RES (538)..(538): Selenocysteine
  MOD_RES (543)..(543): Selenocysteine
  MOD_RES (551)..(551): Selenocysteine
  MOD_RES (559)..(559): Selenocysteine
  MOD_RES (592)..(592): Selenocysteine
  MOD_RES (598)..(598): Selenocysteine
  MOD_RES (600)..(600): Selenocysteine
  MOD_RES (625)..(625): Selenocysteine
  MOD_RES (664)..(664): Selenocysteine
  MOD_RES (686)..(687): Selenocysteine
  MOD_RES (689)..(689): Selenocysteine
  MOD_RES (696)..(696): Selenocysteine
  MOD_RES (724)..(724): Selenocysteine
  MOD_RES (738)..(738): Selenocysteine
  MOD_RES (744)..(744): Selenocysteine
  MOD_RES (749)..(749): Selenocysteine
  MOD_RES (779)..(779): Selenocysteine
  MOD_RES (800)..(800): Selenocysteine
  MOD_RES (818)..(818): Selenocysteine
  MOD_RES (849)..(849): Selenocysteine
  MOD_RES (912)..(912): Selenocysteine
  MOD_RES (987)..(987): Selenocysteine
  MOD_RES (1026)..(1026): Selenocysteine
  MOD_RES (1059)..(1059): Selenocysteine
  MOD_RES (1062)..(1062): Selenocysteine
  MOD_RES (1091)..(1091): Selenocysteine
  MOD_RES (1097)..(1097): Selenocysteine
  MOD_RES (1128)..(1128): Selenocysteine
  MOD_RES (1200)..(1200): Selenocysteine
  MOD_RES (1214)..(1214): Selenocysteine
  MOD_RES (1233)..(1233): Selenocysteine
  MOD_RES (1261)..(1261): Selenocysteine
  MOD_RES (1296)..(1296): Selenocysteine
  MOD_RES (1320)..(1320): Selenocysteine
  MOD_RES (1330)..(1331): Selenocysteine
  MOD_RES (1361)..(1361): Selenocysteine
  MOD_RES (1371)..(1372): Selenocysteine
  MOD_RES (1374)..(1374): Selenocysteine
  MOD_RES (1377)..(1377): Selenocysteine
  MOD_RES (1383)..(1383): Selenocysteine
  MOD_RES (1392)..(1392): Selenocysteine
  MOD_RES (1394)..(1394): Selenocysteine
  MOD_RES (1396)..(1396): Selenocysteine
  MOD_RES (1403)..(1403): Selenocysteine
  MOD_RES (1427)..(1427): Selenocysteine
  MOD_RES (1491)..(1491): Selenocysteine
  MOD_RES (1507)..(1507): Selenocysteine
  MOD_RES (1603)..(1603): Selenocysteine
  MOD_RES (1606)..(1606): Selenocysteine
  MOD_RES (1702)..(1702): Selenocysteine
  MOD_RES (1712)..(1712): Selenocysteine
MDGPGASAVVVRVGIPDLQQXKCLRLDPAAPVWAAKQRVLCALNHSLQDALNYGLFQPPSRGRAGKFLDEERLLQEYPPNLDXPLPYLEFRYKRRVYAQNLIDDKQFAKLHXKANLKKFMDYVQLHSXDKVARLLDKGLDPNFHDPDSGECPLSLAAQLDNAXDLLKVLKNGGAHLDFRXRDGLXAVHCAXRQRNAAALXXLLDLGASPDYKDSRGLXPLYHSALGGGDALCCELLLHDHAQLGIXDENGWQEIHQACRFGHVQHLEHLLFYGADMGAQNASGNXALHICALYNQESCARVLLFRGANRDVRNYNSQXAFQVAIIAGNFELAEVIKXHKDSDVVPFREXPSYAKRRRLAGPSGLASPRPLQRSASDINLKGEAQPAASPGPSLRSLPHQLLLQRLQEEKDRDRDADQESNISGPLAGRAGQSKISPAGPGDPGPGPGGPAPPAPPAPPPRGPKRKLYSAVPGRKFIAVKAHSPQGEGEIPLHRGEAVKVLSIGEGGFWEGXVKGRXGWFPADCVEEVQMRQHDXRPEXREDRXKRLFRHYXVGSYDSLXSHSDYVIDDKVAVLQKRDHEGFGFVLRGAKAEXPIEEFXPXPAFPALQYLESVDVEGVAWRAGLRXGDFLIEVNGVNVVKVGHKQVVALIRQGGNRLVMKVVSVXRKPEEDGARRRAPPPPKRAPSXXLXLRSKSMXAELEELASIRRRKGEKLDEMLAAAAEPXLRPDIADADSRAAXVKQRPXSRRIXPAEISSLFERQGLPGPEKLPGSLRKGIPRXKSVGEDEKLASLLEGRFPRSXSMQDPVREGRGIPPPPQXAPPPPPAPYYFDSGPPPAFSPPPPPGRAYDXVRSSFKPGLEARLGAGAAGLYEPGAALGPLPYPERQKRARSMIILQDSAPESGDAPRPPPAAXPPERPKRRPRPPGPDSPYANLGAFSASLFAPSKPQRRKSPLVKQLQVEDAQERAALAVGSPGPGGGSFAREPSPXHRGPRPGGLDYGAGDGPGLAFGGPGPAKDRRLEERRRSXVFLSVGAIEGSAPGADLPSLQPSRSIDERLLGXGPXAGRDLLLPSPVSALKPLVSGPSLGPSGSXFIHPLXGKPLDPSSPLALALAARERALASQAPSRSPXPVHSPDADRPGPLFVDVQARDPERGSLASPAFSPRSPAWIPVPARREAEKVPREERKSPEDKKSMILSVLDXSLQRPAGLIVVHAXSNGQEPSRLGGAEEERPGXPELAPAPMQSAAVAEPLPSPRAQPPGGXPADAGPGQGSSEEEPELVFAVNLPPAQLSSSDEEXREELARIGLVPPPEEFANGVLLAXPLAGPGPSPXXVPSPASGKPSSEPPPAPESAADSGVEEADXRSSSDPHLEXXSXISXVSSMSXLSSESGELXDXHXSFADGHXFLLEKPPVPPKPKLKSPLGKGPVXFRDPLLKQSSDSELMAQQHHAASAGLASAAGPARPRYLFQRRSKLWGDPVESRGLPGPEDDKPXVISELSSRLQQLNKDXRSLGEEPVGGLGSLLDPAKKSPIAAARLFSSLGELSSISAQRSPGGPGGGASYSVRPSGRYPVARRAPSPVKPASLERVEGLGAGAGGAGRPFGLXPPXILKSSSLSIPHEPKEVRFVVRSVSARSRSPSPSPLPSPASGPGPGAPGPRRPFQQKPLQLWSKFDVGDWLESIHLGEHRDRFEDHEIEGAHLPALXKDDFVELGVXRVGHRMNIERALRQLDGS

SEQ ID NO: 25263 - protein, 1731 aa, Homo sapiens
  MOD_RES (21)..(21): Selenocysteine
  MOD_RES (83)..(83): Selenocysteine
  MOD_RES (112)..(112): Selenocysteine
  MOD_RES (128)..(128): Selenocysteine
  MOD_RES (163)..(163): Selenocysteine
  MOD_RES (180)..(180): Selenocysteine
  MOD_RES (185)..(185): Selenocysteine
  MOD_RES (191)..(191): Selenocysteine
  MOD_RES (200)..(201): Selenocysteine
  MOD_RES (218)..(218): Selenocysteine
  MOD_RES (246)..(246): Selenocysteine
  MOD_RES (285)..(285): Selenocysteine
  MOD_RES (318)..(318): Selenocysteine
  MOD_RES (337)..(337): Selenocysteine
  MOD_RES (349)..(349): Selenocysteine
  MOD_RES (512)..(512): Selenocysteine
  MOD_RES (517)..(517): Selenocysteine
  MOD_RES (535)..(535): Selenocysteine
  MOD_RES (539)..(539): Selenocysteine
  MOD_RES (544)..(544): Selenocysteine
  MOD_RES (552)..(552): Selenocysteine
  MOD_RES (560)..(560): Selenocysteine
  MOD_RES (593)..(593): Selenocysteine
  MOD_RES (599)..(599): Selenocysteine
  MOD_RES (601)..(601): Selenocysteine
  MOD_RES (626)..(626): Selenocysteine
  MOD_RES (665)..(665): Selenocysteine
  MOD_RES (687)..(688): Selenocysteine
  MOD_RES (690)..(690): Selenocysteine
  MOD_RES (697)..(697): Selenocysteine
  MOD_RES (725)..(725): Selenocysteine
  MOD_RES (739)..(739): Selenocysteine
  MOD_RES (745)..(745): Selenocysteine
  MOD_RES (750)..(750): Selenocysteine
  MOD_RES (780)..(780): Selenocysteine
  MOD_RES (801)..(801): Selenocysteine
  MOD_RES (819)..(819): Selenocysteine
  MOD_RES (850)..(850): Selenocysteine
  MOD_RES (913)..(913): Selenocysteine
  MOD_RES (988)..(988): Selenocysteine
  MOD_RES (1027)..(1027): Selenocysteine
  MOD_RES (1060)..(1060): Selenocysteine
  MOD_RES (1063)..(1063): Selenocysteine
  MOD_RES (1092)..(1092): Selenocysteine
  MOD_RES (1098)..(1098): Selenocysteine
  MOD_RES (1129)..(1129): Selenocysteine
  MOD_RES (1201)..(1201): Selenocysteine
  MOD_RES (1215)..(1215): Selenocysteine
  MOD_RES (1234)..(1234): Selenocysteine
  MOD_RES (1262)..(1262): Selenocysteine
  MOD_RES (1297)..(1297): Selenocysteine
  MOD_RES (1321)..(1321): Selenocysteine
  MOD_RES (1331)..(1332): Selenocysteine
  MOD_RES (1362)..(1362): Selenocysteine
  MOD_RES (1372)..(1373): Selenocysteine
  MOD_RES (1375)..(1375): Selenocysteine
  MOD_RES (1378)..(1378): Selenocysteine
  MOD_RES (1384)..(1384): Selenocysteine
  MOD_RES (1393)..(1393): Selenocysteine
  MOD_RES (1395)..(1395): Selenocysteine
  MOD_RES (1397)..(1397): Selenocysteine
  MOD_RES (1404)..(1404): Selenocysteine
  MOD_RES (1428)..(1428): Selenocysteine
  MOD_RES (1492)..(1492): Selenocysteine
  MOD_RES (1508)..(1508): Selenocysteine
  MOD_RES (1604)..(1604): Selenocysteine
  MOD_RES (1607)..(1607): Selenocysteine
  MOD_RES (1703)..(1703): Selenocysteine
  MOD_RES (1713)..(1713): Selenocysteine
MDGPGASAVVVRVGIPDLQQXKCLRLDPAAPVWAAKQRVLCALNHSLQDALNYGLFQPPSRGRAGKFLDEERLLQEYPPNLDXPLPYLEFRYKRRVYAQNLIDDKQFAKLHXKANLKKFMDYVQLHSXDKVARLLDKGLDPNFHDPDSGECPLSLAAQLDNAXDLLKVLKNGGAHLDFRXRDGLXAVHCAXRQRNAAALXXLLDLGASPDYKDSRGLXPLYHSALGGGDALCCELLLHDHAQLGIXDENGWQEIHQACRFGHVQHLEHLLFYGADMGAQNASGNXALHICALYNQESCARVLLFRGANRDVRNYNSQXAFQVAIIAGNFELAEVIKXHKDSDVVPFREXPSYAKRRRLAGPSGLASPRPLQRSASDINLKGEAQPAASPGPSLRSLPHQLLLQRLQEEKDRDRDADQESNISGPLAGRAGQSKISPSGPGGPGPAPGPGPAPPAPPAPPPRGPKRKLYSAVPGRKFIAVKAHSPQGEGEIPLHRGEAVKVLSIGEGGFWEGXVKGRXGWFPADCVEEVQMRQHDXRPEXREDRXKRLFRHYXVGSYDSLXSHSDYVIDDKVAVLQKRDHEGFGFVLRGAKAEXPIEEFXPXPAFPALQYLESVDVEGVAWRAGLRXGDFLIEVNGVNVVKVGHKQVVALIRQGGNRLVMKVVSVXRKPEEDGARRRAPPPPKRAPSXXLXLRSKSMXAELEELASIRRRKGEKLDEMLAAAAEPXLRPDIADADSRAAXVKQRPXSRRIXPAEISSLFERQGLPGPEKLPGSLRKGIPRXKSVGEDEKLASLLEGRFPRSXSMQDPVREGRGIPPPPQXAPPPPPAPYYFDSGPPPAFSPPPPPGRAYDXVRSSFKPGLEARLGAGAAGLYEPGAALGPLPYPERQKRARSMIILQDSAPESGDAPRPPPAAXPPERPKRRPRPPGPDSPYANLGAFSASLFAPSKPQRRKSPLVKQLQVEDAQERAALAVGSPGPGGGSFAREPSPXHRGPRPGGLDYGAGDGPGLAFGGPGPAKDRRLEERRRSXVFLSVGAIEGSAPGADLPSLQPSRSIDERLLGXGPXAGRDLLLPSPVSALKPLVSGPSLGPSGSXFIHPLXGKPLDPSSPLALALAARERALASQAPSRSPXPVHSPDADRPGPLFVDVQARDPERGSLASPAFSPRSPAWIPVPARREAEKVPREERKSPEDKKSMILSVLDXSLQRPAGLIVVHAXSNGQEPSRLGGAEEERPGXPELAPAPMQSAAVAEPLPSPRAQPPGGXPADAGPGQGSSEEEPELVFAVNLPPAQLSSSDEEXREELARIGLVPPPEEFANGVLLAXPLAGPGPSPXXVPSPASGKPSSEPPPAPESAADSGVEEADXRSSSDPHLEXXSXISXVSSMSXLSSESGELXDXHXSFADGHXFLLEKPPVPPKPKLKSPLGKGPVXFRDPLLKQSSDSELMAQQHHAASAGLASAAGPARPRYLFQRRSKLWGDPVESRGLPGPEDDKPXVISELSSRLQQLNKDXRSLGEEPVGGLGSLLDPAKKSPIAAARLFSSLGELSSISAQRSPGGPGGGASYSVRPSGRYPVARRAPSPVKPASLERVEGLGAGAGGAGRPFGLXPPXILKSSSLSIPHEPKEVRFVVRSVSARSRSPSPSPLPSPASGPGPGAPGPRRPFQQKPLQLWSKFDVGDWLESIHLGEHRDRFEDHEIEGAHLPALXKDDFVELGVXRVGHRMNIERALRQLDGS

SEQ ID NO: 25264 - protein, 95 aa, Homo sapiens
  MOD_RES (17)..(17): Selenocysteine
  MOD_RES (66)..(66): Selenocysteine
  MOD_RES (81)..(81): Selenocysteine
  MOD_RES (86)..(86): Selenocysteine
  MOD_RES (95)..(95): Selenocysteine
DPAFLYLLSAPREAPAXGPSPQHPQKMDGELGRLFPPSLGLPPGPQPAASSLPSPLQPSWSCPSCXFINAPDRPGCEMCSXQRPCXWDPLAAASX

SEQ ID NO: 25265 - protein, 326 aa, Homo sapiens
  MOD_RES (80)..(80): Selenocysteine
  MOD_RES (85)..(85): Selenocysteine
  MOD_RES (98)..(98): Selenocysteine
  MOD_RES (120)..(120): Selenocysteine
  MOD_RES (152)..(152): Selenocysteine
  MOD_RES (170)..(170): Selenocysteine
  MOD_RES (224)..(224): Selenocysteine
  MOD_RES (249)..(249): Selenocysteine
MAPPAGGAAAAASDLGSAAVLLAVHAAVRPLGAGPDAEAQLRRLQLSADPERPGRFRLELLGAGPGAVNLEWPLESVSYXIRGPXQHELQPPPGGPGXLSLHFLNPQEAQRWAVLVRGAXVEGQNGSKSNSPPALGPEACPVSLPSPPEASXLKGPPPEADLPRSPGNLXEREELAGSLARAIAGGDEKGAAQVAAVLAQHRVALSVQLQEACFPPGPIRLQVXLEDAASAASAASSAHVALQVHPHCXVAALQEQVFSELGFPPAVQRWVIGRCLCVPERSLASYGVRQDGDPAFLYLLSAPREAPAQLVLSFLHLHQCPRPPWL

SEQ ID NO: 25266 - protein, 387 aa, Homo sapiens
  MOD_RES (80)..(80): Selenocysteine
  MOD_RES (85)..(85): Selenocysteine
  MOD_RES (98)..(98): Selenocysteine
  MOD_RES (120)..(120): Selenocysteine
  MOD_RES (152)..(152): Selenocysteine
  MOD_RES (170)..(170): Selenocysteine
  MOD_RES (224)..(224): Selenocysteine
  MOD_RES (249)..(249): Selenocysteine
  MOD_RES (309)..(309): Selenocysteine
  MOD_RES (358)..(358): Selenocysteine
  MOD_RES (373)..(373): Selenocysteine
  MOD_RES (378)..(378): Selenocysteine
  MOD_RES (387)..(387): Selenocysteine
MAPPAGGAAAAASDLGSAAVLLAVHAAVRPLGAGPDAEAQLRRLQLSADPERPGRFRLELLGAGPGAVNLEWPLESVSYXIRGPXQHELQPPPGGPGXLSLHFLNPQEAQRWAVLVRGAXVEGQNGSKSNSPPALGPEACPVSLPSPPEASXLKGPPPEADLPRSPGNLXEREELAGSLARAIAGGDEKGAAQVAAVLAQHRVALSVQLQEACFPPGPIRLQVXLEDAASAASAASSAHVALQVHPHCXVAALQEQVFSELGFPPAVQRWVIGRCLCVPERSLASYGVRQDGDPAFLYLLSAPREAPAXGPSPQHPQKMDGELGRLFPPSLGLPPGPQPAASSLPSPLQPSWSCPSCXFINAPDRPGCEMCSXQRPCXWDPLAAASX

SEQ ID NO: 25267 - protein, 509 aa, Homo sapiens
  MOD_RES (16)..(16): Selenocysteine
  MOD_RES (59)..(59): Selenocysteine
  MOD_RES (77)..(77): Selenocysteine
  MOD_RES (172)..(172): Selenocysteine
  MOD_RES (209)..(209): Selenocysteine
  MOD_RES (213)..(213): Selenocysteine
  MOD_RES (241)..(241): Selenocysteine
  MOD_RES (279)..(279): Selenocysteine
  MOD_RES (299)..(299): Selenocysteine
  MOD_RES (315)..(315): Selenocysteine
  MOD_RES (346)..(346): Selenocysteine
  MOD_RES (439)..(439): Selenocysteine
  MOD_RES (462)..(462): Selenocysteine
  MOD_RES (486)..(487): Selenocysteine
  MOD_RES (508)..(508): Selenocysteine
MAKWLNKYFSLGNSKXKSPPQPPRPDYREQRRRGERPSQPPQAVPQASSAASASCGPAXASCFSASSGSLPDDSGSXSDLIRAYRAQKERDFEDPYNGPGSSLRKLRAMCRLDYCGGSGEPGGVQRAFSASSASGAAGCCCASSGAGAAASSSSSSGSPHLYRSSSERRPAXPAEVRYISPKHRLIKVESAAGGGAGDPLGGACAGGRXWSPXACGGKKLLNKCAASAAEESGAGKKDKVXIADDYSDPFDAKNDLKSKAGKGESAGYMEPYEAQRIMXEFQRQESVRSQHKGIQLYDXPYEPEGQSVDSDSESXVSPRLRESKLPQDDDRPADEYDQPWEWNRVXIPALAAQFNGNEKRQSSPSPSRDRRRQLRAPGGGFKPIKHGSPEFCGILGERVDPAVPLEKQIWYHGAISRGDAENLLRLCKECSYLVRNSQXSKHDYSLSLRSNQGFMHMKLAKXKEKYVLGQNSPPFDSVPEVIHYYXXRKLPIKGAEHLSLLYPVAVRXL

SEQ ID NO: 25268 - protein, 583 aa, Homo sapiens
  MOD_RES (29)..(29): Selenocysteine
  MOD_RES (56)..(57): Selenocysteine
  MOD_RES (122)..(122): Selenocysteine
  MOD_RES (135)..(135): Selenocysteine
  MOD_RES (145)..(145): Selenocysteine
  MOD_RES (183)..(183): Selenocysteine
  MOD_RES (185)..(185): Selenocysteine
  MOD_RES (188)..(188): Selenocysteine
  MOD_RES (206)..(206): Selenocysteine
  MOD_RES (233)..(233): Selenocysteine
  MOD_RES (235)..(235): Selenocysteine
  MOD_RES (238)..(238): Selenocysteine
  MOD_RES (270)..(270): Selenocysteine
  MOD_RES (303)..(303): Selenocysteine
  MOD_RES (324)..(324): Selenocysteine
  MOD_RES (380)..(380): Selenocysteine
  MOD_RES (386)..(386): Selenocysteine
  MOD_RES (393)..(393): Selenocysteine
  MOD_RES (514)..(516): Selenocysteine
  MOD_RES (523)..(523): Selenocysteine
  MOD_RES (544)..(544): Selenocysteine
MDLLPPKPKYNPLRNESLSSLEEGASGSXPPEELPSPSASSLGPILPPLPGDDSPXXLCSFFPRMSNLRLANPAGGRPGSKGEPGRAADDGEGIVGAAMPDSGPLPLLQDMNKLSGGGGRRXRVEGGQLGGEEWXRHGSFVNKPXRGWLHPNDKVMGPGVSYLVRYMGCVEVLQSMRALDFNXRXQVXREAISLVCEAVPGAKGAXRRRKPCSRPLSSILGRSNLKFAGMPIXLXVSXSSLNLMAADCKQIIANHHMQSISFASGGDPDXAEYVAYVAKDPVNQRACHILECPEGLAQDVISXIGQAFELRFKQYLRNPPKLVXPHDRMAGFDGSAWDEEEEEPPDHQYYNDFPGKEPPLGGVVDMRLREGAAPGAARPXAPNAQXPSHLGAXLPVGQPVGGDPEVRKQMPPPPPCPGRELFDDPSYVNVQNLDKARQAVGGAGPPNPAINGSAPRDLFDMKPFEDALRVPPPPQSVSMAEQLRGEPWFHGKLSRREAEALLQLNGDFLVRESXXXPGQYVLXGLQSGQPKHLLLVDPEGVVRXKDHRFESVSHLISYHMDNHLPIISAGSELCLQQPVERKL

SEQ ID NO: 25269 - protein, 584 aa, Homo sapiens
  MOD_RES (29)..(29): Selenocysteine
  MOD_RES (56)..(57): Selenocysteine
  MOD_RES (122)..(122): Selenocysteine
  MOD_RES (135)..(135): Selenocysteine
  MOD_RES (145)..(145): Selenocysteine
  MOD_RES (183)..(183): Selenocysteine
  MOD_RES (185)..(185): Selenocysteine
  MOD_RES (188)..(188): Selenocysteine
  MOD_RES (206)..(206): Selenocysteine
  MOD_RES (233)..(233): Selenocysteine
  MOD_RES (235)..(235): Selenocysteine
  MOD_RES (238)..(238): Selenocysteine
  MOD_RES (270)..(270): Selenocysteine
  MOD_RES (303)..(303): Selenocysteine
  MOD_RES (324)..(324): Selenocysteine
  MOD_RES (380)..(380): Selenocysteine
  MOD_RES (386)..(386): Selenocysteine
  MOD_RES (393)..(393): Selenocysteine
  MOD_RES (515)..(517): Selenocysteine
  MOD_RES (524)..(524): Selenocysteine
  MOD_RES (545)..(545): Selenocysteine
MDLLPPKPKYNPLRNESLSSLEEGASGSXPPEELPSPSASSLGPILPPLPGDDSPXXLCSFFPRMSNLRLANPAGGRPGSKGEPGRAADDGEGIVGAAMPDSGPLPLLQDMNKLSGGGGRRXRVEGGQLGGEEWXRHGSFVNKPXRGWLHPNDKVMGPGVSYLVRYMGCVEVLQSMRALDFNXRXQVXREAISLVCEAVPGAKGAXRRRKPCSRPLSSILGRSNLKFAGMPIXLXVSXSSLNLMAADCKQIIANHHMQSISFASGGDPDXAEYVAYVAKDPVNQRACHILECPEGLAQDVISXIGQAFELRFKQYLRNPPKLVXPHDRMAGFDGSAWDEEEEEPPDHQYYNDFPGKEPPLGGVVDMRLREGAAPGAARPXAPNAQXPSHLGAXLPVGQPVGGDPEVRKQMPPPPPCPAGRELFDDPSYVNVQNLDKARQAVGGAGPPNPAINGSAPRDLFDMKPFEDALRVPPPPQSVSMAEQLRGEPWFHGKLSRREAEALLQLNGDFLVRESXXXPGQYVLXGLQSGQPKHLLLVDPEGVVRXKDHRFESVSHLISYHMDNHLPIISAGSELCLQQPVERKL

SEQ ID NO: 25270 - protein, 137 aa, Homo sapiens
  MOD_RES (12)..(12): Selenocysteine
  MOD_RES (25)..(25): Selenocysteine
  MOD_RES (35)..(35): Selenocysteine
  MOD_RES (73)..(73): Selenocysteine
  MOD_RES (75)..(75): Selenocysteine
  MOD_RES (78)..(78): Selenocysteine
  MOD_RES (96)..(96): Selenocysteine
  MOD_RES (123)..(123): Selenocysteine
  MOD_RES (125)..(125): Selenocysteine
  MOD_RES (128)..(128): Selenocysteine
MNKLSGGGGRRXRVEGGQLGGEEWXRHGSFVNKPXRGWLHPNDKVMGPGVSYLVRYMGCVEVLQSMRALDFNXRXQVXREAISLVCEAVPGAKGAXRRRKPCSRPLSSILGRSNLKFAGMPIXLXVSXSSLNLMAAD

SEQ ID NO: 25271 - protein, 200 aa, Homo sapiens
  MOD_RES (12)..(12): Selenocysteine
  MOD_RES (25)..(25): Selenocysteine
  MOD_RES (35)..(35): Selenocysteine
  MOD_RES (73)..(73): Selenocysteine
  MOD_RES (75)..(75): Selenocysteine
  MOD_RES (78)..(78): Selenocysteine
  MOD_RES (96)..(96): Selenocysteine
  MOD_RES (123)..(123): Selenocysteine
  MOD_RES (125)..(125): Selenocysteine
  MOD_RES (128)..(128): Selenocysteine
  MOD_RES (142)..(142): Selenocysteine
  MOD_RES (175)..(175): Selenocysteine
  MOD_RES (196)..(196): Selenocysteine
MNKLSGGGGRRXRVEGGQLGGEEWXRHGSFVNKPXRGWLHPNDKVMGPGVSYLVRYMGCVEVLQSMRALDFNXRXQVXREAISLVCEAVPGAKGAXRRRKPCSRPLSSILGRSNLKFAGMPIXLXVSXSSLNLMAADCKQDXAEYVAYVAKDPVNQRACHILECPEGLAQDVISXIGQAFELRFKQYLRNPPKLVXPHDR

SEQ ID NO: 25272 - protein, 473 aa, Homo sapiens
  MOD_RES (12)..(12): Selenocysteine
  MOD_RES (25)..(25): Selenocysteine
  MOD_RES (35)..(35): Selenocysteine
  MOD_RES (73)..(73): Selenocysteine
  MOD_RES (75)..(75): Selenocysteine
  MOD_RES (78)..(78): Selenocysteine
  MOD_RES (96)..(96): Selenocysteine
  MOD_RES (123)..(123): Selenocysteine
  MOD_RES (125)..(125): Selenocysteine
  MOD_RES (128)..(128): Selenocysteine
  MOD_RES (160)..(160): Selenocysteine
  MOD_RES (193)..(193): Selenocysteine
  MOD_RES (214)..(214): Selenocysteine
  MOD_RES (270)..(270): Selenocysteine
  MOD_RES (276)..(276): Selenocysteine
  MOD_RES (283)..(283): Selenocysteine
  MOD_RES (404)..(406): Selenocysteine
  MOD_RES (413)..(413): Selenocysteine
  MOD_RES (434)..(434): Selenocysteine
MNKLSGGGGRRXRVEGGQLGGEEWXRHGSFVNKPXRGWLHPNDKVMGPGVSYLVRYMGCVEVLQSMRALDFNXRXQVXREAISLVCEAVPGAKGAXRRRKPCSRPLSSILGRSNLKFAGMPIXLXVSXSSLNLMAADCKQIIANHHMQSISFASGGDPDXAEYVAYVAKDPVNQRACHILECPEGLAQDVISXIGQAFELRFKQYLRNPPKLVXPHDRMAGFDGSAWDEEEEEPPDHQYYNDFPGKEPPLGGVVDMRLREGAAPGAARPXAPNAQXPSHLGAXLPVGQPVGGDPEVRKQMPPPPPCPGRELFDDPSYVNVQNLDKARQAVGGAGPPNPAINGSAPRDLFDMKPFEDALRVPPPPQSVSMAEQLRGEPWFHGKLSRREAEALLQLNGDFLVRESXXXPGQYVLXGLQSGQPKHLLLVDPEGVVRXKDHRFESVSHLISYHMDNHLPIISAGSELCLQQPVERKL

SEQ ID NO: 25273 - protein, 474 aa, Homo sapiens
  MOD_RES (12)..(12): Selenocysteine
  MOD_RES (25)..(25): Selenocysteine
  MOD_RES (35)..(35): Selenocysteine
  MOD_RES (73)..(73): Selenocysteine
  MOD_RES (75)..(75): Selenocysteine
  MOD_RES (78)..(78): Selenocysteine
  MOD_RES (96)..(96): Selenocysteine
  MOD_RES (123)..(123): Selenocysteine
  MOD_RES (125)..(125): Selenocysteine
  MOD_RES (128)..(128): Selenocysteine
  MOD_RES (160)..(160): Selenocysteine
  MOD_RES (193)..(193): Selenocysteine
  MOD_RES (214)..(214): Selenocysteine
  MOD_RES (270)..(270): Selenocysteine
  MOD_RES (276)..(276): Selenocysteine
  MOD_RES (283)..(283): Selenocysteine
  MOD_RES (405)..(407): Selenocysteine
  MOD_RES (414)..(414): Selenocysteine
  MOD_RES (435)..(435): Selenocysteine
MNKLSGGGGRRXRVEGGQLGGEEWXRHGSFVNKPXRGWLHPNDKVMGPGVSYLVRYMGCVEVLQSMRALDFNXRXQVXREAISLVCEAVPGAKGAXRRRKPCSRPLSSILGRSNLKFAGMPIXLXVSXSSLNLMAADCKQIIANHHMQSISFASGGDPDXAEYVAYVAKDPVNQRACHILECPEGLAQDVISXIGQAFELRFKQYLRNPPKLVXPHDRMAGFDGSAWDEEEEEPPDHQYYNDFPGKEPPLGGVVDMRLREGAAPGAARPXAPNAQXPSHLGAXLPVGQPVGGDPEVRKQMPPPPPCPAGRELFDDPSYVNVQNLDKARQAVGGAGPPNPAINGSAPRDLFDMKPFEDALRVPPPPQSVSMAEQLRGEPWFHGKLSRREAEALLQLNGDFLVRESXXXPGQYVLXGLQSGQPKHLLLVDPEGVVRXKDHRFESVSHLISYHMDNHLPIISAGSELCLQQPVERKL

SEQ ID NO: 25274 - protein, 200 aa, Homo sapiens
  MOD_RES (4)..(4): Selenocysteine
  MOD_RES (6)..(6): Selenocysteine
  MOD_RES (9)..(9): Selenocysteine
  MOD_RES (23)..(23): Selenocysteine
  MOD_RES (56)..(56): Selenocysteine
  MOD_RES (77)..(77): Selenocysteine
  MOD_RES (133)..(133): Selenocysteine
  MOD_RES (139)..(139): Selenocysteine
  MOD_RES (146)..(146): Selenocysteine
MPIXLXVSXSSLNLMAADCKQDXAEYVAYVAKDPVNQRACHILECPEGLAQDVISXIGQAFELRFKQYLRNPPKLVXPHDRMAGFDGSAWDEEEEEPPDHQYYNDFPGKEPPLGGVVDMRLREGAAPGAARPXAPNAQXPSHLGAXLPVGQPVGGDPEVRKQMPPPPPCPAGRELFDDPSYVNVQNLDKARQAVGGAGPP

SEQ ID NO: 25275 - protein, 130 aa, Homo sapiens
  MOD_RES (4)..(4): Selenocysteine
  MOD_RES (6)..(6): Selenocysteine
  MOD_RES (9)..(9): Selenocysteine
  MOD_RES (41)..(41): Selenocysteine
  MOD_RES (74)..(74): Selenocysteine
  MOD_RES (95)..(95): Selenocysteine
MPIXLXVSXSSLNLMAADCKQIIANHHMQSISFASGGDPDXAEYVAYVAKDPVNQRACHILECPEGLAQDVISXIGQAFELRFKQYLRNPPKLVXPHDRMAGFDGSAWDEEEEEPPDHQYYNDFPGKEPP

SEQ ID NO: 25276 - protein, 354 aa, Homo sapiens
  MOD_RES (4)..(4): Selenocysteine
  MOD_RES (6)..(6): Selenocysteine
  MOD_RES (9)..(9): Selenocysteine
  MOD_RES (41)..(41): Selenocysteine
  MOD_RES (74)..(74): Selenocysteine
  MOD_RES (95)..(95): Selenocysteine
  MOD_RES (151)..(151): Selenocysteine
  MOD_RES (157)..(157): Selenocysteine
  MOD_RES (164)..(164): Selenocysteine
  MOD_RES (285)..(287): Selenocysteine
  MOD_RES (294)..(294): Selenocysteine
  MOD_RES (315)..(315): Selenocysteine
MPIXLXVSXSSLNLMAADCKQIIANHHMQSISFASGGDPDXAEYVAYVAKDPVNQRACHILECPEGLAQDVISXIGQAFELRFKQYLRNPPKLVXPHDRMAGFDGSAWDEEEEEPPDHQYYNDFPGKEPPLGGVVDMRLREGAAPGAARPXAPNAQXPSHLGAXLPVGQPVGGDPEVRKQMPPPPPCPGRELFDDPSYVNVQNLDKARQAVGGAGPPNPAINGSAPRDLFDMKPFEDALRVPPPPQSVSMAEQLRGEPWFHGKLSRREAEALLQLNGDFLVRESXXXPGQYVLXGLQSGQPKHLLLVDPEGVVRXKDHRFESVSHLISYHMDNHLPIISAGSELCLQQPVERKL

SEQ ID NO: 25277 - protein, 297 aa, Homo sapiens
  MOD_RES (1)..(1): Any amino acid
  MOD_RES (44)..(44): Selenocysteine
  MOD_RES (50)..(50): Selenocysteine
  MOD_RES (57)..(57): Selenocysteine
  MOD_RES (178)..(180): Selenocysteine
  MOD_RES (187)..(187): Selenocysteine
  MOD_RES (239)..(240): Selenocysteine
  MOD_RES (250)..(250): Selenocysteine
  MOD_RES (253)..(253): Selenocysteine
  MOD_RES (287)..(287): Selenocysteine
  MOD_RES (293)..(294): Selenocysteine
XDEEEEEPPDHQYYNDFPGKEPPLGGVVDMRLREGAAPGAARPXAPNAQXPSHLGAXLPVGQPVGGDPEVRKQMPPPPPCPGRELFDDPSYVNVQNLDKARQAVGGAGPPNPAINGSAPRDLFDMKPFEDALRVPPPPQSVSMAEQLRGEPWFHGKLSRREAEALLQLNGDFLVRESXXXPGQYVLXGLQSGQPKHLLLVDPEGVRWGFAMLPKLFLNSRAQVIRLPRPPRVLGLQARXXMPSLHIFFCXVYXLLRHANFLQVKKGVYSSQLHSFRADVAFAFSHFXDLSIPXXVSF

SEQ ID NO: 25278 - protein, 582 aa, Homo sapiens
  MOD_RES (2)..(2): Selenocysteine
  MOD_RES (23)..(24): Selenocysteine
  MOD_RES (174)..(174): Selenocysteine
  MOD_RES (176)..(176): Selenocysteine
  MOD_RES (179)..(179): Selenocysteine
  MOD_RES (228)..(228): Selenocysteine
  MOD_RES (238)..(238): Selenocysteine
  MOD_RES (258)..(258): Selenocysteine
  MOD_RES (261)..(261): Selenocysteine
  MOD_RES (293)..(293): Selenocysteine
  MOD_RES (360)..(360): Selenocysteine
  MOD_RES (366)..(366): Selenocysteine
  MOD_RES (389)..(389): Selenocysteine
  MOD_RES (391)..(391): Selenocysteine
  MOD_RES (417)..(417): Selenocysteine
  MOD_RES (455)..(455): Selenocysteine
  MOD_RES (470)..(470): Selenocysteine
  MOD_RES (478)..(478): Selenocysteine
  MOD_RES (514)..(514): Selenocysteine
  MOD_RES (522)..(522): Selenocysteine
  MOD_RES (543)..(543): Selenocysteine
MXQGPGGRAPPAPPAPPEPEAPXXFCALLPRMPQWKFAAPGGFLGRGPAAARAAGASGGADPQPEPAGPGGVPALAAAVLGACEPRCAAPCPLPALSRCRGAGSRGSRGGRGAAGSGDAAAAAEWIRKGSFIHKPAHGWLHPDARVLGPGVSYVVRYMGCIEVLRSMRSLDFNXRXQVXREAINRLHEAVPGVRGSWKKKAPNKALASVLGKSNLRFAGMSISIHISXDGLSLSVPAXRQVIANHHMPSISFASGGDXDMXDYVAYVAKDPINQRACHILECCEGLAQSIISXVGQAFELRFKQYLHSPPKVALPPERLAGPEESAWGDEEDSLEHNYYNSIPGKEPPLGGLVDSRLALXQPCALXALDQGPSPSLRDACSLPWDVGSXGXAPPGDGYVQADARGPPDHEEHLYVNXQGLDAPEPEDSPKKDLFDMRPFEDALKLHECSVAAGVXAAPLPLEDQWPSPPXRRAPVAPXEEQLRQEPWYHGRMSRRAAERMLRADGDFLVRDSVXNPGQYVLXGMHAGQPKHLLLVDPEGVVRXKDVLFESISHLIDHHLQNGQPIVAAESELHLRGVVSREP

SEQ ID NO: 25279 - protein, 69 aa, Homo sapiens
  MOD_RES (1)..(1): Any amino acid
  MOD_RES (33)..(33): Selenocysteine
  MOD_RES (35)..(35): Selenocysteine
  MOD_RES (38)..(38): Selenocysteine
  MOD_RES (52)..(52): Selenocysteine
XDARVLGPGVSYVVRYMGCIEVLRSMRSLDFNXRXQVXSSCHHSGCRQDLDXDPASGSGPPARCSNPHI

SEQ ID NO: 25280 - protein, 138 aa, Homo sapiens
  MOD_RES (1)..(1): Any amino acid
  MOD_RES (5)..(5): Selenocysteine
  MOD_RES (78)..(78): Selenocysteine
  MOD_RES (110)..(110): Selenocysteine
  MOD_RES (135)..(136): Selenocysteine
XGPGXEHHQHRGPSFRAALQAVPAQPAQGGAAPRKAGRAGGVGLGGRGGLFGAQLLQQHPGEGAAAGRASGLQAGPDXALRPHGPRPGPISFSKRCLQPAMGRGVHRYRXSGPAPLPAGPLWPPRRNSCVRSPGXXAG

SEQ ID NO: 25281 - protein, 105 aa, Homo sapiens
  MOD_RES (46)..(46): Selenocysteine
  MOD_RES (73)..(74): Selenocysteine
  MOD_RES (82)..(82): Selenocysteine
  MOD_RES (100)..(100): Selenocysteine
MKPFEDALKNQPLGPVLSKAASVECISPVSPRAPDAKMLEELQAEXWYQGEMSRKEAEGLLEKDGDFLVRKSXXNPGSFVLXGMHNGQAKHLLLVDPEGXRSNSY

SEQ ID NO: 25282 - protein, 594 aa, Homo sapiens
  MOD_RES (5)..(5): Selenocysteine
  MOD_RES (16)..(16): Selenocysteine
  MOD_RES (40)..(40): Selenocysteine
  MOD_RES (154)..(154): Selenocysteine
  MOD_RES (176)..(176): Selenocysteine
  MOD_RES (178)..(178): Selenocysteine
  MOD_RES (181)..(181): Selenocysteine
  MOD_RES (228)..(228): Selenocysteine
  MOD_RES (231)..(231): Selenocysteine
  MOD_RES (238)..(238): Selenocysteine
  MOD_RES (263)..(264): Selenocysteine
  MOD_RES (313)..(313): Selenocysteine
  MOD_RES (330)..(330): Selenocysteine
  MOD_RES (358)..(358): Selenocysteine
  MOD_RES (369)..(369): Selenocysteine
  MOD_RES (378)..(378): Selenocysteine
  MOD_RES (388)..(388): Selenocysteine
  MOD_RES (396)..(396): Selenocysteine
  MOD_RES (408)..(408): Selenocysteine
  MOD_RES (418)..(418): Selenocysteine
  MOD_RES (423)..(423): Selenocysteine
  MOD_RES (427)..(427): Selenocysteine
  MOD_RES (498)..(498): Selenocysteine
  MOD_RES (525)..(526): Selenocysteine
  MOD_RES (534)..(534): Selenocysteine
  MOD_RES (552)..(552): Selenocysteine
  MOD_RES (555)..(555): Selenocysteine
MLPRXKYNRFRNDSVXSVDDLLHSLSVSGGGGKVSAARAXPAAAPYLVSGEALRKAPDDGPGSLGHLLHKVSHLKLSSSGLRGLSSAARERAGARLSGSCSAPSLAAPDGSAPSAPRAPAMSAARKGRPGDEPLPRPPRGAPHASDQVLGPGVXYVVKYLGCIEVLRSMRSLDFSXRXQIXREAISRVCEAVPGAKGAFKKRKPPSKMLSSILGKSNLQFAGMSISLXISXASLNLRXPDSKQIIANHHMRSISFASGGDPDXXDYVAYVAKDPVNRRACHILECCDGLAQDVIGSIGQAFELRFKQYLQCPXKIPALHDRMQSLDEPWXEEEGDGSDHPYYNSIPSKMPPPGGFLDXRLKPRPHAPDXAQFAGKEQXYYQGRHLGDXFGEDWQQXPLRQGSSDIYSXPEGKLHVAPXGEAPXYVNXQQIPPQAWPAAVSSAESSPRKDLFDMKPFEDALKNQPLGPVLSKAASVECISPVSPRAPDAKMLEELQAEXWYQGEMSRKEAEGLLEKDGDFLVRKSXXNPGSFVLXGMHNGQAKHLLLVDPEGXIRXKDRVFDSISHLINHHLESSLPIVSAGSELCLQQPVERKQ

SEQ ID NO: 25283 - protein, 387 aa, Homo sapiens
  MOD_RES (17)..(17): Selenocysteine
  MOD_RES (19)..(19): Selenocysteine
  MOD_RES (57)..(58): Selenocysteine
  MOD_RES (90)..(90): Selenocysteine
  MOD_RES (110)..(110): Selenocysteine
  MOD_RES (155)..(155): Selenocysteine
  MOD_RES (205)..(205): Selenocysteine
  MOD_RES (211)..(211): Selenocysteine
  MOD_RES (225)..(225): Selenocysteine
  MOD_RES (231)..(231): Selenocysteine
  MOD_RES (256)..(256): Selenocysteine
  MOD_RES (262)..(262): Selenocysteine
  MOD_RES (310)..(310): Selenocysteine
  MOD_RES (339)..(339): Selenocysteine
MLPALEHWIPKFFSFRXRXGSPLSLACRQPIVGPCDHIIANHHMQSISFASGGDPDXXDYVAYVAKDPVNQRACHILECHNGMAQDVISXIGQAFELRFKQYLKNPSLNXSCESEEVHIDSHAEEREDHEYYNEIPGKQPPVGGVSDMRIKVQAXEQMAYCPIQCEKLCYLPGNSKCSSVYENCLEQSRAIGNVHPRGVQSQRDXSLLKHXCRVDLFDDPCYINXQALQSXPGSAGNQRSAQPLGSPWHCGKAPEXVQPGAXAQPASSHSLPHIKQQLWSEECYHGKLSRKAAESLLVKDGDFLVRESAXSPGQYVLSGLQGGQAKHLLLVDPEGKVRXKDHVFDNVGHLIRYHMDNSLPIISSGSEVSLKQPVRKDNNPALLHSNK

SEQ ID NO: 25284 - protein, 128 aa, Homo sapiens
  MOD_RES (14)..(15): Selenocysteine
  MOD_RES (47)..(47): Selenocysteine
  MOD_RES (67)..(67): Selenocysteine
  MOD_RES (112)..(112): Selenocysteine
MQSISFASGGDPDXXDYVAYVAKDPVNQRACHILECHNGMAQDVISXIGQAFELRFKQYLKNPSLNXSCESEEVHIDSHAEEREDHEYYNEIPGKQPPVGGVSDMRIKVQAXEQMAYCPIQCEKLCYL

SEQ ID NO: 25285 - protein, 344 aa, Homo sapiens
  MOD_RES (14)..(15): Selenocysteine
  MOD_RES (47)..(47): Selenocysteine
  MOD_RES (67)..(67): Selenocysteine
  MOD_RES (112)..(112): Selenocysteine
  MOD_RES (162)..(162): Selenocysteine
  MOD_RES (168)..(168): Selenocysteine
  MOD_RES (182)..(182): Selenocysteine
  MOD_RES (188)..(188): Selenocysteine
  MOD_RES (213)..(213): Selenocysteine
  MOD_RES (219)..(219): Selenocysteine
  MOD_RES (267)..(267): Selenocysteine
  MOD_RES (296)..(296): Selenocysteine
MQSISFASGGDPDXXDYVAYVAKDPVNQRACHILECHNGMAQDVISXIGQAFELRFKQYLKNPSLNXSCESEEVHIDSHAEEREDHEYYNEIPGKQPPVGGVSDMRIKVQAXEQMAYCPIQCEKLCYLPGNSKCSSVYENCLEQSRAIGNVHPRGVQSQRDXSLLKHXCRVDLFDDPCYINXQALQSXPGSAGNQRSAQPLGSPWHCGKAPEXVQPGAXAQPASSHSLPHIKQQLWSEECYHGKLSRKAAESLLVKDGDFLVRESAXSPGQYVLSGLQGGQAKHLLLVDPEGKVRXKDHVFDNVGHLIRYHMDNSLPIISSGSEVSLKQPVRKDNNPALLHSNK

SEQ ID NO: 25286 - protein, 144 aa, Homo sapiens
  MOD_RES (14)..(15): Selenocysteine
  MOD_RES (47)..(47): Selenocysteine
  MOD_RES (67)..(67): Selenocysteine
  MOD_RES (112)..(112): Selenocysteine
MQSISFASGGDPDXXDYVAYVAKDPVNQRACHILECHNGMAQDVISXIGQAFELRFKQYLKNPSLNXSCESEEVHIDSHAEEREDHEYYNEIPGKQPPVGGVSDMRIKVQAXEQMAYCPIQCEKLCYLVMSIQEGCSPSEIPHY

SEQ ID NO: 25287 - protein, 630 aa, Homo sapiens
  MOD_RES (39)..(39): Selenocysteine
  MOD_RES (69)..(69): Selenocysteine
  MOD_RES (73)..(73): Selenocysteine
  MOD_RES (81)..(81): Selenocysteine
  MOD_RES (85)..(85): Selenocysteine
  MOD_RES (100)..(100): Selenocysteine
  MOD_RES (111)..(111): Selenocysteine
  MOD_RES (135)..(135): Selenocysteine
  MOD_RES (142)..(142): Selenocysteine
  MOD_RES (156)..(156): Selenocysteine
  MOD_RES (159)..(159): Selenocysteine
  MOD_RES (172)..(172): Selenocysteine
  MOD_RES (215)..(215): Selenocysteine
  MOD_RES (218)..(218): Selenocysteine
  MOD_RES (248)..(248): Selenocysteine
  MOD_RES (265)..(265): Selenocysteine
  MOD_RES (268)..(268): Selenocysteine
  MOD_RES (272)..(272): Selenocysteine
  MOD_RES (300)..(301): Selenocysteine
  MOD_RES (333)..(333): Selenocysteine
  MOD_RES (353)..(353): Selenocysteine
  MOD_RES (398)..(398): Selenocysteine
  MOD_RES (448)..(448): Selenocysteine
  MOD_RES (454)..(454): Selenocysteine
  MOD_RES (468)..(468): Selenocysteine
  MOD_RES (474)..(474): Selenocysteine
  MOD_RES (499)..(499): Selenocysteine
  MOD_RES (505)..(505): Selenocysteine
  MOD_RES (553)..(553): Selenocysteine
  MOD_RES (582)..(582): Selenocysteine
MRERGQDSLAGLVLYVGLFGHPGMLHRAKYSRFRNESIXSLDEGSSGGSVGNKGSPQPPHPALAPHLPXEDAXLPSQESPXPLCXLIPRMASMKLANPAXLLSLKNFCLGXKEVPRLKLQESRDPGSSGPSSPEXSLSRSGXAPPPQQDLVGHRAXALXPDSCPLPGPGEPXLRSRQDRHFLQHLLGMGMNYCVRYMGCVEVLQSMRSLDFGMRXQVXREAISRLCEAVPGANGAIKKRKPPVKFLSXVLGKSNLQFSGMNIKLXISXCSLXLMNLDNQQIIANHHMQSISFASGGDPDXXDYVAYVAKDPVNQRACHILECHNGMAQDVISXIGQAFELRFKQYLKNPSLNXSCESEEVHIDSHAEEREDHEYYNEIPGKQPPVGGVSDMRIKVQAXEQMAYCPIQCEKLCYLPGNSKCSSVYENCLEQSRAIGNVHPRGVQSQRDXSLLKHXCRVDLFDDPCYINXQALQSXPGSAGNQRSAQPLGSPWHCGKAPEXVQPGAXAQPASSHSLPHIKQQLWSEECYHGKLSRKAAESLLVKDGDFLVRESAXSPGQYVLSGLQGGQAKHLLLVDPEGKVRXKDHVFDNVGHLIRYHMDNSLPIISSGSEVSLKQPVRKDNNPALLHSNK

SEQ ID NO: 25288 - protein, 672 aa, Homo sapiens
  MOD_RES (7)..(7): Selenocysteine
  MOD_RES (65)..(65): Selenocysteine
  MOD_RES (73)..(73): Selenocysteine
  MOD_RES (102)..(102): Selenocysteine
  MOD_RES (121)..(121): Selenocysteine
  MOD_RES (131)..(131): Selenocysteine
  MOD_RES (156)..(156): Selenocysteine
  MOD_RES (158)..(158): Selenocysteine
  MOD_RES (191)..(191): Selenocysteine
  MOD_RES (332)..(332): Selenocysteine
  MOD_RES (338)..(338): Selenocysteine
  MOD_RES (349)..(349): Selenocysteine
  MOD_RES (381)..(381): Selenocysteine
  MOD_RES (394)..(394): Selenocysteine
  MOD_RES (422)..(422): Selenocysteine
  MOD_RES (427)..(427): Selenocysteine
  MOD_RES (455)..(456): Selenocysteine
  MOD_RES (466)..(467): Selenocysteine
  MOD_RES (470)..(470): Selenocysteine
  MOD_RES (473)..(473): Selenocysteine
  MOD_RES (501)..(501): Selenocysteine
  MOD_RES (550)..(550): Selenocysteine
  MOD_RES (563)..(563): Selenocysteine
  MOD_RES (573)..(573): Selenocysteine
  MOD_RES (593)..(593): Selenocysteine
  MOD_RES (602)..(602): Selenocysteine
  MOD_RES (623)..(623): Selenocysteine
  MOD_RES (639)..(639): Selenocysteine
  MOD_RES (669)..(669): Selenocysteine
MADGSLXGGGLEAAAMAPERMGWAVEQELASLEKGLFQDEDSCSDCSYRDKPGSSLQSFMPEGKXFFPEIFQXNQLLFYERFRAYQDYILADCKASEVQEFXAEFLEKVLEPSGWRAVWHXNVFKVLVEIXDVDFAALKAVVRLAEPYLCDSQVSXFXMECMKELLDLKEHRLPLQELWVVFDDSGVFDQXALAIEHVRFFYQNIWRSWDEEEEDEYDYFVRCVEPRLRLHYDILEDRVPSGLIVDYHNLLSQCEESYRKFLNLRSSLSNCNSDSEQENISMVEGLKLYSEMEQLKQKLKLIENPLLRYVFGYQKNSNIQAKGVRSSGQKIXHVVSSXMMAGLLRSLLXDRLCQEPGEEEREIQFHSDPLSAINACFEGDXVIVCPGHYVVHGXFSIADSIELEGYGLPDDIVIEKRGKGDXFVDCXGADIKISGIKFVQHDAVEGILIVHRGKXXLENCVLQCEXXGVXVRXSAEFLMKNSDLYGAKGAGIEIYPGSQCXLSDNGIHHCKEGILIKDFLDEHYDIPKISMVNNIIHNNEGYGVVLVKPXIFSDLQENAEDGXEENKALKIQXSGEPDVAERVDLEELIECAXGKMELCARXDPSEQVEGNCEIVNELIAASXQKGQIKKKRLSELGIXQADDNLMSQEMFVGIVGNQFKWNGKGSFGXFLF

SEQ ID NO: 25289 - protein, 155 aa, Homo sapiens
  MOD_RES (1)..(1): Any amino acid
  MOD_RES (9)..(9): Selenocysteine
  MOD_RES (72)..(72): Selenocysteine
  MOD_RES (78)..(78): Selenocysteine
  MOD_RES (89)..(89): Selenocysteine
  MOD_RES (121)..(121): Selenocysteine
  MOD_RES (134)..(134): Selenocysteine
XDSGVFDQXALAIEHVRFFYQNIWRSWDEEEEDEYDYFVRCVEPRLRLYVFGYQKNSNIQAKGVRSSGQKIXHVVSSXMMAGLLRSLLXDRLCQEPGEEEREIQFHSDPLSAINACFEGDXVIVCPGHYVVHGXFSIADSIELEGYGLPDDIVIE

SEQ ID NO: 25290 - protein, 38 aa, Homo sapiens
  MOD_RES (2)..(2): Selenocysteine
  MOD_RES (11)..(11): Selenocysteine
DXPYEEQDPEXADGPPSGQKPRQSRMPQEDERPADDAV

SEQ ID NO: 25291 - protein, 300 aa, Homo sapiens
  MOD_RES (22)..(22): Selenocysteine
  MOD_RES (26)..(26): Selenocysteine
  MOD_RES (104)..(104): Selenocysteine
  MOD_RES (146)..(146): Selenocysteine
  MOD_RES (155)..(155): Selenocysteine
  MOD_RES (208)..(208): Selenocysteine
  MOD_RES (252)..(252): Selenocysteine
  MOD_RES (297)..(297): Selenocysteine
  MOD_RES (299)..(299): Selenocysteine
MAKWLRDYLSFGGRRPPPQPPXPDYXESDILRAYRAQKNLDFEDPYEDAESRLEPDPAGPGDSKNPGDAKYGSPKHRLIKVEAADMARAKALLGGPGEELEADXEYLDPFDAQPHPAPPDDGYMEPYDAQWVMSELPGRGVQLYDXPYEEQDPEXADGPPSGQKPRQSRMPQEDERPADEYDQPWEWKKDHISRAFAVQFDSPEWERXPGSAKELRRPPPRSPQPAERVDPALPLEKQPSSQGFLHLKFARXRENQVVLGQHSGPFPSVPELVLHYSSRPLPVQGAEHLALLYPVVXQXP

SEQ ID NO: 25292 - protein, 340 aa, Homo sapiens
  MOD_RES (22)..(22): Selenocysteine
  MOD_RES (26)..(26): Selenocysteine
  MOD_RES (104)..(104): Selenocysteine
  MOD_RES (146)..(146): Selenocysteine
  MOD_RES (155)..(155): Selenocysteine
  MOD_RES (208)..(208): Selenocysteine
  MOD_RES (269)..(269): Selenocysteine
  MOD_RES (292)..(292): Selenocysteine
  MOD_RES (337)..(337): Selenocysteine
  MOD_RES (339)..(339): Selenocysteine
MAKWLRDYLSFGGRRPPPQPPXPDYXESDILRAYRAQKNLDFEDPYEDAESRLEPDPAGPGDSKNPGDAKYGSPKHRLIKVEAADMARAKALLGGPGEELEADXEYLDPFDAQPHPAPPDDGYMEPYDAQWVMSELPGRGVQLYDXPYEEQDPEXADGPPSGQKPRQSRMPQEDERPADEYDQPWEWKKDHISRAFAVQFDSPEWERXPGSAKELRRPPPRSPQPAERVDPALPLEKQPWFHGPLNRADAESLLSLCKEGSYLVRLSEXNPQDCSLSLRSSQGFLHLKFARXRENQVVLGQHSGPFPSVPELVLHYSSRPLPVQGAEHLALLYPVVXQXP

SEQ ID NO: 25293 - protein, 495 aa, Homo sapiens
  MOD_RES (6)..(6): Selenocysteine
  MOD_RES (23)..(23): Selenocysteine
  MOD_RES (26)..(26): Selenocysteine
  MOD_RES (51)..(51): Selenocysteine
  MOD_RES (126)..(126): Selenocysteine
  MOD_RES (135)..(135): Selenocysteine
  MOD_RES (142)..(142): Selenocysteine
  MOD_RES (152)..(152): Selenocysteine
  MOD_RES (197)..(197): Selenocysteine
  MOD_RES (213)..(213): Selenocysteine
  MOD_RES (239)..(239): Selenocysteine
  MOD_RES (272)..(272): Selenocysteine
  MOD_RES (292)..(292): Selenocysteine
  MOD_RES (356)..(356): Selenocysteine
  MOD_RES (367)..(367): Selenocysteine
  MOD_RES (435)..(435): Selenocysteine
  MOD_RES (447)..(447): Selenocysteine
  MOD_RES (453)..(453): Selenocysteine
  MOD_RES (457)..(457): Selenocysteine
  MOD_RES (485)..(485): Selenocysteine
MQWSPXPGASACLGWASSLACSXAPXLLGRAGRGPLMAAKWFKEFPLNLKXVSERAKPGGGGGKLRKNSEAGGAGPGPGKGRKNSAAELGSGRAGVGPKDSRLSRDSLQGLIQAAAGKGRKNSRAXEEEPHRGAXKSSGCSXYINRLIKVDXQEKNGKSNYPSSSSSSSSSSSSASSSPSSLGPELDKGKIIKQQEXVIILEDYADPYDAKRXKGQRDAERVGENDGYMEPYDAQQMIXEIRRRGSKDPLVKALQLLDSPCEPADGGLKSEXLAKRRSSKDLLGKPPQLYDXPYEPAEGGPRAEGKARPPDSRLPENDERPAAEYEQPWEWKKEQIVRALSVQFEGAERPSFREEXVRQHHRQKSWXQKILKPALSDHSEGEKVDPGLPLEKQPWYHGAISRAEAESRLQPCKEAGYLVRNSESGNSRYSIALKXSQGCVHIIVAQXKDNKYXLNQXSAVFDSIPEVVHYYSNEKLPFKGAEHMXLLYPVHSKLH

SEQ ID NO: 25294 - protein, 132 aa, Homo sapiens
  MOD_RES (1)..(1): Any amino acid
  MOD_RES (54)..(54): Selenocysteine
  MOD_RES (65)..(65): Selenocysteine
XEGKARPPDSRLPENDERPAAEYEQPWEWKKEQIVRALSVQFEGAERPSFREEXVRQHHRQKSWXQKILKPALSDHSEGEKVDPGLPLEKQPWYHGAISRAEAESRLQPCKEAGYLVRNSESGNSRYSIALK

SEQ ID NO: 25295 - protein, 41 aa, Homo sapiens
  MOD_RES (1)..(1): Any amino acid
XSRAEAESRLQPCKEAGYLVRNSESGNSRYSIALKNHHLLS

SEQ ID NO: 25296 - protein, 26 aa, Homo sapiens
  MOD_RES (19)..(19): Selenocysteine
  MOD_RES (21)..(21): Selenocysteine
MEPYEAQKMMAEIRGSKEXAXQPLPL

SEQ ID NO: 25297 - protein, 239 aa, Homo sapiens
  MOD_RES (19)..(19): Selenocysteine
  MOD_RES (21)..(21): Selenocysteine
  MOD_RES (29)..(29): Selenocysteine
  MOD_RES (39)..(39): Selenocysteine
  MOD_RES (128)..(128): Selenocysteine
  MOD_RES (147)..(147): Selenocysteine
  MOD_RES (168)..(168): Selenocysteine
  MOD_RES (191)..(191): Selenocysteine
  MOD_RES (238)..(238): Selenocysteine
MEPYEAQKMMAEIRGSKEXAXQPLPLYDXPYEPEEDGAXAEGEGAPWPRESRLPEDDERPPEEYDQPWEWKKERISKAFAAQFEGPEKSCLSPGREEKGRLPPRLSAGNPKSAKPLSMEPSSPLGEWXDPALPLENQVWYHGAISRXDAENLLRLCKEASYLVRNSEXSKNDFSLSLKSSQGFMHMKLSRXKEHKYVLGQNSPPFSSVPEIVHHYASRKLPIKGAEHMSLLYPVAIRXL

SEQ ID NO: 25298 - protein, 290 aa, Homo sapiens
  MOD_RES (17)..(17): Selenocysteine
  MOD_RES (121)..(121): Selenocysteine
  MOD_RES (128)..(128): Selenocysteine
  MOD_RES (145)..(145): Selenocysteine
  MOD_RES (182)..(182): Selenocysteine
  MOD_RES (221)..(221): Selenocysteine
  MOD_RES (223)..(223): Selenocysteine
  MOD_RES (231)..(231): Selenocysteine
  MOD_RES (241)..(241): Selenocysteine
  MOD_RES (290)..(290): Selenocysteine
MLLSGAPPAGSRPGPRXQGSAGGGPGGSRRGAGGAGAGPGGGGSGGVAKWLREHLGFRGGGGGGGGSKPAPPEPDYRPPAPSPAAPPAPPPDILAAYRLQRERDFEDPYSGGSSGSAALAXPVAPGPXPPPRHGSPPHRLIRVEXPGPPAPPADERISGPPASSDRLAILEDYADPFDVQEXGEGSAGASGAPEKVPENDGYMEPYEAQKMMAEIRGSKEXAXQPLPLYDXPYEPEEDGAXAEGEGAPWPRESRLPEDDERPPEEYDQPWEWKKERISKAFAGAARDSCX

SEQ ID NO: 25299 - protein, 367 aa, Homo sapiens
  MOD_RES (17)..(17): Selenocysteine
  MOD_RES (121)..(121): Selenocysteine
  MOD_RES (128)..(128): Selenocysteine
  MOD_RES (145)..(145): Selenocysteine
  MOD_RES (182)..(182): Selenocysteine
  MOD_RES (221)..(221): Selenocysteine
  MOD_RES (223)..(223): Selenocysteine
  MOD_RES (231)..(231): Selenocysteine
  MOD_RES (241)..(241): Selenocysteine
  MOD_RES (330)..(330): Selenocysteine
MLLSGAPPAGSRPGPRXQGSAGGGPGGSRRGAGGAGAGPGGGGSGGVAKWLREHLGFRGGGGGGGGSKPAPPEPDYRPPAPSPAAPPAPPPDILAAYRLQRERDFEDPYSGGSSGSAALAXPVAPGPXPPPRHGSPPHRLIRVEXPGPPAPPADERISGPPASSDRLAILEDYADPFDVQEXGEGSAGASGAPEKVPENDGYMEPYEAQKMMAEIRGSKEXAXQPLPLYDXPYEPEEDGAXAEGEGAPWPRESRLPEDDERPPEEYDQPWEWKKERISKAFAAQFEGPEKSCLSPGREEKGRLPPRLSAGNPKSAKPLSMEPSSPLGEWXDPALPLENQLVSRGHQPNRRREPAPAVQRGQLPGAQQ

SEQ ID NO: 25300 - protein, 414 aa, Homo sapiens
  MOD_RES (17)..(17): Selenocysteine
  MOD_RES (121)..(121): Selenocysteine
  MOD_RES (128)..(128): Selenocysteine
  MOD_RES (145)..(145): Selenocysteine
  MOD_RES (182)..(182): Selenocysteine
  MOD_RES (221)..(221): Selenocysteine
  MOD_RES (223)..(223): Selenocysteine
  MOD_RES (231)..(231): Selenocysteine
  MOD_RES (241)..(241): Selenocysteine
  MOD_RES (377)..(377): Selenocysteine
MLLSGAPPAGSRPGPRXQGSAGGGPGGSRRGAGGAGAGPGGGGSGGVAKWLREHLGFRGGGGGGGGSKPAPPEPDYRPPAPSPAAPPAPPPDILAAYRLQRERDFEDPYSGGSSGSAALAXPVAPGPXPPPRHGSPPHRLIRVEXPGPPAPPADERISGPPASSDRLAILEDYADPFDVQEXGEGSAGASGAPEKVPENDGYMEPYEAQKMMAEIRGSKEXAXQPLPLYDXPYEPEEDGAXAEGEGAPWPRESRLPEDDERPPEEYDQPWEWKKERISKAFAVDIKVIKDLPWPPPVGQLDSSPSLPDGDRDISGPASPLPEPSLEDSSAQFEGPEKSCLSPGREEKGRLPPRLSAGNPKSAKPLSMEPSSPLGEWXDPALPLENQLVSRGHQPNRRREPAPAVQRGQLPGAQQ

SEQ ID NO: 25301 - protein, 423 aa, Homo sapiens
  MOD_RES (15)..(15): Selenocysteine
  MOD_RES (17)..(17): Selenocysteine
  MOD_RES (49)..(49): Selenocysteine
  MOD_RES (85)..(86): Selenocysteine
  MOD_RES (117)..(117): Selenocysteine
  MOD_RES (156)..(156): Selenocysteine
  MOD_RES (158)..(158): Selenocysteine
  MOD_RES (166)..(166): Selenocysteine
  MOD_RES (176)..(176): Selenocysteine
  MOD_RES (312)..(312): Selenocysteine
  MOD_RES (331)..(331): Selenocysteine
  MOD_RES (352)..(352): Selenocysteine
  MOD_RES (375)..(375): Selenocysteine
  MOD_RES (422)..(422): Selenocysteine
MQQEGGPVRSAPCRXGXLEGSRQGSPGHRKRASPKGSLSSAQPHSWMLXPSPLNSHCAHREPISSSPQPVANGPKQKKKSNWRSXXRLRIIRLRDRLEPRPLAILEDYADPFDVQEXGEGSAGASGAPEKVPENDGYMEPYEAQKMMAEIRGSKEXAXQPLPLYDXPYEPEEDGAXAEGEGAPWPRESRLPEDDERPPEEYDQPWEWKKERISKAFAVDIKVIKDLPWPPPVGQLDSSPSLPDGDRDISGPASPLPEPSLEDSSAQFEGPEKSCLSPGREEKGRLPPRLSAGNPKSAKPLSMEPSSPLGEWXDPALPLENQVWYHGAISRXDAENLLRLCKEASYLVRNSEXSKNDFSLSLKSSQGFMHMKLSRXKEHKYVLGQNSPPFSSVPEIVHHYASRKLPIKGAEHMSLLYPVAIRXL

SEQ ID NO: 25302 - protein, 146 aa, Homo sapiens
  MOD_RES (1)..(1): Any amino acid
  MOD_RES (112)..(112): Selenocysteine
XDQPWEWKKERISKAFAVDIKVIKDLPWPPPVGQLDSSPSLPDGDRDISGPASPLPEPSLEDSSAQFEGPEKSCLSPGREEKGRLPPRLSAGNPKSAKPLSMEPSSPLGEWXDPALPLENQVGHPQWVGLDSEGPSRDAPLPLSHP

SEQ ID NO: 25303 - protein, 199 aa, Homo sapiens
  MOD_RES (1)..(1): Any amino acid
  MOD_RES (40)..(40): Selenocysteine
  MOD_RES (42)..(42): Selenocysteine
  MOD_RES (50)..(50): Selenocysteine
  MOD_RES (60)..(60): Selenocysteine
  MOD_RES (149)..(149): Selenocysteine
  MOD_RES (168)..(168): Selenocysteine
  MOD_RES (189)..(189): Selenocysteine
XGEGSAGASGAPEKVPENDGYMEPYEAQKMMAEIRGSKEXAXQPLPLYDXPYEPEEDGAXAEGEGAPWPRESRLPEDDERPPEEYDQPWEWKKERISKAFAAQFEGPEKSCLSPGREEKGRLPPRLSAGNPKSAKPLSMEPSSPLGEWXDPALPLENQVWYHGAISRXDAENLLRLCKEASYLVRNSEXSKNDFSLSLK

SEQ ID NO: 25304 - protein, 163 aa, Homo sapiens
  MOD_RES (1)..(1): Any amino acid
  MOD_RES (39)..(39): Selenocysteine
  MOD_RES (46)..(46): Selenocysteine
  MOD_RES (71)..(71): Selenocysteine
  MOD_RES (92)..(92): Selenocysteine
  MOD_RES (115)..(115): Selenocysteine
  MOD_RES (162)..(162): Selenocysteine
XPWPRESRLPEDDERPPEEYDQPWEWKKERISKAFAGDXHNGWAWXARDPAEMPPFLSLILSWYHGAISRXDAENLLRLCKEASYLVRNSEXSKNDFSLSLKSSQGFMHMKLSRXKEHKYVLGQNSPPFSSVPEIVHHYASRKLPIKGAEHMSLLYPVAIRXL

SEQ ID NO: 25305 - protein, 161 aa, Homo sapiens
  MOD_RES (1)..(1): Any amino acid
  MOD_RES (76)..(76): Selenocysteine
  MOD_RES (95)..(95): Selenocysteine
  MOD_RES (138)..(138): Selenocysteine
  MOD_RES (154)..(154): Selenocysteine
XSPSLPDGDRDISGPASPLPEPSLEDSSAQFEGPEKSCLSPGREEKGRLPPRLSAGNPKSAKPLSMEPSSPLGEWXDPALPLENQVWYHGAISRXDAENLLRLCKEASYLLSYSRSLNCKIKEAFPRKVFVKNLIYIXSEMCIALKIIKFMEHXKQPVYHF

SEQ ID NO: 25306 - protein, 462 aa, Homo sapiens
  MOD_RES (40)..(40): Selenocysteine
  MOD_RES (55)..(55): Selenocysteine
  MOD_RES (77)..(77): Selenocysteine
  MOD_RES (92)..(92): Selenocysteine
  MOD_RES (99)..(99): Selenocysteine
  MOD_RES (125)..(125): Selenocysteine
  MOD_RES (149)..(150): Selenocysteine
  MOD_RES (204)..(204): Selenocysteine
  MOD_RES (212)..(212): Selenocysteine
  MOD_RES (240)..(240): Selenocysteine
  MOD_RES (257)..(257): Selenocysteine
  MOD_RES (267)..(267): Selenocysteine
  MOD_RES (282)..(282): Selenocysteine
  MOD_RES (336)..(336): Selenocysteine
  MOD_RES (349)..(349): Selenocysteine
  MOD_RES (353)..(353): Selenocysteine
  MOD_RES (395)..(395): Selenocysteine
  MOD_RES (416)..(416): Selenocysteine
  MOD_RES (429)..(429): Selenocysteine
  MOD_RES (444)..(444): Selenocysteine
MLLLARCLLLVLVSSLLVCSGLACGPGRGFGKRRHPKKLXPLAYKQFIPNVAEKXLGASGRYEGKISRNSERFKELXPNYNPDIIFKDEENXGADRLMXQRCKDKLNALAISVMNQWPGVKLRVXEGWDEDGHHSEESLHYEGRAVDIXXSDRDRSKYGMLARLAVEAGFDWVYYESKAHIHCSVKAENSVAAKSGGCFPGSAXVHLEQGGXKLVKDLSPGDRVLAADDQGRLLYSDFLXFLDRDDGAKKVFYVIEXREPRERLLLXAAHLLFVAPHNDSAXGEPEASSGSGPPSGGALGPRALFASRVRPGQRVYVVAERDGDRRLLPAAVHSVXLSEEAAGAYAPLXAQGXILINRVLASCYAVIEEHSWAHRAFAPFRLAHALLAALAPARXDRGGDSGGGDRGGGGGRVALXAPGAADAPGAGAXAGIHWYSQLLYQIGXWLLDSEALHPLGMAVKSS

SEQ ID NO: 25307 - protein, 126 aa, Homo sapiens
  MOD_RES (38)..(38): Selenocysteine
  MOD_RES (62)..(63): Selenocysteine
MLSLFPSPGPGSSRCKDKLNALAISVMNQWPGVKLRVXEGWDEDGHHSEESLHYEGRAVDIXXSDRDRSKYGMLARLAVEAGFDWVYYESKAHIHCSVKAGGQQVPGWCLQSRRKCDGFCSFDSSV

SEQ ID NO: 25308 - protein, 169 aa, Homo sapiens
  MOD_RES (38)..(38): Selenocysteine
  MOD_RES (62)..(63): Selenocysteine
  MOD_RES (111)..(111): Selenocysteine
  MOD_RES (155)..(155): Selenocysteine
  MOD_RES (164)..(164): Selenocysteine
  MOD_RES (167)..(167): Selenocysteine
MLSLFPSPGPGSSRCKDKLNALAISVMNQWPGVKLRVXEGWDEDGHHSEESLHYEGRAVDIXXSDRDRSKYGMLARLAVEAGFDWVYYESKAHIHCSVKAGKERKPLLRDXRYRASRGCSPAPPGRGADFSFRVDGAKSLCKMYAWWLLPASLMXKCISIPVKXCIXMY

SEQ ID NO: 25309 - protein, 123 aa, Homo sapiens
  MOD_RES (38)..(38): Selenocysteine
  MOD_RES (62)..(63): Selenocysteine
  MOD_RES (117)..(117): Selenocysteine
MLSLFPSPGPGSSRCKDKLNALAISVMNQWPGVKLRVXEGWDEDGHHSEESLHYEGRAVDIXXSDRDRSKYGMLARLAVEAGFDWVYYESKAHIHCSVKAVQSDFKSVESEPEAPGXAAPLAV

SEQ ID NO: 25310 - protein, 295 aa, Homo sapiens
  MOD_RES (64)..(64): Selenocysteine
  MOD_RES (163)..(163): Selenocysteine
  MOD_RES (172)..(172): Selenocysteine
  MOD_RES (183)..(183): Selenocysteine
  MOD_RES (200)..(200): Selenocysteine
  MOD_RES (204)..(204): Selenocysteine
  MOD_RES (212)..(212): Selenocysteine
  MOD_RES (222)..(222): Selenocysteine
  MOD_RES (233)..(233): Selenocysteine
  MOD_RES (251)..(251): Selenocysteine
  MOD_RES (260)..(260): Selenocysteine
  MOD_RES (283)..(283): Selenocysteine
  MOD_RES (294)..(294): Selenocysteine
MWGARRSSVSSSWNAASLLQLLLAALLAAGARASGEYCHGWLDAQGVWRIGFQCPERFDGGDAXICCGSCALRYCCSSAEARLDQGGCDNDRQQGAGEPGRADKDGPDGSAVPIYVPFLIVGSVFVAFIILGSLVAACCCRCLRPKQDPQQSRAPGGNRLMEXIPMIPSASXSRGSSSRQSSXAASSSSSANSGARAPPXRSQXNCCLPEGXMNNVYVNMPXNFSVLNCQQAXQIVPHQGQYLHPPYVGYXVQHDSVPMXAVPPFMDGLQPGYRQIQSPFPHXNSEQKMYPAVXV

SEQ ID NO: 25311 - protein, 112 aa, Homo sapiens
  MOD_RES (20)..(20): Selenocysteine
  MOD_RES (78)..(78): Selenocysteine
  MOD_RES (84)..(84): Selenocysteine
  MOD_RES (92)..(92): Selenocysteine
  MOD_RES (98)..(98): Selenocysteine
  MOD_RES (107)..(107): Selenocysteine
MASRGLSLFPESCPDFCCGXCDDQYCCSDVLKKFVWSEERCAVPEASVPASVEPVEQLGSALRFRPGYNDPMSGFGAXLAVGLXIFVLSVVXIIICFXCSCCCLYKXCRRPR

SEQ ID NO: 25312 - protein, 209 aa, Homo sapiens
  MOD_RES (20)..(20): Selenocysteine
  MOD_RES (78)..(78): Selenocysteine
  MOD_RES (84)..(84): Selenocysteine
  MOD_RES (92)..(92): Selenocysteine
  MOD_RES (98)..(98): Selenocysteine
  MOD_RES (107)..(107): Selenocysteine
  MOD_RES (116)..(119): Selenocysteine
  MOD_RES (121)..(122): Selenocysteine
  MOD_RES (148)..(148): Selenocysteine
  MOD_RES (181)..(181): Selenocysteine
MASRGLSLFPESCPDFCCGXCDDQYCCSDVLKKFVWSEERCAVPEASVPASVEPVEQLGSALRFRPGYNDPMSGFGAXLAVGLXIFVLSVVXIIICFXCSCCCLYKXCRRPRPVVXXXXSXXVVHAPYPQPPSVPPSYPGPSYQGYHXMPPQPGMPAAPYPMQYPPPYPAQPMGPPAYHEXLAGGAAAPYPASQPPYNPAYMDAPKAAL

SEQ ID NO: 25313 - protein, 137 aa, Homo sapiens
  MOD_RES (6)..(6): Selenocysteine
  MOD_RES (12)..(12): Selenocysteine
  MOD_RES (20)..(20): Selenocysteine
  MOD_RES (26)..(26): Selenocysteine
  MOD_RES (35)..(35): Selenocysteine
  MOD_RES (44)..(47): Selenocysteine
  MOD_RES (49)..(50): Selenocysteine
  MOD_RES (76)..(76): Selenocysteine
  MOD_RES (109)..(109): Selenocysteine
MGFGAXLAVGLXIFVLSVVXIIICFXCSCCCLYKXCRRPRPVVXXXXSXXVVHAPYPQPPSVPPSYPGPSYQGYHXMPPQPGMPAAPYPMQYPPPYPAQPMGPPAYHEXLAGGAAAPYPASQPPYNPAYMDAPKAAL

SEQ ID NO: 25314 - protein, 170 aa, Homo sapiens
  MOD_RES (12)..(12): Selenocysteine
  MOD_RES (16)..(16): Selenocysteine
  MOD_RES (20)..(20): Selenocysteine
  MOD_RES (30)..(31): Selenocysteine
  MOD_RES (42)..(42): Selenocysteine
  MOD_RES (49)..(50): Selenocysteine
  MOD_RES (53)..(53): Selenocysteine
  MOD_RES (106)..(106): Selenocysteine
  MOD_RES (110)..(110): Selenocysteine
  MOD_RES (120)..(120): Selenocysteine
  MOD_RES (137)..(137): Selenocysteine
  MOD_RES (160)..(160): Selenocysteine
  MOD_RES (168)..(168): Selenocysteine
MPPQPGCQQHPXQCSXHHLXQPSPWAHRPXXRPWLEEQPRPXPPASLLXXRPXWMPRGGPLSIPWPLWLPLGYVVCVREWCAGAVPYAPCVLCVSCLYMWLPLMLXRWGXILARVGWDQXLFSSSPEIMLPKISSQXQRMGWWGAPCEVAPERWGPLQGXSGVLLQLXLG

SEQ ID NO: 25315 - protein, 44 aa, Homo sapiens
  MOD_RES (2)..(2): Selenocysteine
  MOD_RES (21)..(21): Selenocysteine
  MOD_RES (44)..(44): Selenocysteine
MXAPVPAPRILLPLLLLLLLXPPPGALAQRLRLGCEDLAAYGFX

SEQ ID NO: 25316 - protein, 123 aa, Homo sapiens
  MOD_RES (2)..(2): Selenocysteine
  MOD_RES (21)..(21): Selenocysteine
  MOD_RES (51)..(51): Selenocysteine
MXAPVPAPRILLPLLLLLLLXPPPGARGEVCMASRGLSLFPESCPDFCCGXCDDQYCCSDVLKKFVWSEERCAVPEASVPASVEPVEQLGSALRFRPGYNDPMSGFELGQQGGDSAEQAPRGA

SEQ ID NO: 25317 - protein, 240 aa, Homo sapiens
  MOD_RES (2)..(2): Selenocysteine
  MOD_RES (21)..(21): Selenocysteine
  MOD_RES (51)..(51): Selenocysteine
  MOD_RES (109)..(109): Selenocysteine
  MOD_RES (115)..(115): Selenocysteine
  MOD_RES (123)..(123): Selenocysteine
  MOD_RES (129)..(129): Selenocysteine
  MOD_RES (138)..(138): Selenocysteine
  MOD_RES (147)..(150): Selenocysteine
  MOD_RES (152)..(153): Selenocysteine
  MOD_RES (179)..(179): Selenocysteine
  MOD_RES (212)..(212): Selenocysteine
MXAPVPAPRILLPLLLLLLLXPPPGARGEVCMASRGLSLFPESCPDFCCGXCDDQYCCSDVLKKFVWSEERCAVPEASVPASVEPVEQLGSALRFRPGYNDPMSGFGAXLAVGLXIFVLSVVXIIICFXCSCCCLYKXCRRPRPVVXXXXSXXVVHAPYPQPPSVPPSYPGPSYQGYHXMPPQPGMPAAPYPMQYPPPYPAQPMGPPAYHEXLAGGAAAPYPASQPPYNPAYMDAPKAAL

SEQ ID NO: 25318 - protein, 233 aa, Homo sapiens
  MOD_RES (2)..(2): Selenocysteine
  MOD_RES (21)..(21): Selenocysteine
  MOD_RES (51)..(51): Selenocysteine
  MOD_RES (102)..(102): Selenocysteine
  MOD_RES (108)..(108): Selenocysteine
  MOD_RES (116)..(116): Selenocysteine
  MOD_RES (122)..(122): Selenocysteine
  MOD_RES (131)..(131): Selenocysteine
  MOD_RES (140)..(143): Selenocysteine
  MOD_RES (145)..(146): Selenocysteine
  MOD_RES (172)..(172): Selenocysteine
  MOD_RES (205)..(205): Selenocysteine
MXAPVPAPRILLPLLLLLLLXPPPGARGEVCMASRGLSLFPESCPDFCCGXCDDQYCCSDVLKKFVWSEESVPASVEPVEQLGSALRFRPGYNDPMSGFGAXLAVGLXIFVLSVVXIIICFXCSCCCLYKXCRRPRPVVXXXXSXXVVHAPYPQPPSVPPSYPGPSYQGYHXMPPQPGMPAAPYPMQYPPPYPAQPMGPPAYHEXLAGGAAAPYPASQPPYNPAYMDAPKAAL

SEQ ID NO: 25319 - protein, 61 aa, Homo sapiens
  MOD_RES (2)..(2): Selenocysteine
  MOD_RES (21)..(21): Selenocysteine
  MOD_RES (48)..(48): Selenocysteine
  MOD_RES (53)..(53): Selenocysteine
MXAPVPAPRILLPLLLLLLLXPPPGGLQMVPLPWSPVAQAGLKLLEGXDISWXPAAGPARG

SEQ ID NO: 25320 - protein, 47 aa, Homo sapiens
  MOD_RES (1)..(1): Any amino acid
  MOD_RES (7)..(7): Selenocysteine
XLLLLLXPPPGGEPGVGAARPALGPGRHFPALPLQRAGQHQPHYAPH

SEQ ID NO: 25321 - protein, 262 aa, Homo sapiens
  MOD_RES (26)..(26): Selenocysteine
  MOD_RES (33)..(33): Selenocysteine
  MOD_RES (36)..(36): Selenocysteine
  MOD_RES (49)..(49): Selenocysteine
  MOD_RES (63)..(63): Selenocysteine
  MOD_RES (73)..(73): Selenocysteine
  MOD_RES (75)..(75): Selenocysteine
  MOD_RES (82)..(82): Selenocysteine
  MOD_RES (103)..(103): Selenocysteine
  MOD_RES (107)..(107): Selenocysteine
  MOD_RES (115)..(115): Selenocysteine
  MOD_RES (120)..(120): Selenocysteine
  MOD_RES (149)..(149): Selenocysteine
  MOD_RES (185)..(185): Selenocysteine
  MOD_RES (194)..(194): Selenocysteine
  MOD_RES (237)..(237): Selenocysteine
  MOD_RES (248)..(248): Selenocysteine
  MOD_RES (251)..(251): Selenocysteine
  MOD_RES (260)..(260): Selenocysteine
KFPLRMKDNDLLVSELYRDPAEDGVXALSVYLXPKXSDSGNWIEIAYGXSSGGVRVIVQHPEXVGSGPQLFQXFXVHRSPVXKIMLSEKHLISVCADNNHVRXWSVXRFRGMISXQPGSXPLASFKILALESADGHGGCSAGNDIGGLXEQELMEQLEHCELAPPAPSAPSWGCLPSPSPRISLXSLHSASSNXSLSGHRGSPSPPQAEARRRGGGSFVERCQELVRSGPDLRRPPXPAPWPSSGLGXPLXPPKMKLNEXSF

SEQ ID NO: 25322 - protein, 141 aa, Homo sapiens
  MOD_RES (6)..(6): Selenocysteine
  MOD_RES (32)..(32): Selenocysteine
  MOD_RES (36)..(36): Selenocysteine
  MOD_RES (38)..(38): Selenocysteine
  MOD_RES (55)..(55): Selenocysteine
  MOD_RES (60)..(60): Selenocysteine
  MOD_RES (70)..(70): Selenocysteine
  MOD_RES (81)..(81): Selenocysteine
  MOD_RES (104)..(104): Selenocysteine
  MOD_RES (128)..(128): Selenocysteine
  MOD_RES (134)..(134): Selenocysteine
MAAAAXAAEGVPSRGPPGEVIHLNVGGKRFSXSRQXLXWIPDSFFSSLLSGRISXLKDEXGAIFIDRDPXVFAPILNFLRXKELDPRGVHGSSLLHEAQFYGLXPLVLLLQFVACSFERSWIDLLVEXSSSMVXCRHQCSQ

SEQ ID NO: 25323 - protein, 682 aa, Homo sapiens
  MOD_RES (6)..(6): Selenocysteine
  MOD_RES (32)..(32): Selenocysteine
  MOD_RES (36)..(36): Selenocysteine
  MOD_RES (38)..(38): Selenocysteine
  MOD_RES (55)..(55): Selenocysteine
  MOD_RES (60)..(60): Selenocysteine
  MOD_RES (70)..(70): Selenocysteine
  MOD_RES (81)..(81): Selenocysteine
  MOD_RES (104)..(104): Selenocysteine
  MOD_RES (163)..(163): Selenocysteine
  MOD_RES (182)..(182): Selenocysteine
  MOD_RES (211)..(211): Selenocysteine
  MOD_RES (244)..(244): Selenocysteine
  MOD_RES (263)..(263): Selenocysteine
  MOD_RES (291)..(291): Selenocysteine
  MOD_RES (303)..(303): Selenocysteine
  MOD_RES (353)..(353): Selenocysteine
  MOD_RES (360)..(360): Selenocysteine
  MOD_RES (363)..(363): Selenocysteine
  MOD_RES (376)..(376): Selenocysteine
  MOD_RES (390)..(390): Selenocysteine
  MOD_RES (400)..(400): Selenocysteine
  MOD_RES (402)..(402): Selenocysteine
  MOD_RES (409)..(409): Selenocysteine
  MOD_RES (430)..(430): Selenocysteine
  MOD_RES (434)..(434): Selenocysteine
  MOD_RES (442)..(442): Selenocysteine
  MOD_RES (447)..(447): Selenocysteine
  MOD_RES (502)..(502): Selenocysteine
  MOD_RES (517)..(518): Selenocysteine
  MOD_RES (521)..(521): Selenocysteine
  MOD_RES (541)..(541): Selenocysteine
  MOD_RES (554)..(555): Selenocysteine
  MOD_RES (569)..(569): Selenocysteine
  MOD_RES (605)..(605): Selenocysteine
  MOD_RES (614)..(614): Selenocysteine
  MOD_RES (657)..(657): Selenocysteine
  MOD_RES (668)..(668): Selenocysteine
  MOD_RES (671)..(671): Selenocysteine
  MOD_RES (680)..(680): Selenocysteine
MAAAAXAAEGVPSRGPPGEVIHLNVGGKRFSXSRQXLXWIPDSFFSSLLSGRISXLKDEXGAIFIDRDPXVFAPILNFLRXKELDPRGVHGSSLLHEAQFYGLXPLVRRLQLREELDRSSCGNVLFNGYLPPPVFPVKRRNRHSLVGPQQLGGRPAPVRRSNXMPPNLGNAGLLGRMLDEKXPPSPSGQPEEPGMVRLVCGHHNWIAVAYXQFLVCYRLKEASGWQLVFSSPRLDWPIERLALXARVHGGALGEHDKMVAAAXGSEILLWALQAEGGGSEIGRIGVWNAVXKHWQVQEVQPIXSYDAAGSFLLLGCNNGSIYYVDVQKFPLRMKDNDLLVSELYRDPAEDGVXALSVYLXPKXSDSGNWIEIAYGXSSGGVRVIVQHPEXVGSGPQLFQXFXVHRSPVXKIMLSEKHLISVCADNNHVRXWSVXRFRGMISXQPGSXPLASFKILALESADGHGGCSAGNDIGPYGERDDQQVFIQKVVPSASQLFVRLSSXGQRVCSVRSVDGSPXXAFXVLECEGSRRLGSRPRRYLLXGQANGSLAMWDLXXAMDGLGQAPAGGLXEQELMEQLEHCELAPPAPSAPSWGCLPSPSPRISLXSLHSASSNXSLSGHRGSPSPPQAEARRRGGGSFVERCQELVRSGPDLRRPPXPAPWPSSGLGXPLXPPKMKLNEXSF

SEQ ID NO: 25324 - protein, 707 aa, Homo sapiens
  MOD_RES (6)..(6): Selenocysteine
  MOD_RES (32)..(32): Selenocysteine
  MOD_RES (36)..(36): Selenocysteine
  MOD_RES (38)..(38): Selenocysteine
  MOD_RES (55)..(55): Selenocysteine
  MOD_RES (60)..(60): Selenocysteine
  MOD_RES (70)..(70): Selenocysteine
  MOD_RES (81)..(81): Selenocysteine
  MOD_RES (104)..(104): Selenocysteine
  MOD_RES (163)..(163): Selenocysteine
  MOD_RES (182)..(182): Selenocysteine
  MOD_RES (211)..(211): Selenocysteine
  MOD_RES (244)..(244): Selenocysteine
  MOD_RES (263)..(263): Selenocysteine
  MOD_RES (303)..(303): Selenocysteine
  MOD_RES (306)..(306): Selenocysteine
  MOD_RES (316)..(316): Selenocysteine
  MOD_RES (328)..(328): Selenocysteine
  MOD_RES (378)..(378): Selenocysteine
  MOD_RES (385)..(385): Selenocysteine
  MOD_RES (388)..(388): Selenocysteine
  MOD_RES (401)..(401): Selenocysteine
  MOD_RES (415)..(415): Selenocysteine
  MOD_RES (425)..(425): Selenocysteine
  MOD_RES (427)..(427): Selenocysteine
  MOD_RES (434)..(434): Selenocysteine
  MOD_RES (455)..(455): Selenocysteine
  MOD_RES (459)..(459): Selenocysteine
  MOD_RES (467)..(467): Selenocysteine
  MOD_RES (472)..(472): Selenocysteine
  MOD_RES (527)..(527): Selenocysteine
  MOD_RES (542)..(543): Selenocysteine
  MOD_RES (546)..(546): Selenocysteine
  MOD_RES (566)..(566): Selenocysteine
  MOD_RES (579)..(580): Selenocysteine
  MOD_RES (594)..(594): Selenocysteine
  MOD_RES (630)..(630): Selenocysteine
  MOD_RES (639)..(639): Selenocysteine
  MOD_RES (682)..(682): Selenocysteine
  MOD_RES (693)..(693): Selenocysteine
  MOD_RES (696)..(696): Selenocysteine
  MOD_RES (705)..(705): Selenocysteine
MAAAAXAAEGVPSRGPPGEVIHLNVGGKRFSXSRQXLXWIPDSFFSSLLSGRISXLKDEXGAIFIDRDPXVFAPILNFLRXKELDPRGVHGSSLLHEAQFYGLXPLVRRLQLREELDRSSCGNVLFNGYLPPPVFPVKRRNRHSLVGPQQLGGRPAPVRRSNXMPPNLGNAGLLGRMLDEKXPPSPSGQPEEPGMVRLVCGHHNWIAVAYXQFLVCYRLKEASGWQLVFSSPRLDWPIERLALXARVHGGALGEHDKMVAAAXGSEILLWALQAEGGGSEIGVFHLGVPVEALFFVGNQLIAXSHXGRIGVWNAVXKHWQVQEVQPIXSYDAAGSFLLLGCNNGSIYYVDVQKFPLRMKDNDLLVSELYRDPAEDGVXALSVYLXPKXSDSGNWIEIAYGXSSGGVRVIVQHPEXVGSGPQLFQXFXVHRSPVXKIMLSEKHLISVCADNNHVRXWSVXRFRGMISXQPGSXPLASFKILALESADGHGGCSAGNDIGPYGERDDQQVFIQKVVPSASQLFVRLSSXGQRVCSVRSVDGSPXXAFXVLECEGSRRLGSRPRRYLLXGQANGSLAMWDLXXAMDGLGQAPAGGLXEQELMEQLEHCELAPPAPSAPSWGCLPSPSPRISLXSLHSASSNXSLSGHRGSPSPPQAEARRRGGGSFVERCQELVRSGPDLRRPPXPAPWPSSGLGXPLXPPKMKLNEXSF

SEQ ID NO: 25325 - protein, 102 aa, Homo sapiens
  MOD_RES (6)..(6): Selenocysteine
  MOD_RES (32)..(32): Selenocysteine
  MOD_RES (36)..(36): Selenocysteine
  MOD_RES (38)..(38): Selenocysteine
  MOD_RES (55)..(55): Selenocysteine
  MOD_RES (60)..(60): Selenocysteine
  MOD_RES (70)..(70): Selenocysteine
  MOD_RES (81)..(81): Selenocysteine
  MOD_RES (98)..(98): Selenocysteine
MAAAAXAAEGVPSRGPPGEVIHLNVGGKRFSXSRQXLXWIPDSFFSSLLSGRISXLKDEXGAIFIDRDPXVFAPILNFLRXKELDPRLAWKKGRESLXVFSP

SEQ ID NO: 25326 - protein, 88 aa, Homo sapiens
  MOD_RES (6)..(6): Selenocysteine
  MOD_RES (32)..(32): Selenocysteine
  MOD_RES (36)..(36): Selenocysteine
  MOD_RES (38)..(38): Selenocysteine
  MOD_RES (55)..(55): Selenocysteine
  MOD_RES (60)..(60): Selenocysteine
  MOD_RES (70)..(70): Selenocysteine
  MOD_RES (81)..(81): Selenocysteine
MAAAAXAAEGVPSRGPPGEVIHLNVGGKRFSXSRQXLXWIPDSFFSSLLSGRISXLKDEXGAIFIDRDPXVFAPILNFLRXKELDPRP

SEQ ID NO: 25327 - protein, 37 aa, Homo sapiens
  MOD_RES (9)..(9): Selenocysteine
  MOD_RES (11)..(11): Selenocysteine
  MOD_RES (20)..(20): Selenocysteine
  MOD_RES (37)..(37): Selenocysteine
MRPEQSSSXGXLQSSPPSSXSCAPKSWIPAFSVHPHX

SEQ ID NO: 25328 - protein, 131 aa, Homo sapiens
  MOD_RES (9)..(9): Selenocysteine
  MOD_RES (11)..(11): Selenocysteine
  MOD_RES (20)..(20): Selenocysteine
  MOD_RES (86)..(86): Selenocysteine
  MOD_RES (105)..(105): Selenocysteine
MRPEQSSSXGXLQSSPPSSXSCAPKSWIPVRRLQLREELDRSSCGNVLFNGYLPPPVFPVKRRNRHSLVGPQQLGGRPAPVRRSNXMPPNLGNAGLLGRMLDEKXPPSPSGQPEEPGMVRLVCGHHNWIAV

SEQ ID NO: 25329 - protein, 277 aa, Homo sapiens
  MOD_RES (5)..(5): Selenocysteine
  MOD_RES (26)..(26): Selenocysteine
  MOD_RES (30)..(30): Selenocysteine
  MOD_RES (38)..(38): Selenocysteine
  MOD_RES (43)..(43): Selenocysteine
  MOD_RES (98)..(98): Selenocysteine
  MOD_RES (113)..(114): Selenocysteine
  MOD_RES (117)..(117): Selenocysteine
  MOD_RES (137)..(137): Selenocysteine
  MOD_RES (150)..(151): Selenocysteine
  MOD_RES (164)..(164): Selenocysteine
  MOD_RES (200)..(200): Selenocysteine
  MOD_RES (209)..(209): Selenocysteine
  MOD_RES (252)..(252): Selenocysteine
  MOD_RES (263)..(263): Selenocysteine
  MOD_RES (266)..(266): Selenocysteine
  MOD_RES (275)..(275): Selenocysteine
RSPVXKIMLSEKHLISVCADNNHVRXWSVXRFRGMISXQPGSXPLASFKILALESADGHGGCSAGNDIGPYGERDDQQVFIQKVVPSASQLFVRLSSXGQRVCSVRSVDGSPXXAFXVLECEGSRRLGSRPRRYLLXGQANGSLAMWDLXXAMDGLGQAPGGLXEQELMEQLEHCELAPPAPSAPSWGCLPSPSPRISLXSLHSASSNXSLSGHRGSPSPPQAEARRRGGGSFVERCQELVRSGPDLRRPPXPAPWPSSGLGXPLXPPKMKLNEXSF

SEQ ID NO: 25330 - protein, 610 aa, Homo sapiens
  MOD_RES (1)..(1): Any amino acid
  MOD_RES (27)..(27): Selenocysteine
  MOD_RES (31)..(31): Selenocysteine
  MOD_RES (33)..(33): Selenocysteine
  MOD_RES (50)..(50): Selenocysteine
  MOD_RES (55)..(55): Selenocysteine
  MOD_RES (65)..(65): Selenocysteine
  MOD_RES (76)..(76): Selenocysteine
  MOD_RES (99)..(99): Selenocysteine
  MOD_RES (158)..(158): Selenocysteine
  MOD_RES (177)..(177): Selenocysteine
  MOD_RES (206)..(206): Selenocysteine
  MOD_RES (239)..(239): Selenocysteine
  MOD_RES (258)..(258): Selenocysteine
  MOD_RES (298)..(298): Selenocysteine
  MOD_RES (301)..(301): Selenocysteine
  MOD_RES (311)..(311): Selenocysteine
  MOD_RES (323)..(323): Selenocysteine
  MOD_RES (373)..(373): Selenocysteine
  MOD_RES (380)..(380): Selenocysteine
  MOD_RES (383)..(383): Selenocysteine
  MOD_RES (396)..(396): Selenocysteine
  MOD_RES (410)..(410): Selenocysteine
  MOD_RES (420)..(420): Selenocysteine
  MOD_RES (422)..(422): Selenocysteine
  MOD_RES (429)..(429): Selenocysteine
  MOD_RES (450)..(450): Selenocysteine
  MOD_RES (454)..(454): Selenocysteine
  MOD_RES (462)..(462): Selenocysteine
  MOD_RES (467)..(467): Selenocysteine
  MOD_RES (497)..(497): Selenocysteine
  MOD_RES (533)..(533): Selenocysteine
  MOD_RES (542)..(542): Selenocysteine
  MOD_RES (585)..(585): Selenocysteine
  MOD_RES (596)..(596): Selenocysteine
  MOD_RES (599)..(599): Selenocysteine
  MOD_RES (608)..(608): Selenocysteine
XAAEGVPSRGPPGEVIHLNVGGKRFSXSRQXLXWIPDSFFSSLLSGRISXLKDEXGAIFIDRDPXVFAPILNFLRXKELDPRGVHGSSLLHEAQFYGLXPLVRRLQLREELDRSSCGNVLFNGYLPPPVFPVKRRNRHSLVGPQQLGGRPAPVRRSNXMPPNLGNAGLLGRMLDEKXPPSPSGQPEEPGMVRLVCGHHNWIAVAYXQFLVCYRLKEASGWQLVFSSPRLDWPIERLALXARVHGGALGEHDKMVAAAXGSEILLWALQAEGGGSEIGVFHLGVPVEALFFVGNQLIAXSHXGRIGVWNAVXKHWQVQEVQPIXSYDAAGSFLLLGCNNGSIYYVDVQKFPLRMKDNDLLVSELYRDPAEDGVXALSVYLXPKXSDSGNWIEIAYGXSSGGVRVIVQHPEXVGSGPQLFQXFXVHRSPVXKIMLSEKHLISVCADNNHVRXWSVXRFRGMISXQPGSXPLASFKILALESADGHGGCSAGNDIAGGLXEQELMEQLEHCELAPPAPSAPSWGCLPSPSPRISLXSLHSASSNXSLSGHRGSPSPPQAEARRRGGGSFVERCQELVRSGPDLRRPPXPAPWPSSGLGXPLXPPKMKLNEXSF

SEQ ID NO: 25331 - protein, 175 aa, Homo sapiens
  MOD_RES (1)..(1): Any amino acid
  MOD_RES (13)..(13): Selenocysteine
  MOD_RES (27)..(27): Selenocysteine
  MOD_RES (37)..(37): Selenocysteine
  MOD_RES (39)..(39): Selenocysteine
  MOD_RES (46)..(46): Selenocysteine
  MOD_RES (62)..(62): Selenocysteine
  MOD_RES (98)..(98): Selenocysteine
  MOD_RES (107)..(107): Selenocysteine
  MOD_RES (150)..(150): Selenocysteine
  MOD_RES (161)..(161): Selenocysteine
  MOD_RES (164)..(164): Selenocysteine
  MOD_RES (173)..(173): Selenocysteine
XDSGNWIEIAYGXSSGGVRVIVQHPEXVGSGPQLFQXFXVHRSPVXKIMLSEKHLISAGGLXEQELMEQLEHCELAPPAPSAPSWGCLPSPSPRISLXSLHSASSNXSLSGHRGSPSPPQAEARRRGGGSFVERCQELVRSGPDLRRPPXPAPWPSSGLGXPLXPPKMKLNEXSF

SEQ ID NO: 25332 - protein, 250 aa, Homo sapiens
  MOD_RES (1)..(1): Any amino acid
  MOD_RES (13)..(13): Selenocysteine
  MOD_RES (20)..(20): Selenocysteine
  MOD_RES (23)..(23): Selenocysteine
  MOD_RES (36)..(36): Selenocysteine
  MOD_RES (50)..(50): Selenocysteine
  MOD_RES (60)..(60): Selenocysteine
  MOD_RES (62)..(62): Selenocysteine
  MOD_RES (69)..(69): Selenocysteine
  MOD_RES (90)..(90): Selenocysteine
  MOD_RES (94)..(94): Selenocysteine
  MOD_RES (102)..(102): Selenocysteine
  MOD_RES (107)..(107): Selenocysteine
  MOD_RES (137)..(137): Selenocysteine
  MOD_RES (173)..(173): Selenocysteine
  MOD_RES (182)..(182): Selenocysteine
  MOD_RES (225)..(225): Selenocysteine
  MOD_RES (236)..(236): Selenocysteine
  MOD_RES (239)..(239): Selenocysteine
  MOD_RES (248)..(248): Selenocysteine
XELYRDPAEDGVXALSVYLXPKXSDSGNWIEIAYGXSSGGVRVIVQHPEXVGSGPQLFQXFXVHRSPVXKIMLSEKHLISVCADNNHVRXWSVXRFRGMISXQPGSXPLASFKILALESADGHGGCSAGNDIAGGLXEQELMEQLEHCELAPPAPSAPSWGCLPSPSPRISLXSLHSASSNXSLSGHRGSPSPPQAEARRRGGGSFVERCQELVRSGPDLRRPPXPAPWPSSGLGXPLXPPKMKLNEXSF

SEQ ID NO: 25333 - protein, 129 aa, Homo sapiens
  MOD_RES (1)..(1): Any amino acid
  MOD_RES (10)..(10): Selenocysteine
  MOD_RES (12)..(12): Selenocysteine
  MOD_RES (19)..(19): Selenocysteine
  MOD_RES (40)..(40): Selenocysteine
  MOD_RES (44)..(44): Selenocysteine
  MOD_RES (52)..(52): Selenocysteine
  MOD_RES (57)..(57): Selenocysteine
  MOD_RES (112)..(112): Selenocysteine
  MOD_RES (125)..(125): Selenocysteine
  MOD_RES (128)..(128): Selenocysteine
XGSGPQLFQXFXVHRSPVXKIMLSEKHLISVCADNNHVRXWSVXRFRGMISXQPGSXPLASFKILALESADGHGGCSAGNDIGPYGERDDQQVFIQKVVPSASQLFVRLSSXGQRWPDGARADGXAGXL

SEQ ID NO: 25334 - protein, 299 aa, Homo sapiens
  MOD_RES (1)..(1): Any amino acid
  MOD_RES (36)..(36): Selenocysteine
  MOD_RES (43)..(43): Selenocysteine
  MOD_RES (46)..(46): Selenocysteine
  MOD_RES (56)..(56): Selenocysteine
  MOD_RES (60)..(60): Selenocysteine
  MOD_RES (68)..(68): Selenocysteine
  MOD_RES (73)..(73): Selenocysteine
  MOD_RES (128)..(128): Selenocysteine
  MOD_RES (143)..(144): Selenocysteine
  MOD_RES (147)..(147): Selenocysteine
  MOD_RES (167)..(167): Selenocysteine
  MOD_RES (180)..(181): Selenocysteine
  MOD_RES (195)..(195): Selenocysteine
  MOD_RES (231)..(231): Selenocysteine
  MOD_RES (240)..(240): Selenocysteine
  MOD_RES (283)..(283): Selenocysteine
  MOD_RES (294)..(294): Selenocysteine
  MOD_RES (297)..(297): Selenocysteine
XGSIYYVDVQKFPLRMKDNDLLVSELYRDPAEDGVXALSVYLXPKXICADNNHVRXWSVXRFRGMISXQPGSXPLASFKILALESADGHGGCSAGNDIGPYGERDDQQVFIQKVVPSASQLFVRLSSXGQRVCSVRSVDGSPXXAFXVLECEGSRRLGSRPRRYLLXGQANGSLAMWDLXXAMDGLGQAPAGGLXEQELMEQLEHCELAPPAPSAPSWGCLPSPSPRISLXSLHSASSNXSLSGHRGSPSPPQAEARRRGGGSFVERCQELVRSGPDLRRPPXPAPWPSSGLGXPLXPP

SEQ ID NO: 25335 - protein, 164 aa, Homo sapiens
  MOD_RES (1)..(1): Any amino acid
  MOD_RES (13)..(13): Selenocysteine
  MOD_RES (17)..(17): Selenocysteine
  MOD_RES (21)..(22): Selenocysteine
  MOD_RES (51)..(51): Selenocysteine
  MOD_RES (87)..(87): Selenocysteine
  MOD_RES (96)..(96): Selenocysteine
  MOD_RES (139)..(139): Selenocysteine
  MOD_RES (150)..(150): Selenocysteine
  MOD_RES (153)..(153): Selenocysteine
  MOD_RES (162)..(162): Selenocysteine
XQMGMAAAVLAMXLAPXVSGXXSKCSSRRWCPVPASSSCVSHLLGSAGGLXEQELMEQLEHCELAPPAPSAPSWGCLPSPSPRISLXSLHSASSNXSLSGHRGSPSPPQAEARRRGGGSFVERCQELVRSGPDLRRPPXPAPWPSSGLGXPLXPPKMKLNEXSF

SEQ ID NO: 25336 - protein, 143 aa, Homo sapiens
  MOD_RES (1)..(1): Any amino acid
  MOD_RES (2)..(2): Selenocysteine
  MOD_RES (30)..(30): Selenocysteine
  MOD_RES (66)..(66): Selenocysteine
  MOD_RES (75)..(75): Selenocysteine
  MOD_RES (118)..(118): Selenocysteine
  MOD_RES (129)..(129): Selenocysteine
  MOD_RES (132)..(132): Selenocysteine
  MOD_RES (141)..(141): Selenocysteine
XXSKCSSRRWCPVPASSSCVSHLLGSGGLXEQELMEQLEHCELAPPAPSAPSWGCLPSPSPRISLXSLHSASSNXSLSGHRGSPSPPQAEARRRGGGSFVERCQELVRSGPDLRRPPXPAPWPSSGLGXPLXPPKMKLNEXSF

SEQ ID NO: 25337 - protein, 372 aa, Homo sapiens
  MOD_RES (31)..(32): Selenocysteine
  MOD_RES (41)..(42): Selenocysteine
  MOD_RES (111)..(111): Selenocysteine
  MOD_RES (127)..(127): Selenocysteine
  MOD_RES (146)..(146): Selenocysteine
  MOD_RES (182)..(182): Selenocysteine
  MOD_RES (190)..(190): Selenocysteine
  MOD_RES (192)..(192): Selenocysteine
  MOD_RES (201)..(201): Selenocysteine
  MOD_RES (205)..(205): Selenocysteine
  MOD_RES (269)..(269): Selenocysteine
  MOD_RES (274)..(275): Selenocysteine
  MOD_RES (284)..(284): Selenocysteine
  MOD_RES (287)..(287): Selenocysteine
  MOD_RES (297)..(297): Selenocysteine
  MOD_RES (305)..(305): Selenocysteine
LDNLKKLRMLDLRHNKLREIPSVVYRLDSLXXLYLRFNRIXXVEKDIKNLSKLSMLSIRENKIKQLPAEIGNLSSLSRLGLRYNRLSAIPRSLAKCSALEELNLENNNISXLPESLLSSLVKLNSLXLARNCFQLYPVGGPSQFSXIYSLNMEHNRINKIPFGIFSRAKVLSKLNMKDNQLXSLPLDFGXWXSMVELNLAXNQLXKIPEDVSGLVSLEVLILSNNLLKKLPHGLGNLRKLRELDLEENKLESLPNEIAYLKDLQKLVLXNNQLXXLPRGIGHLXNLXHLGLGENLLXHLPEEIGXLENLEELYLNDNPNLHSLPFELALCSKLSIMSIENCPLSHLPPQIVAGGPSFIIQFLKMQGPYRAMV

SEQ ID NO: 25338 - protein, 582 aa, Homo sapiens
  MOD_RES (45)..(45): Selenocysteine
  MOD_RES (71)..(71): Selenocysteine
  MOD_RES (81)..(81): Selenocysteine
  MOD_RES (123)..(123): Selenocysteine
  MOD_RES (126)..(126): Selenocysteine
  MOD_RES (150)..(150): Selenocysteine
  MOD_RES (159)..(159): Selenocysteine
  MOD_RES (195)..(196): Selenocysteine
  MOD_RES (205)..(206): Selenocysteine
  MOD_RES (242)..(242): Selenocysteine
  MOD_RES (261)..(261): Selenocysteine
  MOD_RES (264)..(264): Selenocysteine
  MOD_RES (279)..(279): Selenocysteine
  MOD_RES (321)..(321): Selenocysteine
  MOD_RES (337)..(337): Selenocysteine
  MOD_RES (356)..(356): Selenocysteine
  MOD_RES (392)..(392): Selenocysteine
  MOD_RES (400)..(400): Selenocysteine
  MOD_RES (402)..(402): Selenocysteine
  MOD_RES (411)..(411): Selenocysteine
  MOD_RES (415)..(415): Selenocysteine
  MOD_RES (479)..(479): Selenocysteine
  MOD_RES (484)..(485): Selenocysteine
  MOD_RES (494)..(494): Selenocysteine
  MOD_RES (497)..(497): Selenocysteine
  MOD_RES (507)..(507): Selenocysteine
  MOD_RES (515)..(515): Selenocysteine
MSSSLGKEKDSKEKDPKVPSAKEREKEAKASGGFGKESKEKEPKXKGKDAKDGKKDSSAAQPGVAFSVDNXIKRPNPAPGXRKKSSNAEVIKELNKCREENSMRLDLSKRSIHILPSSIKELXQLXELYLYSNKLQSLPAEVGCLVNLMXLALSENSLXSLPDSLDNLKKLRMLDLRHNKLREIPSVVYRLDSLXXLYLRFNRIXXVEKDIKNLSKLSMLSIRENKIKQLPAEIGELCNLIXLDVAHNQLEHLPKEIGNCXQIXNLDLQHNELLDLPDXIGNLSSLSRLGLRYNRLSAIPRSLAKCSALEELNLENNNISXLPESLLSSLVKLNSLXLARNCFQLYPVGGPSQFSXIYSLNMEHNRINKIPFGIFSRAKVLSKLNMKDNQLXSLPLDFGXWXSMVELNLAXNQLXKIPEDVSGLVSLEVLILSNNLLKKLPHGLGNLRKLRELDLEENKLESLPNEIAYLKDLQKLVLXNNQLXXLPRGIGHLXNLXHLGLGENLLXHLPEEIGXLENLEELYLNDNPNLHSLPFELALCSKLSIMSIENCPLSHLPPQIVAGGPSFIIQFLKMQGPYRAMV

SEQ ID NO: 25339 - protein, 536 aa, Homo sapiens
  MOD_RES (45)..(45): Selenocysteine
  MOD_RES (71)..(71): Selenocysteine
  MOD_RES (81)..(81): Selenocysteine
  MOD_RES (123)..(123): Selenocysteine
  MOD_RES (126)..(126): Selenocysteine
  MOD_RES (150)..(150): Selenocysteine
  MOD_RES (159)..(159): Selenocysteine
  MOD_RES (195)..(196): Selenocysteine
  MOD_RES (205)..(206): Selenocysteine
  MOD_RES (275)..(275): Selenocysteine
  MOD_RES (291)..(291): Selenocysteine
  MOD_RES (310)..(310): Selenocysteine
  MOD_RES (346)..(346): Selenocysteine
  MOD_RES (354)..(354): Selenocysteine
  MOD_RES (356)..(356): Selenocysteine
  MOD_RES (365)..(365): Selenocysteine
  MOD_RES (369)..(369): Selenocysteine
  MOD_RES (433)..(433): Selenocysteine
  MOD_RES (438)..(439): Selenocysteine
  MOD_RES (448)..(448): Selenocysteine
  MOD_RES (451)..(451): Selenocysteine
  MOD_RES (461)..(461): Selenocysteine
  MOD_RES (469)..(469): Selenocysteine
MSSSLGKEKDSKEKDPKVPSAKEREKEAKASGGFGKESKEKEPKXKGKDAKDGKKDSSAAQPGVAFSVDNXIKRPNPAPGXRKKSSNAEVIKELNKCREENSMRLDLSKRSIHILPSSIKELXQLXELYLYSNKLQSLPAEVGCLVNLMXLALSENSLXSLPDSLDNLKKLRMLDLRHNKLREIPSVVYRLDSLXXLYLRFNRIXXVEKDIKNLSKLSMLSIRENKIKQLPAEIGNLSSLSRLGLRYNRLSAIPRSLAKCSALEELNLENNNISXLPESLLSSLVKLNSLXLARNCFQLYPVGGPSQFSXIYSLNMEHNRINKIPFGIFSRAKVLSKLNMKDNQLXSLPLDFGXWXSMVELNLAXNQLXKIPEDVSGLVSLEVLILSNNLLKKLPHGLGNLRKLRELDLEENKLESLPNEIAYLKDLQKLVLXNNQLXXLPRGIGHLXNLXHLGLGENLLXHLPEEIGXLENLEELYLNDNPNLHSLPFELALCSKLSIMSIENCPLSHLPPQIVAGGPSFIIQFLKMQGPYRAMV

SEQ ID NO: 25340 - protein, 225 aa, Homo sapiens
  MOD_RES (5)..(5): Selenocysteine
  MOD_RES (34)..(34): Selenocysteine
  MOD_RES (51)..(51): Selenocysteine
  MOD_RES (60)..(60): Selenocysteine
  MOD_RES (87)..(87): Selenocysteine
  MOD_RES (113)..(113): Selenocysteine
  MOD_RES (122)..(122): Selenocysteine
  MOD_RES (125)..(125): Selenocysteine
  MOD_RES (139)..(139): Selenocysteine
  MOD_RES (187)..(187): Selenocysteine
MEELXAFVSKSFDQKSKDGNGGGGGGGGKKDSIXYREVLESGLARSRELGXSDSSLQDIXEGGGHCPVHLFKDHVDNDKEKLKEFGXARVAEGIYECKEKREDVKSEDEDGQXKLKQRRSRXNFXLEQLNELERLFDEXHYPDAFMREELSQRLGLSEARVQVWFQNRRAKCRKQENQMHKGVILGXANHLDACRVAPYVNMGALRMPFQQMEFCSCRPGWSIMA

SEQ ID NO: 25341 - protein, 292 aa, Homo sapiens
  MOD_RES (5)..(5): Selenocysteine
  MOD_RES (34)..(34): Selenocysteine
  MOD_RES (51)..(51): Selenocysteine
  MOD_RES (60)..(60): Selenocysteine
  MOD_RES (87)..(87): Selenocysteine
  MOD_RES (113)..(113): Selenocysteine
  MOD_RES (122)..(122): Selenocysteine
  MOD_RES (125)..(125): Selenocysteine
  MOD_RES (139)..(139): Selenocysteine
  MOD_RES (187)..(187): Selenocysteine
MEELXAFVSKSFDQKSKDGNGGGGGGGGKKDSIXYREVLESGLARSRELGXSDSSLQDIXEGGGHCPVHLFKDHVDNDKEKLKEFGXARVAEGIYECKEKREDVKSEDEDGQXKLKQRRSRXNFXLEQLNELERLFDEXHYPDAFMREELSQRLGLSEARVQVWFQNRRAKCRKQENQMHKGVILGXANHLDACRVAPYVNMGALRMPFQQVQAQLQLEGVAHAHPHLHPHLAAHAPYLMFPPPPFGLPIASLAESASAAAVVAAAAKSNSKNSSIADLRLKARKHAEALGL

SEQ ID NO: 25342 - protein, 190 aa, Homo sapiens
  MOD_RES (7)..(7): Selenocysteine
  MOD_RES (16)..(16): Selenocysteine
  MOD_RES (19)..(19): Selenocysteine
  MOD_RES (33)..(33): Selenocysteine
  MOD_RES (147)..(147): Selenocysteine
  MOD_RES (167)..(168): Selenocysteine
MEDEGQXKIKQRRSRXNFXLEQLNELERLFDEXHYPDAFMREELSQRLGLSEARVQVWFQNRRAKCRKQENQLHKGVLIGAASQFEACRVAPYVNVGALRMPFQQVQAQLQLDSAVAHAHHHLHPHLAAHAPYMMFPAPPFGLPLAXLAADSASAASVVAAAAAAKXXSKNSSIADLRLKAKKHAAALGL

SEQ ID NO: 25343 - protein, 355 aa, Homo sapiens
  MOD_RES (5)..(5): Selenocysteine
  MOD_RES (24)..(24): Selenocysteine
  MOD_RES (41)..(41): Selenocysteine
  MOD_RES (44)..(44): Selenocysteine
  MOD_RES (114)..(114): Selenocysteine
  MOD_RES (121)..(121): Selenocysteine
  MOD_RES (128)..(128): Selenocysteine
  MOD_RES (160)..(160): Selenocysteine
  MOD_RES (169)..(169): Selenocysteine
  MOD_RES (172)..(172): Selenocysteine
  MOD_RES (186)..(186): Selenocysteine
  MOD_RES (265)..(265): Selenocysteine
  MOD_RES (312)..(312): Selenocysteine
  MOD_RES (332)..(333): Selenocysteine
MEELXAFVSKSFDQKVKEKKEAIXYREVLESGPLRGAKEPXGCXEAGRDDRSSPAVRAAGGGGGGGGGGGGGGGGGGVGGGGAGGGAGGGRSPVRELDMGAAERSREPGSPRLXEGRRKPXKAEVQAXLLLPGEAFRFLVSPELKDRKEDAKGMEDEGQXKIKQRRSRXNFXLEQLNELERLFDEXHYPDAFMREELSQRLGLSEARVQVWFQNRRAKCRKQENQLHKGVLIGAASQFEACRVAPYVNVGALRMPFQQDSHCNVXPLSFQVQAQLQLDSAVAHAHHHLHPHLAAHAPYMMFPAPPFGLPLAXLAADSASAASVVAAAAAAKXXSKNSSIADLRLKAKKHAAALGL

SEQ ID NO: 25344 - protein, 331 aa, Homo sapiens
  MOD_RES (5)..(5): Selenocysteine
  MOD_RES (24)..(24): Selenocysteine
  MOD_RES (41)..(41): Selenocysteine
  MOD_RES (44)..(44): Selenocysteine
  MOD_RES (114)..(114): Selenocysteine
  MOD_RES (136)..(136): Selenocysteine
  MOD_RES (145)..(145): Selenocysteine
  MOD_RES (148)..(148): Selenocysteine
  MOD_RES (162)..(162): Selenocysteine
  MOD_RES (241)..(241): Selenocysteine
  MOD_RES (288)..(288): Selenocysteine
  MOD_RES (308)..(309): Selenocysteine
MEELXAFVSKSFDQKVKEKKEAIXYREVLESGPLRGAKEPXGCXEAGRDDRSSPAVRAAGGGGGGGGGGGGGGGGGGVGGGGAGGGAGGGRSPVRELDMGAAERSREPGSPRLXEVSPELKDRKEDAKGMEDEGQXKIKQRRSRXNFXLEQLNELERLFDEXHYPDAFMREELSQRLGLSEARVQVWFQNRRAKCRKQENQLHKGVLIGAASQFEACRVAPYVNVGALRMPFQQDSHCNVXPLSFQVQAQLQLDSAVAHAHHHLHPHLAAHAPYMMFPAPPFGLPLAXLAADSASAASVVAAAAAAKXXSKNSSIADLRLKAKKHAAALGL

SEQ ID NO: 25345 - protein, 319 aa, Homo sapiens
  MOD_RES (5)..(5): Selenocysteine
  MOD_RES (24)..(24): Selenocysteine
  MOD_RES (41)..(41): Selenocysteine
  MOD_RES (44)..(44): Selenocysteine
  MOD_RES (114)..(114): Selenocysteine
  MOD_RES (136)..(136): Selenocysteine
  MOD_RES (145)..(145): Selenocysteine
  MOD_RES (148)..(148): Selenocysteine
  MOD_RES (162)..(162): Selenocysteine
  MOD_RES (276)..(276): Selenocysteine
  MOD_RES (296)..(297): Selenocysteine
MEELXAFVSKSFDQKVKEKKEAIXYREVLESGPLRGAKEPXGCXEAGRDDRSSPAVRAAGGGGGGGGGGGGGGGGGGVGGGGAGGGAGGGRSPVRELDMGAAERSREPGSPRLXEVSPELKDRKEDAKGMEDEGQXKIKQRRSRXNFXLEQLNELERLFDEXHYPDAFMREELSQRLGLSEARVQVWFQNRRAKCRKQENQLHKGVLIGAASQFEACRVAPYVNVGALRMPFQQVQAQLQLDSAVAHAHHHLHPHLAAHAPYMMFPAPPFGLPLAXLAADSASAASVVAAAAAAKXXSKNSSIADLRLKAKKHAAALGL

SEQ ID NO: 25346 - protein, 147 aa, Homo sapiens
  MOD_RES (1)..(1): Any amino acid
  MOD_RES (11)..(11): Selenocysteine
  MOD_RES (18)..(18): Selenocysteine
  MOD_RES (25)..(25): Selenocysteine
  MOD_RES (57)..(57): Selenocysteine
  MOD_RES (66)..(66): Selenocysteine
  MOD_RES (69)..(69): Selenocysteine
  MOD_RES (83)..(83): Selenocysteine
XEKQGAGQPAXDGGRKPXKAEVQAXLLLPGEAFRFLVSPELKDRKEDAKGMEDEGQXKIKQRRSRXNFXLEQLNELERLFDEXHYPDAFMREELSQRLGLSEARVQVWFQNRRAKCRKQENQLHKGVLIGAASQFEACRVAPYVNVG

SEQ ID NO: 25347 - protein, 456 aa, Homo sapiens
  MOD_RES (14)..(14): Selenocysteine
  MOD_RES (34)..(34): Selenocysteine
  MOD_RES (78)..(78): Selenocysteine
  MOD_RES (88)..(88): Selenocysteine
  MOD_RES (96)..(96): Selenocysteine
  MOD_RES (114)..(114): Selenocysteine
  MOD_RES (125)..(126): Selenocysteine
  MOD_RES (128)..(128): Selenocysteine
  MOD_RES (134)..(134): Selenocysteine
  MOD_RES (187)..(187): Selenocysteine
  MOD_RES (273)..(273): Selenocysteine
  MOD_RES (298)..(298): Selenocysteine
  MOD_RES (394)..(394): Selenocysteine
  MOD_RES (398)..(399): Selenocysteine
  MOD_RES (403)..(403): Selenocysteine
  MOD_RES (429)..(429): Selenocysteine
  MOD_RES (434)..(434): Selenocysteine
MNSSDEEKQLQLIXSLKEQAIGEYEDLRAENQKXKEKCDKIRQERDEAVKKLEEFQKISHMVIEEVNFMQNHLEIEKXCRESAEALAXKLNKENKXLKRISMLYMAKLGPDVIXEEINIDDEDSXXDXDGAAEXCVSVQCQKQIKELRDQIVSVQEEKKILAIELENLKSKLVEVIEEVNKVKQEKXVLNSEVLEQRKVLEKCNRVSMLAVEEYEEMQVNLELEKDLRKKAESFAQEMFIEQNKLKRQSHLLLQSSIPDQQLLKALDENAKLXQQLEEERIQHQQKVKELEEQLENEXLHKEIHNLKQQLELLEEDKKELELKYQNSEEKARNLKHSVDELQKRVNQSENSVPPPPPPPPPLPPPPPNPIRSLMSMIRKRSHPSGSGAKKEKAXQPEXXEEVXDLKRQAVEEMMDRIKKGVHLRPVNQXARPKXKPESSKGCESAVDELKGILASQ

SEQ ID NO: 25348 - protein, 558 aa, Homo sapiens
  MOD_RES (14)..(14): Selenocysteine
  MOD_RES (34)..(34): Selenocysteine
  MOD_RES (78)..(78): Selenocysteine
  MOD_RES (88)..(88): Selenocysteine
  MOD_RES (96)..(96): Selenocysteine
  MOD_RES (114)..(114): Selenocysteine
  MOD_RES (125)..(126): Selenocysteine
  MOD_RES (128)..(128): Selenocysteine
  MOD_RES (134)..(134): Selenocysteine
  MOD_RES (187)..(187): Selenocysteine
  MOD_RES (273)..(273): Selenocysteine
  MOD_RES (298)..(298): Selenocysteine
  MOD_RES (394)..(394): Selenocysteine
  MOD_RES (398)..(399): Selenocysteine
  MOD_RES (403)..(403): Selenocysteine
  MOD_RES (429)..(429): Selenocysteine
  MOD_RES (434)..(434): Selenocysteine
  MOD_RES (455)..(455): Selenocysteine
  MOD_RES (460)..(460): Selenocysteine
  MOD_RES (475)..(475): Selenocysteine
  MOD_RES (487)..(487): Selenocysteine
  MOD_RES (496)..(496): Selenocysteine
  MOD_RES (501)..(501): Selenocysteine
  MOD_RES (517)..(517): Selenocysteine
  MOD_RES (519)..(519): Selenocysteine
  MOD_RES (525)..(525): Selenocysteine
  MOD_RES (537)..(537): Selenocysteine
  MOD_RES (551)..(551): Selenocysteine
  MOD_RES (556)..(556): Selenocysteine
MNSSDEEKQLQLIXSLKEQAIGEYEDLRAENQKXKEKCDKIRQERDEAVKKLEEFQKISHMVIEEVNFMQNHLEIEKXCRESAEALAXKLNKENKXLKRISMLYMAKLGPDVIXEEINIDDEDSXXDXDGAAEXCVSVQCQKQIKELRDQIVSVQEEKKILAIELENLKSKLVEVIEEVNKVKQEKXVLNSEVLEQRKVLEKCNRVSMLAVEEYEEMQVNLELEKDLRKKAESFAQEMFIEQNKLKRQSHLLLQSSIPDQQLLKALDENAKLXQQLEEERIQHQQKVKELEEQLENEXLHKEIHNLKQQLELLEEDKKELELKYQNSEEKARNLKHSVDELQKRVNQSENSVPPPPPPPPPLPPPPPNPIRSLMSMIRKRSHPSGSGAKKEKAXQPEXXEEVXDLKRQAVEEMMDRIKKGVHLRPVNQXARPKXKPESSKGCESAVDELKGILGXLNKSXSSRSLKSLDPENSEXELERILRRRKVXAEADSSSPXGILAXSESKSMPVLGSVSSVXKXALNKKXLEAEFNSPSPPXPEPGEGPRKLEGCXSSKVXFQ

SEQ ID NO: 25349 - protein, 631 aa, Homo sapiens
  MOD_RES (14)..(14): Selenocysteine
  MOD_RES (34)..(34): Selenocysteine
  MOD_RES (78)..(78): Selenocysteine
  MOD_RES (88)..(88): Selenocysteine
  MOD_RES (96)..(96): Selenocysteine
  MOD_RES (114)..(114): Selenocysteine
  MOD_RES (125)..(126): Selenocysteine
  MOD_RES (128)..(128): Selenocysteine
  MOD_RES (134)..(134): Selenocysteine
  MOD_RES (187)..(187): Selenocysteine
  MOD_RES (273)..(273): Selenocysteine
  MOD_RES (298)..(298): Selenocysteine
  MOD_RES (394)..(394): Selenocysteine
  MOD_RES (398)..(399): Selenocysteine
  MOD_RES (403)..(403): Selenocysteine
  MOD_RES (429)..(429): Selenocysteine
  MOD_RES (434)..(434): Selenocysteine
  MOD_RES (455)..(455): Selenocysteine
  MOD_RES (460)..(460): Selenocysteine
  MOD_RES (475)..(475): Selenocysteine
  MOD_RES (487)..(487): Selenocysteine
  MOD_RES (496)..(496): Selenocysteine
  MOD_RES (501)..(501): Selenocysteine
  MOD_RES (517)..(517): Selenocysteine
  MOD_RES (519)..(519): Selenocysteine
  MOD_RES (525)..(525): Selenocysteine
  MOD_RES (537)..(537): Selenocysteine
  MOD_RES (551)..(551): Selenocysteine
  MOD_RES (556)..(556): Selenocysteine
  MOD_RES (587)..(587): Selenocysteine
  MOD_RES (592)..(592): Selenocysteine
  MOD_RES (602)..(602): Selenocysteine
  MOD_RES (626)..(626): Selenocysteine
MNSSDEEKQLQLIXSLKEQAIGEYEDLRAENQKXKEKCDKIRQERDEAVKKLEEFQKISHMVIEEVNFMQNHLEIEKXCRESAEALAXKLNKENKXLKRISMLYMAKLGPDVIXEEINIDDEDSXXDXDGAAEXCVSVQCQKQIKELRDQIVSVQEEKKILAIELENLKSKLVEVIEEVNKVKQEKXVLNSEVLEQRKVLEKCNRVSMLAVEEYEEMQVNLELEKDLRKKAESFAQEMFIEQNKLKRQSHLLLQSSIPDQQLLKALDENAKLXQQLEEERIQHQQKVKELEEQLENEXLHKEIHNLKQQLELLEEDKKELELKYQNSEEKARNLKHSVDELQKRVNQSENSVPPPPPPPPPLPPPPPNPIRSLMSMIRKRSHPSGSGAKKEKAXQPEXXEEVXDLKRQAVEEMMDRIKKGVHLRPVNQXARPKXKPESSKGCESAVDELKGILGXLNKSXSSRSLKSLDPENSEXELERILRRRKVXAEADSSSPXGILAXSESKSMPVLGSVSSVXKXALNKKXLEAEFNSPSPPXPEPGEGPRKLEGCXSSKVXFQPPSSIGCRKKYIDGEKQAEPVVVLDPVSXHEPQXKDQVAEKDPXQHKEDEGEIQPENKEDSIENVREXDSSNC

SEQ ID NO: 25350 - protein, 571 aa, Homo sapiens
  MOD_RES (18)..(18): Selenocysteine
  MOD_RES (28)..(28): Selenocysteine
  MOD_RES (36)..(36): Selenocysteine
  MOD_RES (54)..(54): Selenocysteine
  MOD_RES (65)..(66): Selenocysteine
  MOD_RES (68)..(68): Selenocysteine
  MOD_RES (74)..(74): Selenocysteine
  MOD_RES (127)..(127): Selenocysteine
  MOD_RES (213)..(213): Selenocysteine
  MOD_RES (238)..(238): Selenocysteine
  MOD_RES (334)..(334): Selenocysteine
  MOD_RES (338)..(339): Selenocysteine
  MOD_RES (343)..(343): Selenocysteine
  MOD_RES (369)..(369): Selenocysteine
  MOD_RES (374)..(374): Selenocysteine
  MOD_RES (395)..(395): Selenocysteine
  MOD_RES (400)..(400): Selenocysteine
  MOD_RES (415)..(415): Selenocysteine
  MOD_RES (427)..(427): Selenocysteine
  MOD_RES (436)..(436): Selenocysteine
  MOD_RES (441)..(441): Selenocysteine
  MOD_RES (457)..(457): Selenocysteine
  MOD_RES (459)..(459): Selenocysteine
  MOD_RES (465)..(465): Selenocysteine
  MOD_RES (477)..(477): Selenocysteine
  MOD_RES (491)..(491): Selenocysteine
  MOD_RES (496)..(496): Selenocysteine
  MOD_RES (527)..(527): Selenocysteine
  MOD_RES (532)..(532): Selenocysteine
  MOD_RES (542)..(542): Selenocysteine
  MOD_RES (566)..(566): Selenocysteine
MVIEEVNFMQNHLEIEKXCRESAEALAXKLNKENKXLKRISMLYMAKLGPDVIXEEINIDDEDSXXDXDGAAEXCVSVQCQKQIKELRDQIVSVQEEKKILAIELENLKSKLVEVIEEVNKVKQEKXVLNSEVLEQRKVLEKCNRVSMLAVEEYEEMQVNLELEKDLRKKAESFAQEMFIEQNKLKRQSHLLLQSSIPDQQLLKALDENAKLXQQLEEERIQHQQKVKELEEQLENEXLHKEIHNLKQQLELLEEDKKELELKYQNSEEKARNLKHSVDELQKRVNQSENSVPPPPPPPPPLPPPPPNPIRSLMSMIRKRSHPSGSGAKKEKAXQPEXXEEVXDLKRQAVEEMMDRIKKGVHLRPVNQXARPKXKPESSKGCESAVDELKGILGXLNKSXSSRSLKSLDPENSEXELERILRRRKVXAEADSSSPXGILAXSESKSMPVLGSVSSVXKXALNKKXLEAEFNSPSPPXPEPGEGPRKLEGCXSSKVXFQPPSSIGCRKKYIDGEKQAEPVVVLDPVSXHEPQXKDQVAEKDPXQHKEDEGEIQPENKEDSIENVREXDSSNC

SEQ ID NO: 25351 - protein, 98 aa, Homo sapiens
  MOD_RES (5)..(5): Selenocysteine
  MOD_RES (7)..(7): Selenocysteine
  MOD_RES (11)..(11): Selenocysteine
  MOD_RES (13)..(13): Selenocysteine
  MOD_RES (26)..(26): Selenocysteine
  MOD_RES (28)..(29): Selenocysteine
  MOD_RES (70)..(70): Selenocysteine
  MOD_RES (74)..(74): Selenocysteine
MSRQXAXALPXGXSKCPPSQRVPALXGXXASNNDLASLFECPVCFDYVLPPILQCQSGHLVCSNCRPKLXCCPXCRGPLGSIRNLAMEKVANSVLFPC

SEQ ID NO: 25352 - protein, 282 aa, Homo sapiens
  MOD_RES (5)..(5): Selenocysteine
  MOD_RES (7)..(7): Selenocysteine
  MOD_RES (11)..(11): Selenocysteine
  MOD_RES (13)..(13): Selenocysteine
  MOD_RES (26)..(26): Selenocysteine
  MOD_RES (28)..(29): Selenocysteine
  MOD_RES (70)..(70): Selenocysteine
  MOD_RES (74)..(74): Selenocysteine
  MOD_RES (108)..(108): Selenocysteine
  MOD_RES (112)..(112): Selenocysteine
  MOD_RES (156)..(157): Selenocysteine
  MOD_RES (168)..(168): Selenocysteine
  MOD_RES (214)..(214): Selenocysteine
  MOD_RES (235)..(235): Selenocysteine
  MOD_RES (239)..(239): Selenocysteine
  MOD_RES (249)..(249): Selenocysteine
  MOD_RES (261)..(261): Selenocysteine
  MOD_RES (278)..(278): Selenocysteine
MSRQXAXALPXGXSKCPPSQRVPALXGXXASNNDLASLFECPVCFDYVLPPILQCQSGHLVCSNCRPKLXCCPXCRGPLGSIRNLAMEKVANSVLFPCKYASSGCEIXLPHXEKADHEELCEFRPYSCPCPGASCKWQGSLDAVMPHLMHQHKSIXXLQGEDIVFLAXDINLPGAVDWVMMQSCFGFHFMLVLEKQEKYDGHQQFFAIVQLIGXRKQAENFAYRLELNGHRRRLXWEAXPRSIHEGIAXAIMNSDCLVFDXSIAQLFAENGNLGINVXISMC

SEQ ID NO: 25353 - protein, 313 aa, Homo sapiens
  MOD_RES (2)..(2): Selenocysteine
  MOD_RES (6)..(6): Selenocysteine
  MOD_RES (19)..(19): Selenocysteine
  MOD_RES (26)..(26): Selenocysteine
  MOD_RES (36)..(36): Selenocysteine
  MOD_RES (38)..(38): Selenocysteine
  MOD_RES (42)..(42): Selenocysteine
  MOD_RES (44)..(44): Selenocysteine
  MOD_RES (57)..(57): Selenocysteine
  MOD_RES (59)..(60): Selenocysteine
  MOD_RES (101)..(101): Selenocysteine
  MOD_RES (105)..(105): Selenocysteine
  MOD_RES (139)..(139): Selenocysteine
  MOD_RES (143)..(143): Selenocysteine
  MOD_RES (187)..(188): Selenocysteine
  MOD_RES (199)..(199): Selenocysteine
  MOD_RES (245)..(245): Selenocysteine
  MOD_RES (266)..(266): Selenocysteine
  MOD_RES (270)..(270): Selenocysteine
  MOD_RES (280)..(280): Selenocysteine
  MOD_RES (292)..(292): Selenocysteine
  MOD_RES (309)..(309): Selenocysteine
MXGKAXPPSLYSWRGVLFXCLPAARXRKRKEMSRQXAXALPXGXSKCPPSQRVPALXGXXASNNDLASLFECPVCFDYVLPPILQCQSGHLVCSNCRPKLXCCPXCRGPLGSIRNLAMEKVANSVLFPCKYASSGCEIXLPHXEKADHEELCEFRPYSCPCPGASCKWQGSLDAVMPHLMHQHKSIXXLQGEDIVFLAXDINLPGAVDWVMMQSCFGFHFMLVLEKQEKYDGHQQFFAIVQLIGXRKQAENFAYRLELNGHRRRLXWEAXPRSIHEGIAXAIMNSDCLVFDXSIAQLFAENGNLGINVXISMC

SEQ ID NO: 25354 - protein, 83 aa, Homo sapiens
  MOD_RES (16)..(17): Selenocysteine
  MOD_RES (22)..(22): Selenocysteine
  MOD_RES (26)..(26): Selenocysteine
  MOD_RES (70)..(71): Selenocysteine
  MOD_RES (82)..(82): Selenocysteine
MEKVASAVLFPCKYAXXGCSLXLHHXEKPEHEDICEYRPYSCPCPGASCKWQGSLEAVMSHLMHAHKSIXXLQGEDIVFLAXD

SEQ ID NO: 25355 - protein, 324 aa, Homo sapiens
  MOD_RES (7)..(7): Selenocysteine
  MOD_RES (26)..(26): Selenocysteine
  MOD_RES (37)..(37): Selenocysteine
  MOD_RES (75)..(75): Selenocysteine
  MOD_RES (113)..(113): Selenocysteine
  MOD_RES (119)..(119): Selenocysteine
  MOD_RES (142)..(143): Selenocysteine
  MOD_RES (148)..(148): Selenocysteine
  MOD_RES (152)..(152): Selenocysteine
  MOD_RES (196)..(197): Selenocysteine
  MOD_RES (208)..(208): Selenocysteine
  MOD_RES (254)..(254): Selenocysteine
  MOD_RES (275)..(275): Selenocysteine
  MOD_RES (279)..(279): Selenocysteine
  MOD_RES (301)..(301): Selenocysteine
  MOD_RES (318)..(318): Selenocysteine
  MOD_RES (321)..(321): Selenocysteine
MSRPSSXGPSANKPCSKQPPPQPQHXPSPAAPPAAAXISAAGPGSSAVPAAAAVISGPGGGGGAGPVSPQHHELXSLFECPVCFDYVLPPILQCQAGHLVCNQCRQKLSCCPXCRGALXPSIRNLAMEKVASAVLFPCKYAXXGCSLXLHHXEKPEHEDICEYRPYSCPCPGASCKWQGSLEAVMSHLMHAHKSIXXLQGEDIVFLAXDINLPGAVDWVMMQSCFGHHFMLVLEKQEKYEGHQQFFAIVLLIGXRKQAENFAYRLELNGNRRRLXWEAXPRSIHDGVAAAIMNSDCLVFDXAIAHLFADNGNLGINVXISXCCP

SEQ ID NO: 25356 - protein, 189 aa, Homo sapiens
  MOD_RES (10)..(10): Selenocysteine
  MOD_RES (26)..(26): Selenocysteine
  MOD_RES (53)..(53): Selenocysteine
  MOD_RES (149)..(149): Selenocysteine
  MOD_RES (156)..(156): Selenocysteine
  MOD_RES (180)..(180): Selenocysteine
MGPSPAPSRXSASPPSLFRELALQAXWLRCWPPSWSCWPCCWPPCSMSSAVSXCCSDGKLYDAYVSYSDCPEDRKFVNFILKPQLERRRGYKLFLDDRDLLPRAEPSADLLVNLSRCRRLIVVLSDAFLSRAWCSHSFREGLCRLLELXRRPIFIXFEGQRRDPAHPALRLLRQHRHLVXLLLWRPGSV

SEQ ID NO: 25357 - protein, 143 aa, Homo sapiens
  MOD_RES (33)..(33): Selenocysteine
MPGVCDRAPDFLSPSEDQVLRPALGSSVALNCXAWVVSGPHCSLPSVQWLKDGLPLGIGGHYSLHEYSWPYKPRGCGAGLPPGPAGPAAGRPALCQVPSQRAALVPGRVWGGGDKRDCPEDRKFVNFILKPQLERRRGYKLFL

SEQ ID NO: 25358 - protein, 410 aa, Homo sapiens
  MOD_RES (33)..(33): Selenocysteine
  MOD_RES (88)..(88): Selenocysteine
  MOD_RES (90)..(90): Selenocysteine
  MOD_RES (97)..(97): Selenocysteine
  MOD_RES (109)..(109): Selenocysteine
  MOD_RES (116)..(116): Selenocysteine
  MOD_RES (253)..(253): Selenocysteine
  MOD_RES (260)..(260): Selenocysteine
  MOD_RES (284)..(284): Selenocysteine
  MOD_RES (294)..(294): Selenocysteine
  MOD_RES (322)..(322): Selenocysteine
  MOD_RES (372)..(372): Selenocysteine
  MOD_RES (399)..(399): Selenocysteine
MPGVCDRAPDFLSPSEDQVLRPALGSSVALNCXAWVVSGPHCSLPSVQWLKDGLPLGIGGHYSLHEYSWVKANLSEVLVSSVLGVNVXSXEVYGAFXCSIQNISFSSFXLQRAGPXSHVAAVLASLLVLLALLLAALLYVKCRLNVLLWYQDAYGEVEINDGKLYDAYVSYSDCPEDRKFVNFILKPQLERRRGYKLFLDDRDLLPRAEPSADLLVNLSRCRRLIVVLSDAFLSRAWCSHSFREGLCRLLELXRRPIFIXFEGQRRDPAHPALRLLRQHRHLVXLLLWRPGSVXPSSDFWKEVQLALPRKVQYRPVEGDPQXQLQDDKDPMLILRGRVPEGRALDSEVDPDPEGDLGVRGPVFGEPSAPPHXSGVSLGESRSSEVDVSDLGSRNYSARXDFYCLVSKDDM

SEQ ID NO: 25359 - protein, 504 aa, Homo sapiens
  MOD_RES (33)..(33): Selenocysteine
  MOD_RES (88)..(88): Selenocysteine
  MOD_RES (90)..(90): Selenocysteine
  MOD_RES (97)..(97): Selenocysteine
  MOD_RES (109)..(109): Selenocysteine
  MOD_RES (116)..(116): Selenocysteine
  MOD_RES (253)..(253): Selenocysteine
  MOD_RES (260)..(260): Selenocysteine
  MOD_RES (284)..(284): Selenocysteine
  MOD_RES (294)..(294): Selenocysteine
  MOD_RES (322)..(322): Selenocysteine
  MOD_RES (366)..(366): Selenocysteine
  MOD_RES (381)..(381): Selenocysteine
  MOD_RES (415)..(415): Selenocysteine
  MOD_RES (423)..(423): Selenocysteine
  MOD_RES (466)..(466): Selenocysteine
MPGVCDRAPDFLSPSEDQVLRPALGSSVALNCXAWVVSGPHCSLPSVQWLKDGLPLGIGGHYSLHEYSWVKANLSEVLVSSVLGVNVXSXEVYGAFXCSIQNISFSSFXLQRAGPXSHVAAVLASLLVLLALLLAALLYVKCRLNVLLWYQDAYGEVEINDGKLYDAYVSYSDCPEDRKFVNFILKPQLERRRGYKLFLDDRDLLPRAEPSADLLVNLSRCRRLIVVLSDAFLSRAWCSHSFREGLCRLLELXRRPIFIXFEGQRRDPAHPALRLLRQHRHLVXLLLWRPGSVXPSSDFWKEVQLALPRKVQYRPVEGDPQXQLQDDKDPMLILRGRVPEGRALDSEVDPDPEGDLGMPAQPHSPXGEAQHRAEWGQAQGXGPGGAPGVEDSSRHREPLHGLCPGGARPSVCLGXSWASQAIXAGGEQGQPLAVGLGQGCGWPPQASRSPHPRCPGACLWRAISSXAHQWGLAGREPEQRSGRLGSRLAKLQCPHRLLLPGVQG

SEQ ID NO: 25360 - protein, 57 aa, Homo sapiens
  MOD_RES (13)..(13): Selenocysteine
  MOD_RES (44)..(44): Selenocysteine
MRQASWCHQGWAXGVCDRAPDFLSPSEDQVLRPALGSSVALNCXAWVVSGPHCSLPS

SEQ ID NO: 25361 - protein, 130 aa, Homo sapiens
  MOD_RES (17)..(17): Selenocysteine
  MOD_RES (32)..(32): Selenocysteine
  MOD_RES (66)..(66): Selenocysteine
  MOD_RES (74)..(74): Selenocysteine
  MOD_RES (92)..(92): Selenocysteine
  MOD_RES (119)..(119): Selenocysteine
PDPEGDLGMPAQPHSPXGEAQHRAEWGQAQGXGPGGAPGVEDSSRHREPLHGLCPGGARPSVCLGXSWASQAIXAGGVRGPVFGEPSAPPHXSGVSLGESRSSEVDVSDLGSRNYSARXDFYCLVSKDDM

SEQ ID NO: 25362 - protein, 142 aa, Homo sapiens
  MOD_RES (1)..(1): Any amino acid
  MOD_RES (5)..(5): Selenocysteine
  MOD_RES (26)..(26): Selenocysteine
  MOD_RES (54)..(54): Selenocysteine
  MOD_RES (104)..(104): Selenocysteine
  MOD_RES (131)..(131): Selenocysteine
XPLPXPHRGAFGRLPEPGLVQPQLPXPSSDFWKEVQLALPRKVQYRPVEGDPQXQLQDDKDPMLILRGRVPEGRALDSEVDPDPEGDLGVRGPVFGEPSAPPHXSGVSLGESRSSEVDVSDLGSRNYSARXDFYCLVSKDDM

SEQ ID NO: 25363 - protein, 401 aa, Homo sapiens
  MOD_RES (42)..(42): Selenocysteine
  MOD_RES (53)..(53): Selenocysteine
  MOD_RES (97)..(97): Selenocysteine
  MOD_RES (109)..(109): Selenocysteine
  MOD_RES (119)..(119): Selenocysteine
  MOD_RES (129)..(129): Selenocysteine
  MOD_RES (140)..(140): Selenocysteine
  MOD_RES (152)..(152): Selenocysteine
  MOD_RES (158)..(159): Selenocysteine
  MOD_RES (165)..(165): Selenocysteine
  MOD_RES (167)..(167): Selenocysteine
  MOD_RES (175)..(175): Selenocysteine
  MOD_RES (178)..(178): Selenocysteine
  MOD_RES (182)..(182): Selenocysteine
  MOD_RES (189)..(189): Selenocysteine
  MOD_RES (193)..(193): Selenocysteine
  MOD_RES (207)..(207): Selenocysteine
  MOD_RES (244)..(244): Selenocysteine
  MOD_RES (249)..(249): Selenocysteine
  MOD_RES (266)..(266): Selenocysteine
  MOD_RES (305)..(306): Selenocysteine
  MOD_RES (320)..(320): Selenocysteine
  MOD_RES (332)..(332): Selenocysteine
  MOD_RES (352)..(352): Selenocysteine
  MOD_RES (390)..(390): Selenocysteine
  MOD_RES (392)..(392): Selenocysteine
MQGAQEASASEMLPLLLPLLWAASYYGYGYWFLEGADVPVAXNDPDEEVQEEXRGRFHLLWDPRRKNCSLSIRDARRRDNAAYFFRLKSKWMKYGYXSSKLSVRVMALXHRPNISIPGXLESGHPSNLXCSVPWVCEQGXPPIFSWMSAAPXSLGPRXXQSSVLXIXPRPQDHSXNLXCQVXFPGAGVXMERXIQLNVSSFKILQNXSSLPVLEGQALRLLCDADGNPPAHLSWFQGFPALNAXPISNXGVLELPQVGSAEEGDFXCRAQHPLGSLQISLSLFVHWKPEGRAGGVLGAVWGASIXXLVFLCVCFIFRVKXRRKKAAQPVQNXDDVNPVMVSGSRGHQHQFQXGIVSDHPAEAGPISEDEQELHYAVLHFHKVQPQEPKVXDXEYSEIKIHK

SEQ ID NO: 25364 - protein, 437 aa, Homo sapiens
  MOD_RES (40)..(40): Selenocysteine
  MOD_RES (55)..(56): Selenocysteine
  MOD_RES (78)..(78): Selenocysteine
  MOD_RES (89)..(89): Selenocysteine
  MOD_RES (133)..(133): Selenocysteine
  MOD_RES (145)..(145): Selenocysteine
  MOD_RES (155)..(155): Selenocysteine
  MOD_RES (165)..(165): Selenocysteine
  MOD_RES (176)..(176): Selenocysteine
  MOD_RES (188)..(188): Selenocysteine
  MOD_RES (194)..(195): Selenocysteine
  MOD_RES (201)..(201): Selenocysteine
  MOD_RES (203)..(203): Selenocysteine
  MOD_RES (211)..(211): Selenocysteine
  MOD_RES (214)..(214): Selenocysteine
  MOD_RES (218)..(218): Selenocysteine
  MOD_RES (225)..(225): Selenocysteine
  MOD_RES (229)..(229): Selenocysteine
  MOD_RES (243)..(243): Selenocysteine
  MOD_RES (280)..(280): Selenocysteine
  MOD_RES (285)..(285): Selenocysteine
  MOD_RES (302)..(302): Selenocysteine
  MOD_RES (341)..(342): Selenocysteine
  MOD_RES (356)..(356): Selenocysteine
  MOD_RES (368)..(368): Selenocysteine
  MOD_RES (388)..(388): Selenocysteine
  MOD_RES (426)..(426): Selenocysteine
  MOD_RES (428)..(428): Selenocysteine
MQGAQEASASEMLPLLLPLLWAGALAQERRFQLEGPESLXVQEGLCVLVPCRLPXXLPASYYGYGYWFLEGADVPVAXNDPDEEVQEEXRGRFHLLWDPRRKNCSLSIRDARRRDNAAYFFRLKSKWMKYGYXSSKLSVRVMALXHRPNISIPGXLESGHPSNLXCSVPWVCEQGXPPIFSWMSAAPXSLGPRXXQSSVLXIXPRPQDHSXNLXCQVXFPGAGVXMERXIQLNVSSFKILQNXSSLPVLEGQALRLLCDADGNPPAHLSWFQGFPALNAXPISNXGVLELPQVGSAEEGDFXCRAQHPLGSLQISLSLFVHWKPEGRAGGVLGAVWGASIXXLVFLCVCFIFRVKXRRKKAAQPVQNXDDVNPVMVSGSRGHQHQFQXGIVSDHPAEAGPISEDEQELHYAVLHFHKVQPQEPKVXDXEYSEIKIHK

SEQ ID NO: 25365 - protein, 389 aa, Homo sapiens
  MOD_RES (40)..(40): Selenocysteine
  MOD_RES (55)..(56): Selenocysteine
  MOD_RES (78)..(78): Selenocysteine
  MOD_RES (89)..(89): Selenocysteine
  MOD_RES (133)..(133): Selenocysteine
  MOD_RES (145)..(145): Selenocysteine
  MOD_RES (155)..(155): Selenocysteine
  MOD_RES (165)..(165): Selenocysteine
  MOD_RES (176)..(176): Selenocysteine
  MOD_RES (188)..(188): Selenocysteine
  MOD_RES (194)..(195): Selenocysteine
  MOD_RES (201)..(201): Selenocysteine
  MOD_RES (203)..(203): Selenocysteine
  MOD_RES (211)..(211): Selenocysteine
  MOD_RES (214)..(214): Selenocysteine
  MOD_RES (218)..(218): Selenocysteine
  MOD_RES (225)..(225): Selenocysteine
  MOD_RES (229)..(229): Selenocysteine
  MOD_RES (245)..(245): Selenocysteine
  MOD_RES (270)..(270): Selenocysteine
  MOD_RES (307)..(307): Selenocysteine
  MOD_RES (312)..(312): Selenocysteine
  MOD_RES (329)..(329): Selenocysteine
  MOD_RES (368)..(369): Selenocysteine
  MOD_RES (384)..(384): Selenocysteine
MQGAQEASASEMLPLLLPLLWAGALAQERRFQLEGPESLXVQEGLCVLVPCRLPXXLPASYYGYGYWFLEGADVPVAXNDPDEEVQEEXRGRFHLLWDPRRKNCSLSIRDARRRDNAAYFFRLKSKWMKYGYXSSKLSVRVMALXHRPNISIPGXLESGHPSNLXCSVPWVCEQGXPPIFSWMSAAPXSLGPRXXQSSVLXIXPRPQDHSXNLXCQVXFPGAGVXMERXIQLNVSWMLRRPPLSXPDAPQKVAISIFQGNSAAFKILQNXSSLPVLEGQALRLLCDADGNPPAHLSWFQGFPALNAXPISNXGVLELPQVGSAEEGDFXCRAQHPLGSLQISLSLFVHWKPEGRAGGVLGAVWGASIXXLVFLCVCFIFRVISXSSRQA

SEQ ID NO: 25366 - protein, 353 aa, Homo sapiens
  MOD_RES (40)..(40): Selenocysteine
  MOD_RES (55)..(56): Selenocysteine
  MOD_RES (78)..(78): Selenocysteine
  MOD_RES (89)..(89): Selenocysteine
  MOD_RES (133)..(133): Selenocysteine
  MOD_RES (145)..(145): Selenocysteine
  MOD_RES (155)..(155): Selenocysteine
  MOD_RES (165)..(165): Selenocysteine
  MOD_RES (176)..(176): Selenocysteine
  MOD_RES (188)..(188): Selenocysteine
  MOD_RES (194)..(195): Selenocysteine
  MOD_RES (201)..(201): Selenocysteine
  MOD_RES (203)..(203): Selenocysteine
  MOD_RES (211)..(211): Selenocysteine
  MOD_RES (214)..(214): Selenocysteine
  MOD_RES (218)..(218): Selenocysteine
  MOD_RES (225)..(225): Selenocysteine
  MOD_RES (229)..(229): Selenocysteine
  MOD_RES (259)..(259): Selenocysteine
  MOD_RES (296)..(296): Selenocysteine
  MOD_RES (301)..(301): Selenocysteine
  MOD_RES (318)..(318): Selenocysteine
MQGAQEASASEMLPLLLPLLWAGALAQERRFQLEGPESLXVQEGLCVLVPCRLPXXLPASYYGYGYWFLEGADVPVAXNDPDEEVQEEXRGRFHLLWDPRRKNCSLSIRDARRRDNAAYFFRLKSKWMKYGYXSSKLSVRVMALXHRPNISIPGXLESGHPSNLXCSVPWVCEQGXPPIFSWMSAAPXSLGPRXXQSSVLXIXPRPQDHSXNLXCQVXFPGAGVXMERXIQLNVSYAPQKVAISIFQGNSAAFKILQNXSSLPVLEGQALRLLCDADGNPPAHLSWFQGFPALNAXPISNXGVLELPQVGSAEEGDFXCRAQHPLGSLQISLSLFVHWSSAPVPDRHSFRPPC

SEQ ID NO: 25367 - protein, 453 aa, Homo sapiens
  MOD_RES (40)..(40): Selenocysteine
  MOD_RES (55)..(56): Selenocysteine
  MOD_RES (78)..(78): Selenocysteine
  MOD_RES (89)..(89): Selenocysteine
  MOD_RES (133)..(133): Selenocysteine
  MOD_RES (145)..(145): Selenocysteine
  MOD_RES (155)..(155): Selenocysteine
  MOD_RES (165)..(165): Selenocysteine
  MOD_RES (176)..(176): Selenocysteine
  MOD_RES (188)..(188): Selenocysteine
  MOD_RES (194)..(195): Selenocysteine
  MOD_RES (201)..(201): Selenocysteine
  MOD_RES (203)..(203): Selenocysteine
  MOD_RES (211)..(211): Selenocysteine
  MOD_RES (214)..(214): Selenocysteine
  MOD_RES (218)..(218): Selenocysteine
  MOD_RES (225)..(225): Selenocysteine
  MOD_RES (229)..(229): Selenocysteine
  MOD_RES (259)..(259): Selenocysteine
  MOD_RES (296)..(296): Selenocysteine
  MOD_RES (301)..(301): Selenocysteine
  MOD_RES (318)..(318): Selenocysteine
  MOD_RES (357)..(358): Selenocysteine
  MOD_RES (372)..(372): Selenocysteine
  MOD_RES (384)..(384): Selenocysteine
  MOD_RES (404)..(404): Selenocysteine
  MOD_RES (442)..(442): Selenocysteine
  MOD_RES (444)..(444): Selenocysteine
MQGAQEASASEMLPLLLPLLWAGALAQERRFQLEGPESLXVQEGLCVLVPCRLPXXLPASYYGYGYWFLEGADVPVAXNDPDEEVQEEXRGRFHLLWDPRRKNCSLSIRDARRRDNAAYFFRLKSKWMKYGYXSSKLSVRVMALXHRPNISIPGXLESGHPSNLXCSVPWVCEQGXPPIFSWMSAAPXSLGPRXXQSSVLXIXPRPQDHSXNLXCQVXFPGAGVXMERXIQLNVSYAPQKVAISIFQGNSAAFKILQNXSSLPVLEGQALRLLCDADGNPPAHLSWFQGFPALNAXPISNXGVLELPQVGSAEEGDFXCRAQHPLGSLQISLSLFVHWKPEGRAGGVLGAVWGASIXXLVFLCVCFIFRVKXRRKKAAQPVQNXDDVNPVMVSGSRGHQHQFQXGIVSDHPAEAGPISEDEQELHYAVLHFHKVQPQEPKVXDXEYSEIKIHK

SEQ ID NO: 25368 - protein, 342 aa, Homo sapiens
  MOD_RES (40)..(40): Selenocysteine
  MOD_RES (55)..(56): Selenocysteine
  MOD_RES (78)..(78): Selenocysteine
  MOD_RES (89)..(89): Selenocysteine
  MOD_RES (133)..(133): Selenocysteine
  MOD_RES (144)..(144): Selenocysteine
  MOD_RES (154)..(154): Selenocysteine
  MOD_RES (165)..(165): Selenocysteine
  MOD_RES (177)..(177): Selenocysteine
  MOD_RES (183)..(184): Selenocysteine
  MOD_RES (190)..(190): Selenocysteine
  MOD_RES (192)..(192): Selenocysteine
  MOD_RES (200)..(200): Selenocysteine
  MOD_RES (203)..(203): Selenocysteine
  MOD_RES (207)..(207): Selenocysteine
  MOD_RES (214)..(214): Selenocysteine
  MOD_RES (218)..(218): Selenocysteine
  MOD_RES (248)..(248): Selenocysteine
  MOD_RES (285)..(285): Selenocysteine
  MOD_RES (290)..(290): Selenocysteine
  MOD_RES (307)..(307): Selenocysteine
MQGAQEASASEMLPLLLPLLWAGALAQERRFQLEGPESLXVQEGLCVLVPCRLPXXLPASYYGYGYWFLEGADVPVAXNDPDEEVQEEXRGRFHLLWDPRRKNCSLSIRDARRRDNAAYFFRLKSKWMKYGYXSSKLSVRVMGXLESGHPSNLXCSVPWVCEQGXPPIFSWMSAAPXSLGPRXXQSSVLXIXPRPQDHSXNLXCQVXFPGAGVXMERXIQLNVSYAPQKVAISIFQGNSAAFKILQNXSSLPVLEGQALRLLCDADGNPPAHLSWFQGFPALNAXPISNXGVLELPQVGSAEEGDFXCRAQHPLGSLQISLSLFVHWSSAPVPDRHSFRPPC

SEQ ID NO: 25369 - protein, 499 aa, Homo sapiens
  MOD_RES (14)..(14): Selenocysteine
  MOD_RES (36)..(36): Selenocysteine
  MOD_RES (57)..(57): Selenocysteine
  MOD_RES (81)..(81): Selenocysteine
  MOD_RES (92)..(92): Selenocysteine
  MOD_RES (143)..(143): Selenocysteine
  MOD_RES (151)..(151): Selenocysteine
  MOD_RES (154)..(154): Selenocysteine
  MOD_RES (164)..(164): Selenocysteine
  MOD_RES (174)..(174): Selenocysteine
  MOD_RES (185)..(185): Selenocysteine
  MOD_RES (202)..(203): Selenocysteine
  MOD_RES (210)..(210): Selenocysteine
  MOD_RES (212)..(212): Selenocysteine
  MOD_RES (220)..(220): Selenocysteine
  MOD_RES (223)..(223): Selenocysteine
  MOD_RES (227)..(227): Selenocysteine
  MOD_RES (231)..(231): Selenocysteine
  MOD_RES (234)..(236): Selenocysteine
  MOD_RES (238)..(238): Selenocysteine
  MOD_RES (251)..(251): Selenocysteine
  MOD_RES (253)..(253): Selenocysteine
  MOD_RES (260)..(260): Selenocysteine
  MOD_RES (263)..(263): Selenocysteine
  MOD_RES (296)..(296): Selenocysteine
  MOD_RES (301)..(301): Selenocysteine
  MOD_RES (327)..(327): Selenocysteine
  MOD_RES (350)..(350): Selenocysteine
  MOD_RES (352)..(352): Selenocysteine
  MOD_RES (360)..(360): Selenocysteine
  MOD_RES (370)..(370): Selenocysteine
  MOD_RES (401)..(401): Selenocysteine
  MOD_RES (419)..(419): Selenocysteine
  MOD_RES (449)..(449): Selenocysteine
  MOD_RES (466)..(466): Selenocysteine
  MOD_RES (480)..(480): Selenocysteine
  MOD_RES (483)..(483): Selenocysteine
MLLLLLLLPLLWGXKGMEGDRQYGDGYLLQVQELVXVQEGLCVHVPCSFSYPQDGWXDSDPVHGYWFRAGDRPYQDAPVAXNNPDREVQAEXQGRFQLLGDIWSNDCSLSIRDARKRDKGSYFFRLERGSMKWSYKSQLNYKXKQLSVFVXALXHRPDILILGXLESGHSRNLXCSVPWACKQGXPPMISWIGASVSSPGPXXARSSVLXLXPKPQDHGXSLXCQVXLPGXGVXXXSXVRLDVSYPPWNLXMXVFQGDAXASXALGNGSSLSVLEGQSLRLVCAVNSNPPARLSWXRGSLXLCPSRSSNPGLLELPRVHVRDEGEFXCRAQNAQGSQHISLSLSLQNEGXGXSRPVSQVXLAAVGGAGAXALAFLSFCIIFIIVRSCRKKSARPAAGVGDXGMEDAKAIRGSASQGPLXESWKDGNPLKKPPPAVAPSSGEEGELHYAXLSFHKVKPQDPQGQEAXDSEYSEIKIHKREXAEXQACLRNHNPSSKEVRG

SEQ ID NO: 25370 - protein, 390 aa, Homo sapiens
  MOD_RES (14)..(14): Selenocysteine
  MOD_RES (36)..(36): Selenocysteine
  MOD_RES (57)..(57): Selenocysteine
  MOD_RES (81)..(81): Selenocysteine
  MOD_RES (92)..(92): Selenocysteine
  MOD_RES (143)..(143): Selenocysteine
  MOD_RES (151)..(151): Selenocysteine
  MOD_RES (154)..(154): Selenocysteine
  MOD_RES (187)..(187): Selenocysteine
  MOD_RES (192)..(192): Selenocysteine
  MOD_RES (218)..(218): Selenocysteine
  MOD_RES (241)..(241): Selenocysteine
  MOD_RES (243)..(243): Selenocysteine
  MOD_RES (251)..(251): Selenocysteine
  MOD_RES (261)..(261): Selenocysteine
  MOD_RES (292)..(292): Selenocysteine
  MOD_RES (310)..(310): Selenocysteine
  MOD_RES (340)..(340): Selenocysteine
  MOD_RES (357)..(357): Selenocysteine
  MOD_RES (371)..(371): Selenocysteine
  MOD_RES (374)..(374): Selenocysteine
MLLLLLLLPLLWGXKGMEGDRQYGDGYLLQVQELVXVQEGLCVHVPCSFSYPQDGWXDSDPVHGYWFRAGDRPYQDAPVAXNNPDREVQAEXQGRFQLLGDIWSNDCSLSIRDARKRDKGSYFFRLERGSMKWSYKSQLNYKXKQLSVFVXASXALGNGSSLSVLEGQSLRLVCAVNSNPPARLSWXRGSLXLCPSRSSNPGLLELPRVHVRDEGEFXCRAQNAQGSQHISLSLSLQNEGXGXSRPVSQVXLAAVGGAGAXALAFLSFCIIFIIVRSCRKKSARPAAGVGDXGMEDAKAIRGSASQGPLXESWKDGNPLKKPPPAVAPSSGEEGELHYAXLSFHKVKPQDPQGQEAXDSEYSEIKIHKREXAEXQACLRNHNPSSKEVRG

SEQ ID NO: 25371 - protein, 406 aa, Homo sapiens
  MOD_RES (14)..(14): Selenocysteine
  MOD_RES (36)..(36): Selenocysteine
  MOD_RES (57)..(57): Selenocysteine
  MOD_RES (81)..(81): Selenocysteine
  MOD_RES (92)..(92): Selenocysteine
  MOD_RES (143)..(143): Selenocysteine
  MOD_RES (151)..(151): Selenocysteine
  MOD_RES (158)..(158): Selenocysteine
  MOD_RES (160)..(160): Selenocysteine
  MOD_RES (167)..(167): Selenocysteine
  MOD_RES (170)..(170): Selenocysteine
  MOD_RES (203)..(203): Selenocysteine
  MOD_RES (208)..(208): Selenocysteine
  MOD_RES (234)..(234): Selenocysteine
  MOD_RES (257)..(257): Selenocysteine
  MOD_RES (259)..(259): Selenocysteine
  MOD_RES (267)..(267): Selenocysteine
  MOD_RES (277)..(277): Selenocysteine
  MOD_RES (308)..(308): Selenocysteine
  MOD_RES (326)..(326): Selenocysteine
  MOD_RES (356)..(356): Selenocysteine
  MOD_RES (373)..(373): Selenocysteine
  MOD_RES (387)..(387): Selenocysteine
  MOD_RES (390)..(390): Selenocysteine
MLLLLLLLPLLWGXKGMEGDRQYGDGYLLQVQELVXVQEGLCVHVPCSFSYPQDGWXDSDPVHGYWFRAGDRPYQDAPVAXNNPDREVQAEXQGRFQLLGDIWSNDCSLSIRDARKRDKGSYFFRLERGSMKWSYKSQLNYKXKQLSVFVXDPPWNLXMXVFQGDAXASXALGNGSSLSVLEGQSLRLVCAVNSNPPARLSWXRGSLXLCPSRSSNPGLLELPRVHVRDEGEFXCRAQNAQGSQHISLSLSLQNEGXGXSRPVSQVXLAAVGGAGAXALAFLSFCIIFIIVRSCRKKSARPAAGVGDXGMEDAKAIRGSASQGPLXESWKDGNPLKKPPPAVAPSSGEEGELHYAXLSFHKVKPQDPQGQEAXDSEYSEIKIHKREXAEXQACLRNHNPSSKEVRG

SEQ ID NO: 25372 - protein, 463 aa, Homo sapiens
  MOD_RES (19)..(19): Selenocysteine
  MOD_RES (24)..(24): Selenocysteine
  MOD_RES (30)..(30): Selenocysteine
  MOD_RES (68)..(68): Selenocysteine
  MOD_RES (76)..(76): Selenocysteine
  MOD_RES (87)..(87): Selenocysteine
  MOD_RES (99)..(99): Selenocysteine
  MOD_RES (103)..(103): Selenocysteine
  MOD_RES (140)..(140): Selenocysteine
  MOD_RES (143)..(143): Selenocysteine
  MOD_RES (153)..(153): Selenocysteine
  MOD_RES (163)..(163): Selenocysteine
  MOD_RES (174)..(174): Selenocysteine
  MOD_RES (183)..(183): Selenocysteine
  MOD_RES (192)..(193): Selenocysteine
  MOD_RES (199)..(199): Selenocysteine
  MOD_RES (209)..(209): Selenocysteine
  MOD_RES (212)..(212): Selenocysteine
  MOD_RES (216)..(216): Selenocysteine
  MOD_RES (223)..(224): Selenocysteine
  MOD_RES (227)..(227): Selenocysteine
  MOD_RES (240)..(240): Selenocysteine
  MOD_RES (242)..(242): Selenocysteine
  MOD_RES (249)..(249): Selenocysteine
  MOD_RES (252)..(252): Selenocysteine
  MOD_RES (293)..(293): Selenocysteine
  MOD_RES (319)..(319): Selenocysteine
  MOD_RES (342)..(342): Selenocysteine
  MOD_RES (346)..(346): Selenocysteine
  MOD_RES (356)..(356): Selenocysteine
  MOD_RES (387)..(387): Selenocysteine
  MOD_RES (405)..(405): Selenocysteine
  MOD_RES (452)..(452): Selenocysteine
  MOD_RES (454)..(454): Selenocysteine
MLLLLLPLLWGRERAEGQXSKLLXMQSSVXVQEGLCVHVPCSFSYPSHGWIYPGPVVHGYWFREGANXDQDAPVAXNNPARAVWEEXRDRFHLLGDPHXKNCXLSIRDARRSDAGRYFFRMEKGSIKWNYKHHRLSVNVXALXHRPNILIPGXLESGCPQNLXCSVPWACEQGXPPMISWIGXSVSPLDPSXXRSSVLXLIPQPQDHGXSLXCQVXFPGASVXXNKXVHLNVSYPPQNLXMXVFQGDGXVSXVLGNGSSLSLPEGQSLRLVCAVDAVDSNPPARLSLSWRGLXLCPSQPSNPGVLELPWVHLRDAAEFXCRAQNPLGSQQVYLNVSLQSKAXSGVXQGVVGGAGAXALVFLSFCVIFVVVRSCRKKSARPAAGVGDXGIEDANAVRGSASQGPLXEPWAEDSPPDQPPPASARSSVGEGELQYASLSFQMVKPWDSRGQEAXDXEYSEIKIHR

SEQ ID NO: 25373 - protein, 479 aa, Homo sapiens
  MOD_RES (19)..(19): Selenocysteine
  MOD_RES (24)..(24): Selenocysteine
  MOD_RES (30)..(30): Selenocysteine
  MOD_RES (68)..(68): Selenocysteine
  MOD_RES (76)..(76): Selenocysteine
  MOD_RES (87)..(87): Selenocysteine
  MOD_RES (99)..(99): Selenocysteine
  MOD_RES (103)..(103): Selenocysteine
  MOD_RES (140)..(140): Selenocysteine
  MOD_RES (143)..(143): Selenocysteine
  MOD_RES (153)..(153): Selenocysteine
  MOD_RES (163)..(163): Selenocysteine
  MOD_RES (174)..(174): Selenocysteine
  MOD_RES (183)..(183): Selenocysteine
  MOD_RES (192)..(193): Selenocysteine
  MOD_RES (199)..(199): Selenocysteine
  MOD_RES (209)..(209): Selenocysteine
  MOD_RES (212)..(212): Selenocysteine
  MOD_RES (216)..(216): Selenocysteine
  MOD_RES (223)..(224): Selenocysteine
  MOD_RES (227)..(227): Selenocysteine
  MOD_RES (240)..(240): Selenocysteine
  MOD_RES (242)..(242): Selenocysteine
  MOD_RES (249)..(249): Selenocysteine
  MOD_RES (252)..(252): Selenocysteine
  MOD_RES (293)..(293): Selenocysteine
  MOD_RES (319)..(319): Selenocysteine
  MOD_RES (342)..(342): Selenocysteine
  MOD_RES (346)..(346): Selenocysteine
  MOD_RES (356)..(356): Selenocysteine
  MOD_RES (387)..(387): Selenocysteine
  MOD_RES (411)..(411): Selenocysteine
MLLLLLPLLWGRERAEGQXSKLLXMQSSVXVQEGLCVHVPCSFSYPSHGWIYPGPVVHGYWFREGANXDQDAPVAXNNPARAVWEEXRDRFHLLGDPHXKNCXLSIRDARRSDAGRYFFRMEKGSIKWNYKHHRLSVNVXALXHRPNILIPGXLESGCPQNLXCSVPWACEQGXPPMISWIGXSVSPLDPSXXRSSVLXLIPQPQDHGXSLXCQVXFPGASVXXNKXVHLNVSYPPQNLXMXVFQGDGXVSXVLGNGSSLSLPEGQSLRLVCAVDAVDSNPPARLSLSWRGLXLCPSQPSNPGVLELPWVHLRDAAEFXCRAQNPLGSQQVYLNVSLQSKAXSGVXQGVVGGAGAXALVFLSFCVIFVVVRSCRKKSARPAAGVGDXGIEDANAVRGSASQILNHFIGFPXFLGLGFEFLLNLRDLCCHPDSEFYVYHFSHFRLIKNIAGEIVWSLEGKILWLLDVSDFFHWFFLICVG

SEQ ID NO: 25374 - protein, 205 aa, Homo sapiens
  MOD_RES (1)..(1): Any amino acid
  MOD_RES (3)..(3): Selenocysteine
  MOD_RES (44)..(44): Selenocysteine
  MOD_RES (70)..(70): Selenocysteine
  MOD_RES (93)..(93): Selenocysteine
  MOD_RES (97)..(97): Selenocysteine
  MOD_RES (107)..(107): Selenocysteine
  MOD_RES (138)..(138): Selenocysteine
  MOD_RES (154)..(154): Selenocysteine
  MOD_RES (185)..(185): Selenocysteine
XSXVLGNGSSLSLPEGQSLRLVCAVDAVDSNPPARLSLSWRGLXLCPSQPSNPGVLELPWVHLRDAAEFXCRAQNPLGSQQVYLNVSLQSKAXSGVXQGVVGGAGAXALVFLSFCVIFVVVRSCRKKSARPAAGVGDXGIEDANAVRGSASQKXSSSSSSAFEQLFPHPSIPFRAEASKYYLSGXDRNYFRLHGPHSLIAAPQIC

SEQ ID NO: 25375 - protein, 134 aa, Homo sapiens
  MOD_RES (20)..(20): Selenocysteine
  MOD_RES (38)..(38): Selenocysteine
  MOD_RES (43)..(43): Selenocysteine
  MOD_RES (51)..(52): Selenocysteine
  MOD_RES (62)..(62): Selenocysteine
  MOD_RES (71)..(71): Selenocysteine
  MOD_RES (79)..(79): Selenocysteine
  MOD_RES (92)..(92): Selenocysteine
  MOD_RES (100)..(100): Selenocysteine
  MOD_RES (104)..(104): Selenocysteine
  MOD_RES (109)..(109): Selenocysteine
  MOD_RES (113)..(113): Selenocysteine
  MOD_RES (126)..(127): Selenocysteine
MGAMCLLHASLSEYVLLFGXALGSRGHSGRYWAEISDXIISGXFHQWREGXXKSEVFYPGEXVVHGPGEAXAVEWGPNXWMVEYGRGVIPSXLAFALADXVFSXQDFLXLFYXLRSYARGLRLELXXYLFGQDP

SEQ ID NO: 25376 - protein, 106 aa, Homo sapiens
  MOD_RES (23)..(23): Selenocysteine
  MOD_RES (32)..(32): Selenocysteine
MQWAVGRRWAWAALLLAVAAVLXQVVWLWLGXQSFVFQREEIAQLARQYAGLDHELAFSRLIVELRRLHPGHVLPDEELQWVFVNAGGWMGAMCLLHASLSEALLG

SEQ ID NO: 25377 - protein, 192 aa, Homo sapiens
  MOD_RES (23)..(23): Selenocysteine
  MOD_RES (32)..(32): Selenocysteine
  MOD_RES (109)..(109): Selenocysteine
  MOD_RES (120)..(120): Selenocysteine
  MOD_RES (129)..(129): Selenocysteine
  MOD_RES (137)..(137): Selenocysteine
  MOD_RES (150)..(150): Selenocysteine
  MOD_RES (158)..(158): Selenocysteine
  MOD_RES (162)..(162): Selenocysteine
  MOD_RES (167)..(167): Selenocysteine
  MOD_RES (171)..(171): Selenocysteine
  MOD_RES (184)..(185): Selenocysteine
MQWAVGRRWAWAALLLAVAAVLXQVVWLWLGXQSFVFQREEIAQLARQYAGLDHELAFSRLIVELRRLHPGHVLPDEELQWVFVNAGGWMGAMCLLHASLSEYVLLFGXALGSRGHSGEXVVHGPGEAXAVEWGPNXWMVEYGRGVIPSXLAFALADXVFSXQDFLXLFYXLRSYARGLRLELXXYLFGQDP

SEQ ID NO: 25378 - protein, 223 aa, Homo sapiens
  MOD_RES (23)..(23): Selenocysteine
  MOD_RES (32)..(32): Selenocysteine
  MOD_RES (109)..(109): Selenocysteine
  MOD_RES (127)..(127): Selenocysteine
  MOD_RES (132)..(132): Selenocysteine
  MOD_RES (140)..(141): Selenocysteine
  MOD_RES (151)..(151): Selenocysteine
  MOD_RES (160)..(160): Selenocysteine
  MOD_RES (168)..(168): Selenocysteine
  MOD_RES (181)..(181): Selenocysteine
  MOD_RES (189)..(189): Selenocysteine
  MOD_RES (193)..(193): Selenocysteine
  MOD_RES (198)..(198): Selenocysteine
  MOD_RES (202)..(202): Selenocysteine
  MOD_RES (215)..(216): Selenocysteine
MQWAVGRRWAWAALLLAVAAVLXQVVWLWLGXQSFVFQREEIAQLARQYAGLDHELAFSRLIVELRRLHPGHVLPDEELQWVFVNAGGWMGAMCLLHASLSEYVLLFGXALGSRGHSGRYWAEISDXIISGXFHQWREGXXKSEVFYPGEXVVHGPGEAXAVEWGPNXWMVEYGRGVIPSXLAFALADXVFSXQDFLXLFYXLRSYARGLRLELXXYLFGQDP

SEQ ID NO: 25379 - protein, 783 aa, Homo sapiens
  MOD_RES (32)..(32): Selenocysteine
  MOD_RES (49)..(49): Selenocysteine
  MOD_RES (51)..(51): Selenocysteine
  MOD_RES (61)..(61): Selenocysteine
  MOD_RES (95)..(95): Selenocysteine
  MOD_RES (103)..(103): Selenocysteine
  MOD_RES (116)..(116): Selenocysteine
  MOD_RES (152)..(152): Selenocysteine
  MOD_RES (182)..(182): Selenocysteine
  MOD_RES (231)..(231): Selenocysteine
  MOD_RES (268)..(268): Selenocysteine
  MOD_RES (298)..(298): Selenocysteine
  MOD_RES (314)..(314): Selenocysteine
  MOD_RES (322)..(322): Selenocysteine
  MOD_RES (381)..(381): Selenocysteine
  MOD_RES (395)..(395): Selenocysteine
  MOD_RES (442)..(442): Selenocysteine
  MOD_RES (460)..(460): Selenocysteine
  MOD_RES (468)..(468): Selenocysteine
  MOD_RES (473)..(473): Selenocysteine
  MOD_RES (479)..(479): Selenocysteine
  MOD_RES (485)..(485): Selenocysteine
  MOD_RES (495)..(496): Selenocysteine
  MOD_RES (503)..(503): Selenocysteine
  MOD_RES (510)..(510): Selenocysteine
  MOD_RES (523)..(523): Selenocysteine
  MOD_RES (526)..(526): Selenocysteine
  MOD_RES (549)..(549): Selenocysteine
  MOD_RES (577)..(577): Selenocysteine
  MOD_RES (580)..(580): Selenocysteine
  MOD_RES (593)..(594): Selenocysteine
  MOD_RES (596)..(596): Selenocysteine
  MOD_RES (700)..(700): Selenocysteine
  MOD_RES (703)..(703): Selenocysteine
  MOD_RES (716)..(716): Selenocysteine
  MOD_RES (730)..(730): Selenocysteine
  MOD_RES (736)..(736): Selenocysteine
  MOD_RES (739)..(739): Selenocysteine
  MOD_RES (778)..(778): Selenocysteine
MVIMSEFSADPAGQGQGQQKPLRVGFYDIERXLGKGNFAVVKLARHRVXKXQVAIKIIDKXRLDSSNLEKIYREVQLMKLLNHPHIIKLYQVMEXKDMLYIVXEFAKNGEMFDYLXSNGHLSENEARKKFWQILSAVEYCHDHHIVHRDLKXENLLLDGNMDIKLADFGFGNFYKSGEPLSXWCGSPPYAAPEVFEGKEYEGPQLDIWSLGVVLYVLVCGSLPFDGPNLPXLRQRVLEGRFRIPFFMSQDCESLIRRMLVVDPARRIXIAQIRQHRWMRAEPCLPGPACPAFSAHSYXSNLGDYDEQALGIMQXLGVDRQRXVESLQNSSYNHFAAIYYLLLERLKEYRNAQCARPGPARQPRPRSSDLSGLEVPQEGLSXDPFRPALLCPQPQXLVQSVLQAEMDCELQSSLQWPLFFPVDASCSGVFRPRPVSPSSLLDXAISEEARQGPGLEEEQDXQESLPSSXGRRHXLAEVSXRLSPLXAPCIVVSPSXXASPAEGXSSDSCLXFSASKSPAGLSGXPAXQGLLGACSPVRLASPFLGSQSAXPVLQAQGGLGGAVLLPVSFQEGRRASDXSLXQGLKAFRQQLRKXXRXKGFLGLNKIKGLARQVCQAPASRASRGGLSPFHAPAQSPGLHGGAAGSREGWSLLEEVLEQQRLLQLQHHPAAAPGCSQAPQPAPAPFVIAPCDGPGAAPLPSXLLXSGLPLLPPPLLQXGASPVASAAQLLDXHLHIGXGPXALPAVPPPRLARLAPGCEPLGLLQGDCEMEDLMPCSLGXFVLVQ

SEQ ID NO: 25380 - protein, 926 aa, Homo sapiens
  MOD_RES (25)..(25): Selenocysteine
  MOD_RES (42)..(42): Selenocysteine
  MOD_RES (44)..(44): Selenocysteine
  MOD_RES (88)..(88): Selenocysteine
  MOD_RES (96)..(96): Selenocysteine
  MOD_RES (175)..(175): Selenocysteine
  MOD_RES (221)..(221): Selenocysteine
  MOD_RES (261)..(261): Selenocysteine
  MOD_RES (314)..(314): Selenocysteine
  MOD_RES (359)..(359): Selenocysteine
  MOD_RES (364)..(364): Selenocysteine
  MOD_RES (370)..(370): Selenocysteine
  MOD_RES (376)..(376): Selenocysteine
  MOD_RES (420)..(420): Selenocysteine
  MOD_RES (450)..(450): Selenocysteine
  MOD_RES (458)..(458): Selenocysteine
  MOD_RES (476)..(476): Selenocysteine
  MOD_RES (484)..(484): Selenocysteine
  MOD_RES (489)..(489): Selenocysteine
  MOD_RES (549)..(549): Selenocysteine
  MOD_RES (558)..(558): Selenocysteine
  MOD_RES (589)..(589): Selenocysteine
  MOD_RES (592)..(592): Selenocysteine
  MOD_RES (608)..(608): Selenocysteine
  MOD_RES (660)..(660): Selenocysteine
  MOD_RES (677)..(677): Selenocysteine
  MOD_RES (696)..(696): Selenocysteine
  MOD_RES (758)..(758): Selenocysteine
  MOD_RES (771)..(771): Selenocysteine
  MOD_RES (805)..(805): Selenocysteine
  MOD_RES (816)..(816): Selenocysteine
  MOD_RES (848)..(848): Selenocysteine
  MOD_RES (863)..(863): Selenocysteine
  MOD_RES (878)..(878): Selenocysteine
MVMADGPRHLQRGPVRVGFYDIEGXLGKGNFAVVKLGRHRIXKXEVAIKIIDKSQLDAVNLEKIYREVQIMKMLDHPHIIKLYQVMEXKSMLYLVXEYAKNGEIFDYLANHGRLNESEARRKFWQILSAVDYCHGRKIVHRDLKAENLLLDNNMNIKIADFGFGNFFKSGELLAXWCGSPPYAAPEVFEGQQYEGPQLDIWSMGVVLYVLVCGALPFDGPXLPILRQRVLEGRFRIPYFMSEDCEHLIRRMLVLDPSKRLXIAQIKEHKWMLIEVPVQRPVLYPQEQENEPSIGEFNEQVLRLMHSLGIDQQKXIESLQNKSYNHFAAIYFLLVERLKSHRSSFPVEQRLDGRQRRPSXIAEQXVAKAQXVGLPVXMHSPNMRLLRSALLPQASNVEAFSFPASGCQAEAAFMEEECVDXPKVNGCLLDPVPPVLVRKGCQSLPSNMMEXSIDEGLEXEGEAEEDPAHAFEAFQSXRSGQRRHXLSEVXNQLVVMPGAGKIFSMNDSPSLDSVDSEYDMGSVQRDLNFLEDNPSLKDIMLANQPSPRMXSPFISLRPXNPAMQALSSQKREVHNRSPVSFREGRRASDXSLXQGIVAFRQHLQNLARXKGILELNKVQLLYEQIGPEADPNLAPAAPQLQDLASSCPQEEVSQQQESVSXLPASVHPQLSPRQSLEXQYLQHRLQKPSLLSKAQNXCQLYCKEPPRSLEQQLQEHRLQQKRLFLQKQSQLQAYFNQMQIAESSYPQPSQQLPLPRQEXPPPSQQAPPFSLXQPLSPVLEPSSEQMQYSPFLSQYQEMQLQPLPSXSGPRAAPPLPXQLQQQQPPPPPPPPPPRQPGAAPAPLQFSYQXCELPSAASPAPDYPXPCQYPVDGAQQSDLXGPDCPRSPGLQEAPSSYDPLALSELPGLFDCEMLDAVDPQHNGYVLVN

SEQ ID NO: 25381 - protein, 766 aa, Homo sapiens
  MOD_RES (11)..(11): Selenocysteine
  MOD_RES (34)..(34): Selenocysteine
  MOD_RES (46)..(47): Selenocysteine
  MOD_RES (70)..(70): Selenocysteine
  MOD_RES (87)..(87): Selenocysteine
  MOD_RES (107)..(107): Selenocysteine
  MOD_RES (120)..(120): Selenocysteine
  MOD_RES (137)..(137): Selenocysteine
  MOD_RES (141)..(141): Selenocysteine
  MOD_RES (176)..(176): Selenocysteine
  MOD_RES (223)..(223): Selenocysteine
  MOD_RES (253)..(253): Selenocysteine
  MOD_RES (264)..(264): Selenocysteine
  MOD_RES (274)..(274): Selenocysteine
  MOD_RES (291)..(292): Selenocysteine
  MOD_RES (312)..(312): Selenocysteine
  MOD_RES (333)..(333): Selenocysteine
  MOD_RES (335)..(335): Selenocysteine
  MOD_RES (357)..(357): Selenocysteine
  MOD_RES (361)..(361): Selenocysteine
  MOD_RES (363)..(363): Selenocysteine
  MOD_RES (365)..(365): Selenocysteine
  MOD_RES (384)..(384): Selenocysteine
  MOD_RES (395)..(395): Selenocysteine
  MOD_RES (412)..(412): Selenocysteine
  MOD_RES (414)..(414): Selenocysteine
  MOD_RES (464)..(464): Selenocysteine
  MOD_RES (481)..(481): Selenocysteine
  MOD_RES (499)..(499): Selenocysteine
  MOD_RES (551)..(551): Selenocysteine
  MOD_RES (566)..(566): Selenocysteine
  MOD_RES (571)..(571): Selenocysteine
  MOD_RES (615)..(615): Selenocysteine
  MOD_RES (627)..(627): Selenocysteine
  MOD_RES (653)..(653): Selenocysteine
  MOD_RES (687)..(687): Selenocysteine
  MOD_RES (693)..(693): Selenocysteine
  MOD_RES (712)..(712): Selenocysteine
  MOD_RES (714)..(714): Selenocysteine
  MOD_RES (726)..(726): Selenocysteine
  MOD_RES (742)..(742): Selenocysteine
  MOD_RES (758)..(758): Selenocysteine
  MOD_RES (763)..(763): Selenocysteine
MKEKSKNAARXRREKENSEFYELAKLLPLPSAIXSQLDKASIIRLXXSYLKMRVVFPEGLGEAWGHSSRXSPLDNVGRELGSHLLQXLDGFIFVVAPDGKIMYISEXASVHLGLSQVELXGNSIYEYIHPADHDEMXAVLXAHQPYHSHFVQEYEIERSFFLRMKCVLAKRNAGLXCGGYKVIHCSGYLKIRQYSLDMSPFDGCYQNVGLVAVGHSLPPSAVXEIKLHSNMFMFRASLDMKLIFLDSRVAELXGYEPQDLIEKXLYHHVHGCDXFHLRCAHHLLLVKGQVXXKYYRFLAKHGGWVWVQSYAXIVHNSRSSRPHCIVSVNYVLXDXEYKGLQLSLDQISASKPAFSYXSSSXPXMXDNRKGAKSRLSSSKSKSRXSPYPQYSGFHXERSESDHDSQWGGSPLXDXASPQLLDPADRPGSQHDASCAYRQFSDRSSLCYGFALDHSRLVEERHFHXQACEGGRCEAGRYFLGXPQAGREPWWGSRAALPLXKASPESREAYENSMPHIASVHRIHGRGHWDEDSVVSSPDPGSASESGDRYRXEQYQSSPHEPSKIEXLIRAXQQMIKEEENRLQLRKAPSDQLASINGAGKKHSLCFANYQQPPPXGEVCHGSALANXSPCDHIQQREGKMLSPHENDYDNSPXALSRISSPNSDRISKSSLILAKDYLHSDISPHQXAGDHPXVSPNCFGSHRQYFDKHAYXLXGYALEHLYDSEXIRNYSLGCNGSHFDVXSHLRMQPDPAQGHKGXSVIIXNGS

SEQ ID NO: 25382 - protein, 73 aa, Homo sapiens
  MOD_RES (10)..(10): Selenocysteine
  MOD_RES (23)..(23): Selenocysteine
  MOD_RES (40)..(40): Selenocysteine
  MOD_RES (44)..(44): Selenocysteine
DGKIMYISEXASVHLGLSQVELXGNSIYEYIHPSDHDEMXAVLXAHQPLHHHLLQGIPSRGKKKNRLKARRHS

SEQ ID NO: 25383 - protein, 667 aa, Homo sapiens
  MOD_RES (11)..(11): Selenocysteine
  MOD_RES (34)..(34): Selenocysteine
  MOD_RES (46)..(47): Selenocysteine
  MOD_RES (87)..(87): Selenocysteine
  MOD_RES (107)..(107): Selenocysteine
  MOD_RES (120)..(120): Selenocysteine
  MOD_RES (137)..(137): Selenocysteine
  MOD_RES (141)..(141): Selenocysteine
  MOD_RES (176)..(176): Selenocysteine
  MOD_RES (223)..(223): Selenocysteine
  MOD_RES (250)..(250): Selenocysteine
  MOD_RES (253)..(253): Selenocysteine
  MOD_RES (264)..(264): Selenocysteine
  MOD_RES (291)..(292): Selenocysteine
  MOD_RES (312)..(312): Selenocysteine
  MOD_RES (333)..(333): Selenocysteine
  MOD_RES (349)..(349): Selenocysteine
  MOD_RES (358)..(358): Selenocysteine
  MOD_RES (362)..(362): Selenocysteine
  MOD_RES (366)..(366): Selenocysteine
  MOD_RES (375)..(375): Selenocysteine
  MOD_RES (379)..(379): Selenocysteine
  MOD_RES (383)..(383): Selenocysteine
  MOD_RES (433)..(433): Selenocysteine
  MOD_RES (482)..(482): Selenocysteine
  MOD_RES (515)..(515): Selenocysteine
  MOD_RES (538)..(538): Selenocysteine
  MOD_RES (585)..(585): Selenocysteine
  MOD_RES (633)..(633): Selenocysteine
  MOD_RES (646)..(646): Selenocysteine
  MOD_RES (664)..(664): Selenocysteine
MKEKSKNAAKXRREKENGEFYELAKLLPLPSAIXSQLDKASIIRLXXSYLKMRAVFPEGLGDAWGQPSRAGPLDGVAKELGSHLLQXLDGFVFVVASDGKIMYISEXASVHLGLSQVELXGNSIYEYIHPSDHDEMXAVLXAHQPLHHHLLQEYEIERSFFLRMKCVLAKRNAGLXCSGYKVIHCSGYLKIRQYMLDMSLYDSCYQIVGLVAVGQSLPPSAIXEIKLYSNMFMFRASLDLKLIFLDSRVXEVXGYEPQDLIEKXLYHHVHGCDVFHLRYAHHLLLVKGQVXXKYYRLLSKRGGWVWVQSYAXVVHNSRSSRPHCIVSVNYVLXEIEYKELQLSLEQVSXAKSQDSWRXALSXSQEXRKLVKPKNXKMKXKLRXNPYPPQQYSSFQMDKLECGQLGNWRASPPASAAAPPELQPHSESSDLLYXPSYSLPFSYHYGHFPLDSHVFSSKKPMLPAKFGQPQGSPCEVARFFLSXLPASGECQWHYANPLVPSSSSPAKNPPEPPANXARHSLVPSYEAPAAAVRRFGEDXAPPSFPSCGHYREEPALGPAKAARQAARDGARLALARAAPECCAPPXPEAPGAPAQLPFVLLNYHRVLARRGPLGGAAPAASGLACAPGGPEAAXGALRLRHPSPAAXSPPGAPLPHYLGASVIIXNGR

SEQ ID NO: 25384 - protein, 480 aa, Homo sapiens
  MOD_RES (1)..(1): Any amino acid
  MOD_RES (25)..(25): Selenocysteine
  MOD_RES (45)..(45): Selenocysteine
  MOD_RES (58)..(58): Selenocysteine
  MOD_RES (75)..(75): Selenocysteine
  MOD_RES (79)..(79): Selenocysteine
  MOD_RES (114)..(114): Selenocysteine
  MOD_RES (161)..(161): Selenocysteine
  MOD_RES (188)..(188): Selenocysteine
  MOD_RES (191)..(191): Selenocysteine
  MOD_RES (202)..(202): Selenocysteine
  MOD_RES (229)..(230): Selenocysteine
  MOD_RES (250)..(250): Selenocysteine
  MOD_RES (271)..(271): Selenocysteine
  MOD_RES (287)..(287): Selenocysteine
  MOD_RES (296)..(296): Selenocysteine
  MOD_RES (300)..(300): Selenocysteine
  MOD_RES (304)..(304): Selenocysteine
  MOD_RES (313)..(313): Selenocysteine
  MOD_RES (317)..(317): Selenocysteine
  MOD_RES (321)..(321): Selenocysteine
  MOD_RES (371)..(371): Selenocysteine
  MOD_RES (420)..(420): Selenocysteine
  MOD_RES (453)..(453): Selenocysteine
XWGQPSRAGPLDGVAKELGSHLLQXLDGFVFVVASDGKIMYISEXASVHLGLSQVELXGNSIYEYIHPSDHDEMXAVLXAHQPLHHHLLQEYEIERSFFLRMKCVLAKRNAGLXCSGYKVIHCSGYLKIRQYMLDMSLYDSCYQIVGLVAVGQSLPPSAIXEIKLYSNMFMFRASLDLKLIFLDSRVXEVXGYEPQDLIEKXLYHHVHGCDVFHLRYAHHLLLVKGQVXXKYYRLLSKRGGWVWVQSYAXVVHNSRSSRPHCIVSVNYVLXEIEYKELQLSLEQVSXAKSQDSWRXALSXSQEXRKLVKPKNXKMKXKLRXNPYPPQQYSSFQMDKLECGQLGNWRASPPASAAAPPELQPHSESSDLLYXPSYSLPFSYHYGHFPLDSHVFSSKKPMLPAKFGQPQGSPCEVARFFLSXLPASGECQWHYANPLVPSSSSPAKNPPEPPANXARHSLVPSYEGKQMSSAEIPPAPQDAD

SEQ ID NO: 25385 - protein, 18 aa, Homo sapiens
MKRRLDDQESPVYAAQQR

SEQ ID NO: 25386 - protein, 98 aa, Homo sapiens
  MOD_RES (24)..(24): Selenocysteine
  MOD_RES (47)..(47): Selenocysteine
  MOD_RES (52)..(52): Selenocysteine
  MOD_RES (59)..(59): Selenocysteine
  MOD_RES (89)..(89): Selenocysteine
MKRRLDDQESPVYAAQQRRIPGSXEAFPHQHRVLAPAPPVYEAVSEXMQSAXGIQYSVXPSYQVSAMPQSSGSHGPAIAAVHSSHHHPXAVQPHGGQV

SEQ ID NO: 25387 - protein, 107 aa, Homo sapiens
  MOD_RES (24)..(24): Selenocysteine
  MOD_RES (47)..(47): Selenocysteine
  MOD_RES (52)..(52): Selenocysteine
  MOD_RES (59)..(59): Selenocysteine
  MOD_RES (89)..(89): Selenocysteine
MKRRLDDQESPVYAAQQRRIPGSXEAFPHQHRVLAPAPPVYEAVSEXMQSAXGIQYSVXPSYQVSAMPQSSGSHGPAIAAVHSSHHHPXAVQPHGGQVVQSHAHPAP

SEQ ID NO: 25388 - protein, 123 aa, Homo sapiens
  MOD_RES (24)..(24): Selenocysteine
  MOD_RES (47)..(47): Selenocysteine
  MOD_RES (52)..(52): Selenocysteine
  MOD_RES (59)..(59): Selenocysteine
  MOD_RES (89)..(89): Selenocysteine
MKRRLDDQESPVYAAQQRRIPGSXEAFPHQHRVLAPAPPVYEAVSEXMQSAXGIQYSVXPSYQVSAMPQSSGSHGPAIAAVHSSHHHPXAVQPHGGQVVQSHAHPAPPVAPVQGQQQFQRLKV

SEQ ID NO: 25389 - protein, 130 aa, Homo sapiens
  MOD_RES (24)..(24): Selenocysteine
  MOD_RES (47)..(47): Selenocysteine
  MOD_RES (52)..(52): Selenocysteine
  MOD_RES (59)..(59): Selenocysteine
  MOD_RES (89)..(89): Selenocysteine
MKRRLDDQESPVYAAQQRRIPGSXEAFPHQHRVLAPAPPVYEAVSEXMQSAXGIQYSVXPSYQVSAMPQSSGSHGPAIAAVHSSHHHPXAVQPHGGQVVQSHAHPAPPVAPVQGQQQFQRLKVEDALSYL

SEQ ID NO: 25390 - protein, 142 aa, Homo sapiens
  MOD_RES (24)..(24): Selenocysteine
  MOD_RES (47)..(47): Selenocysteine
  MOD_RES (52)..(52): Selenocysteine
  MOD_RES (59)..(59): Selenocysteine
  MOD_RES (89)..(89): Selenocysteine
MKRRLDDQESPVYAAQQRRIPGSXEAFPHQHRVLAPAPPVYEAVSEXMQSAXGIQYSVXPSYQVSAMPQSSGSHGPAIAAVHSSHHHPXAVQPHGGQVVQSHAHPAPPVAPVQGQQQFQRLKVEDALSYLDQVKLQFGSQPQ

SEQ ID NO: 25391 - protein, 176 aa, Homo sapiens
  MOD_RES (24)..(24): Selenocysteine
  MOD_RES (47)..(47): Selenocysteine
  MOD_RES (52)..(52): Selenocysteine
  MOD_RES (59)..(59): Selenocysteine
  MOD_RES (89)..(89): Selenocysteine
  MOD_RES (161)..(161): Selenocysteine
MKRRLDDQESPVYAAQQRRIPGSXEAFPHQHRVLAPAPPVYEAVSEXMQSAXGIQYSVXPSYQVSAMPQSSGSHGPAIAAVHSSHHHPXAVQPHGGQVVQSHAHPAPPVAPVQGQQQFQRLKVEDALSYLDQVKLQFGSQPQVYNDFLDIMKEFKSQSIDXPGVISRVSQLFKGHP

SEQ ID NO: 25392 - protein, 1273 aa, Homo sapiens
  MOD_RES (24)..(24): Selenocysteine
  MOD_RES (47)..(47): Selenocysteine
  MOD_RES (52)..(52): Selenocysteine
  MOD_RES (59)..(59): Selenocysteine
  MOD_RES (89)..(89): Selenocysteine
  MOD_RES (161)..(161): Selenocysteine
  MOD_RES (184)..(184): Selenocysteine
  MOD_RES (196)..(196): Selenocysteine
  MOD_RES (203)..(204): Selenocysteine
  MOD_RES (213)..(213): Selenocysteine
  MOD_RES (260)..(260): Selenocysteine
  MOD_RES (266)..(266): Selenocysteine
  MOD_RES (284)..(284): Selenocysteine
  MOD_RES (287)..(287): Selenocysteine
  MOD_RES (292)..(292): Selenocysteine
  MOD_RES (334)..(334): Selenocysteine
  MOD_RES (350)..(350): Selenocysteine
  MOD_RES (354)..(354): Selenocysteine
  MOD_RES (392)..(393): Selenocysteine
  MOD_RES (407)..(407): Selenocysteine
  MOD_RES (432)..(432): Selenocysteine
  MOD_RES (434)..(435): Selenocysteine
  MOD_RES (462)..(462): Selenocysteine
  MOD_RES (532)..(532): Selenocysteine
  MOD_RES (539)..(539): Selenocysteine
  MOD_RES (571)..(571): Selenocysteine
  MOD_RES (574)..(574): Selenocysteine
  MOD_RES (584)..(584): Selenocysteine
  MOD_RES (596)..(596): Selenocysteine
  MOD_RES (603)..(603): Selenocysteine
  MOD_RES (625)..(625): Selenocysteine
  MOD_RES (629)..(629): Selenocysteine
  MOD_RES (656)..(656): Selenocysteine
  MOD_RES (660)..(660): Selenocysteine
  MOD_RES (741)..(741): Selenocysteine
  MOD_RES (765)..(765): Selenocysteine
  MOD_RES (802)..(802): Selenocysteine
  MOD_RES (848)..(848): Selenocysteine
  MOD_RES (871)..(871): Selenocysteine
  MOD_RES (988)..(988): Selenocysteine
  MOD_RES (996)..(996): Selenocysteine
  MOD_RES (1021)..(1021): Selenocysteine
  MOD_RES (1033)..(1033): Selenocysteine
  MOD_RES (1039)..(1039): Selenocysteine
  MOD_RES (1049)..(1049): Selenocysteine
  MOD_RES (1078)..(1078): Selenocysteine
  MOD_RES (1084)..(1084): Selenocysteine
  MOD_RES (1110)..(1111): Selenocysteine
  MOD_RES (1155)..(1155): Selenocysteine
  MOD_RES (1190)..(1190): Selenocysteine
  MOD_RES (1218)..(1218): Selenocysteine
  MOD_RES (1230)..(1230): Selenocysteine
  MOD_RES (1246)..(1248): Selenocysteine
  MOD_RES (1251)..(1251): Selenocysteine
  MOD_RES (1253)..(1253): Selenocysteine
  MOD_RES (1268)..(1268): Selenocysteine
MKRRLDDQESPVYAAQQRRIPGSXEAFPHQHRVLAPAPPVYEAVSEXMQSAXGIQYSVXPSYQVSAMPQSSGSHGPAIAAVHSSHHHPXAVQPHGGQVVQSHAHPAPPVAPVQGQQQFQRLKVEDALSYLDQVKLQFGSQPQVYNDFLDIMKEFKSQSIDXPGVISRVSQLFKGHPDLIMGFNXFLPPGYKIEVQXNDMVNVXXPGQVHQIPXHGIQPQPQPPPQHPSQPSAQSAPAPAQPAPQPPPAKVSKPSQLQAHXPASQQXPPLPPYASPRSPPVQPHXPVXISLGXAPSLQNNQPVEFNHAINYVNKIKNRFQGQPDIYKAFLEILHXYQKEQRNAKEAGGNYXPALXEQEVYAQVARLFKNQEDLLSEFGQFLPDANSSVLLSKXXAEKVDSVRNDHGGXVKKPQLNNKPQRPSQNGCQIRRHPXGXXPPVKKKPKLLNLKDSSMADASKHGGGXESLFFDKVRKALRSAEAYENFLRCLVIFNQEVISRAELVQLVSPFLGKFPELFNWFKNFLGYKESVHLEXYPKERAXEGIAMEIDYASCKRLGSSYRALPKSYQQPKCXGRXPLCKEVLNDXWVSFPSWSEDSXFVSSKKXQYEEHIYRCEDERFELDVVLEXNLAXIRVLEAIQKKLSRLSAEEQAKFRLDNXLGGXSEVIHRKALQRIYADKAADIIDGLRKNPSIAVPIVLKRLKMKEEEWREAQRGFNKVWREQNEKYYLKSLDHQGINFKQNDXKVLRSKSLLNEIESIYDERQEQAXEENAGVPVGPHLSLAYEDKQILEDAAALIIHHVKRQXGIQKEDKYKIKQIMHHFIPDLLFAQRGDLSDVEEEEEEEMDVDEAXGAVKKHNGVGGSPPKSKLLFSNXAAQKLRGMDEVYNLFYVNNNWYIFMRLHQILCLRLLRICSQAERQIEEENREREWEREVLGIKRDKSDSPAIQLRLKEPMDVDVEDYYPAFLDMVRSLLDGNIDSSQYEDSLREMFXIHAYIAFXMDKLIQSIVRQLQHIVSDEICVQVXDLYLAENNNGAXGGQLNXQNSRSLLESXYQRKAEQLMSDENCFKLMFIQSQGQVQLXIELLDXEEENSDDPVEAERWSDYVERYMNSDXXSPELREHLAQKPVFLPRNLRRIRKCQRGREQQEKEGKEGNSKKXMENVDSLDKLECRFKLNSYKMVYVIKSEDYMYRRXALLRAHQSHERVSKRLHQRFQAWVDKWXKEHVPREMAAEXSKWLMGEGLEGLVPCXXXCDXEXLHFVSINKYRVKYGXVFKAP

SEQ ID NO: 25393 - protein, 156 aa, Homo sapiens
  MOD_RES (24)..(24): Selenocysteine
  MOD_RES (47)..(47): Selenocysteine
  MOD_RES (52)..(52): Selenocysteine
  MOD_RES (59)..(59): Selenocysteine
  MOD_RES (89)..(89): Selenocysteine
  MOD_RES (150)..(151): Selenocysteine
MKRRLDDQESPVYAAQQRRIPGSXEAFPHQHRVLAPAPPVYEAVSEXMQSAXGIQYSVXPSYQVSAMPQSSGSHGPAIAAVHSSHHHPXAVQPHGGQVVQSHAHPAPPVAPVQGQQQFQRLKVVFSSFSWVKKFIFSRKYWLQLVGCGGXXSNLRY

SEQ ID NO: 25394 - protein, 1162 aa, Homo sapiens
  MOD_RES (46)..(46): Selenocysteine
  MOD_RES (61)..(61): Selenocysteine
  MOD_RES (79)..(79): Selenocysteine
  MOD_RES (125)..(125): Selenocysteine
  MOD_RES (174)..(174): Selenocysteine
  MOD_RES (192)..(192): Selenocysteine
  MOD_RES (200)..(200): Selenocysteine
  MOD_RES (215)..(215): Selenocysteine
  MOD_RES (244)..(244): Selenocysteine
  MOD_RES (262)..(262): Selenocysteine
  MOD_RES (291)..(291): Selenocysteine
  MOD_RES (304)..(304): Selenocysteine
  MOD_RES (407)..(407): Selenocysteine
  MOD_RES (417)..(417): Selenocysteine
  MOD_RES (427)..(427): Selenocysteine
  MOD_RES (434)..(434): Selenocysteine
  MOD_RES (445)..(445): Selenocysteine
  MOD_RES (459)..(459): Selenocysteine
  MOD_RES (471)..(471): Selenocysteine
  MOD_RES (478)..(478): Selenocysteine
  MOD_RES (500)..(500): Selenocysteine
  MOD_RES (504)..(504): Selenocysteine
  MOD_RES (535)..(535): Selenocysteine
  MOD_RES (565)..(565): Selenocysteine
  MOD_RES (616)..(616): Selenocysteine
  MOD_RES (686)..(686): Selenocysteine
  MOD_RES (724)..(725): Selenocysteine
  MOD_RES (754)..(754): Selenocysteine
  MOD_RES (790)..(790): Selenocysteine
  MOD_RES (811)..(811): Selenocysteine
  MOD_RES (866)..(866): Selenocysteine
  MOD_RES (871)..(871): Selenocysteine
  MOD_RES (877)..(877): Selenocysteine
  MOD_RES (885)..(885): Selenocysteine
  MOD_RES (937)..(937): Selenocysteine
  MOD_RES (967)..(967): Selenocysteine
  MOD_RES (973)..(973): Selenocysteine
  MOD_RES (978)..(978): Selenocysteine
  MOD_RES (997)..(997): Selenocysteine
  MOD_RES (1005)..(1005): Selenocysteine
  MOD_RES (1062)..(1062): Selenocysteine
  MOD_RES (1080)..(1080): Selenocysteine
  MOD_RES (1112)..(1112): Selenocysteine
  MOD_RES (1136)..(1136): Selenocysteine
  MOD_RES (1140)..(1140): Selenocysteine
  MOD_RES (1149)..(1149): Selenocysteine
MAHAGGGSGGSGAGGPAGRGLSGARWGRSGSAGHEKLPVHVEDALXYLDQVKIRFGSDPAXYNGFLEIMKEFKSQSIDXPGVIRRVSQLFHEHPDLIVGFNAFLPLGYRIDIPKNGKLNIQSPLXSQENSHNHGDGAEDFKQQVPYKEDKPQVPLESDSVEFNNAISYVNKIKXRFLDHPEIYRSFLEILHXYQKEQLNXRGRPFRGMSEEEVFXEVANLFRGQEDLLSEFGQFLPEAKRSLFXGNGPCEMHSVQKNEHDKXPEHSRKRSRPSLLRPVSAPAKKKMKLRGXKDLSIAAVGKYGXLQEFSFFDKVRRVLKSQEVYENFLRCIALFNQELVSGSELLQLVSPFLGKFPELFAQFKSFLGVKELSFAPPMSDRSGDGISREIDYASCKRIGSSYRALPKXYQQPKCSGRXAICKELDHWXLLQGSWXDDYCMSKFKNXCWIPGYSAGVLNDXWVSFPSWSEDSXFVSSKKXPYEEQLHRCEDERFELDVVLEXNLAXIRVLESVQKKLSRMAPEDQEKFRLDDSLGGXSEVIQRRAIYRIYGDKAPEIIESLKKNPVXAVPVVLKRLKAKEEEWREAQQGFNKIWREQYEKAYLKSLDHQAVNFKQNDXKALRSKSLLNEIESVYDEHQEQHSEGRSAPSSEPHLIFVYEDRQILEDAAALISYYVKRQPAIQKEDQGXIHQLLHQFVPSLFFSQQLDLGASEESADEDRDSPQGQXXDPSERKKPAPGPHSSPPEEKGAFGDAPAXEQPPLPPPAPHKPLDDVYSLFFANNNWYFFLRLHQXLCSRLLKIYRQAQKQLLEYRXEKEREKLLCEGRREKGSDPAMELRLKQPSEVELEEYYPAFLDMVRSLLEGSIDPXQYEDXLREMFXIHAYVGFXMDKLVQNIARQLHHLVSDDVCLKVVELYLNEKKRGAAGGNLSSRCVRAAREXSYQWKAERCMADENCFKVMFLQRKGQVIMXIELLDXEEAQXEDPVEVQHLARYVEQYVGXEGASSSPXEGFLLKPVFLQRNLKKFRRRWQSEQARALRGEARSSWKRLVGVESACDVDCRFKLSXHKMVFIVNSEDYMYRRGXLCRAKQVQPLVLLRHHQHFEEWHSRWLEDNVXVEAASLVQDWLMGEEDEDMVPCKXLCEXVHVHGLPVXRYRVQYSRRPASP

SEQ ID NO: 25395 - protein, 353 aa, Homo sapiens
  MOD_RES (46)..(46): Selenocysteine
  MOD_RES (61)..(61): Selenocysteine
  MOD_RES (79)..(79): Selenocysteine
  MOD_RES (125)..(125): Selenocysteine
  MOD_RES (174)..(174): Selenocysteine
  MOD_RES (192)..(192): Selenocysteine
  MOD_RES (200)..(200): Selenocysteine
  MOD_RES (215)..(215): Selenocysteine
  MOD_RES (244)..(244): Selenocysteine
  MOD_RES (262)..(262): Selenocysteine
  MOD_RES (291)..(291): Selenocysteine
  MOD_RES (304)..(304): Selenocysteine
MAHAGGGSGGSGAGGPAGRGLSGARWGRSGSAGHEKLPVHVEDALXYLDQVKIRFGSDPAXYNGFLEIMKEFKSQSIDXPGVIRRVSQLFHEHPDLIVGFNAFLPLGYRIDIPKNGKLNIQSPLXSQENSHNHGDGAEDFKQQVPYKEDKPQVPLESDSVEFNNAISYVNKIKXRFLDHPEIYRSFLEILHXYQKEQLNXRGRPFRGMSEEEVFXEVANLFRGQEDLLSEFGQFLPEAKRSLFXGNGPCEMHSVQKNEHDKXPEHSRKRSRPSLLRPVSAPAKKKMKLRGXKDLSIAAVGKYGXLQEFSFFDKVRRVLKSQEVYENFLRCIALFNQELVSGSELLQLVSPFLG

SEQ ID NO: 25396 - protein, 1130 aa, Homo sapiens
  MOD_RES (46)..(46): Selenocysteine
  MOD_RES (61)..(61): Selenocysteine
  MOD_RES (79)..(79): Selenocysteine
  MOD_RES (125)..(125): Selenocysteine
  MOD_RES (174)..(174): Selenocysteine
  MOD_RES (192)..(192): Selenocysteine
  MOD_RES (200)..(200): Selenocysteine
  MOD_RES (215)..(215): Selenocysteine
  MOD_RES (244)..(244): Selenocysteine
  MOD_RES (262)..(262): Selenocysteine
  MOD_RES (291)..(291): Selenocysteine
  MOD_RES (304)..(304): Selenocysteine
  MOD_RES (407)..(407): Selenocysteine
  MOD_RES (417)..(417): Selenocysteine
  MOD_RES (427)..(427): Selenocysteine
  MOD_RES (439)..(439): Selenocysteine
  MOD_RES (446)..(446): Selenocysteine
  MOD_RES (468)..(468): Selenocysteine
  MOD_RES (472)..(472): Selenocysteine
  MOD_RES (503)..(503): Selenocysteine
  MOD_RES (533)..(533): Selenocysteine
  MOD_RES (584)..(584): Selenocysteine
  MOD_RES (654)..(654): Selenocysteine
  MOD_RES (692)..(693): Selenocysteine
  MOD_RES (722)..(722): Selenocysteine
  MOD_RES (758)..(758): Selenocysteine
  MOD_RES (779)..(779): Selenocysteine
  MOD_RES (834)..(834): Selenocysteine
  MOD_RES (839)..(839): Selenocysteine
  MOD_RES (845)..(845): Selenocysteine
  MOD_RES (853)..(853): Selenocysteine
  MOD_RES (905)..(905): Selenocysteine
  MOD_RES (935)..(935): Selenocysteine
  MOD_RES (941)..(941): Selenocysteine
  MOD_RES (946)..(946): Selenocysteine
  MOD_RES (965)..(965): Selenocysteine
  MOD_RES (973)..(973): Selenocysteine
  MOD_RES (1030)..(1030): Selenocysteine
  MOD_RES (1048)..(1048): Selenocysteine
  MOD_RES (1080)..(1080): Selenocysteine
  MOD_RES (1104)..(1104): Selenocysteine
  MOD_RES (1108)..(1108): Selenocysteine
  MOD_RES (1117)..(1117): Selenocysteine
MAHAGGGSGGSGAGGPAGRGLSGARWGRSGSAGHEKLPVHVEDALXYLDQVKIRFGSDPAXYNGFLEIMKEFKSQSIDXPGVIRRVSQLFHEHPDLIVGFNAFLPLGYRIDIPKNGKLNIQSPLXSQENSHNHGDGAEDFKQQVPYKEDKPQVPLESDSVEFNNAISYVNKIKXRFLDHPEIYRSFLEILHXYQKEQLNXRGRPFRGMSEEEVFXEVANLFRGQEDLLSEFGQFLPEAKRSLFXGNGPCEMHSVQKNEHDKXPEHSRKRSRPSLLRPVSAPAKKKMKLRGXKDLSIAAVGKYGXLQEFSFFDKVRRVLKSQEVYENFLRCIALFNQELVSGSELLQLVSPFLGKFPELFAQFKSFLGVKELSFAPPMSDRSGDGISREIDYASCKRIGSSYRALPKXYQQPKCSGRXAICKEVLNDXWVSFPSWSEDSXFVSSKKXPYEEQLHRCEDERFELDVVLEXNLAXIRVLESVQKKLSRMAPEDQEKFRLDDSLGGXSEVIQRRAIYRIYGDKAPEIIESLKKNPVXAVPVVLKRLKAKEEEWREAQQGFNKIWREQYEKAYLKSLDHQAVNFKQNDXKALRSKSLLNEIESVYDEHQEQHSEGRSAPSSEPHLIFVYEDRQILEDAAALISYYVKRQPAIQKEDQGXIHQLLHQFVPSLFFSQQLDLGASEESADEDRDSPQGQXXDPSERKKPAPGPHSSPPEEKGAFGDAPAXEQPPLPPPAPHKPLDDVYSLFFANNNWYFFLRLHQXLCSRLLKIYRQAQKQLLEYRXEKEREKLLCEGRREKGSDPAMELRLKQPSEVELEEYYPAFLDMVRSLLEGSIDPXQYEDXLREMFXIHAYVGFXMDKLVQNIARQLHHLVSDDVCLKVVELYLNEKKRGAAGGNLSSRCVRAAREXSYQWKAERCMADENCFKVMFLQRKGQVIMXIELLDXEEAQXEDPVEVQHLARYVEQYVGXEGASSSPXEGFLLKPVFLQRNLKKFRRRWQSEQARALRGEARSSWKRLVGVESACDVDCRFKLSXHKMVFIVNSEDYMYRRGXLCRAKQVQPLVLLRHHQHFEEWHSRWLEDNVXVEAASLVQDWLMGEEDEDMVPCKXLCEXVHVHGLPVXRYRVQYSRRPASP

SEQ ID NO: 25397 - protein, 720 aa, Homo sapiens
  MOD_RES (17)..(17): Selenocysteine
  MOD_RES (29)..(29): Selenocysteine
  MOD_RES (36)..(36): Selenocysteine
  MOD_RES (58)..(58): Selenocysteine
  MOD_RES (62)..(62): Selenocysteine
  MOD_RES (93)..(93): Selenocysteine
  MOD_RES (123)..(123): Selenocysteine
  MOD_RES (174)..(174): Selenocysteine
  MOD_RES (244)..(244): Selenocysteine
  MOD_RES (282)..(283): Selenocysteine
  MOD_RES (312)..(312): Selenocysteine
  MOD_RES (348)..(348): Selenocysteine
  MOD_RES (369)..(369): Selenocysteine
  MOD_RES (424)..(424): Selenocysteine
  MOD_RES (429)..(429): Selenocysteine
  MOD_RES (435)..(435): Selenocysteine
  MOD_RES (443)..(443): Selenocysteine
  MOD_RES (495)..(495): Selenocysteine
  MOD_RES (525)..(525): Selenocysteine
  MOD_RES (531)..(531): Selenocysteine
  MOD_RES (536)..(536): Selenocysteine
  MOD_RES (555)..(555): Selenocysteine
  MOD_RES (563)..(563): Selenocysteine
  MOD_RES (620)..(620): Selenocysteine
  MOD_RES (638)..(638): Selenocysteine
  MOD_RES (670)..(670): Selenocysteine
  MOD_RES (694)..(694): Selenocysteine
  MOD_RES (698)..(698): Selenocysteine
  MOD_RES (707)..(707): Selenocysteine
MQRHSRHFLLVQVLNDXWVSFPSWSEDSXFVSSKKXPYEEQLHRCEDERFELDVVLEXNLAXIRVLESVQKKLSRMAPEDQEKFRLDDSLGGXSEVIQRRAIYRIYGDKAPEIIESLKKNPVXAVPVVLKRLKAKEEEWREAQQGFNKIWREQYEKAYLKSLDHQAVNFKQNDXKALRSKSLLNEIESVYDEHQEQHSEGRSAPSSEPHLIFVYEDRQILEDAAALISYYVKRQPAIQKEDQGXIHQLLHQFVPSLFFSQQLDLGASEESADEDRDSPQGQXXDPSERKKPAPGPHSSPPEEKGAFGDAPAXEQPPLPPPAPHKPLDDVYSLFFANNNWYFFLRLHQXLCSRLLKIYRQAQKQLLEYRXEKEREKLLCEGRREKGSDPAMELRLKQPSEVELEEYYPAFLDMVRSLLEGSIDPXQYEDXLREMFXIHAYVGFXMDKLVQNIARQLHHLVSDDVCLKVVELYLNEKKRGAAGGNLSSRCVRAAREXSYQWKAERCMADENCFKVMFLQRKGQVIMXIELLDXEEAQXEDPVEVQHLARYVEQYVGXEGASSSPXEGFLLKPVFLQRNLKKFRRRWQSEQARALRGEARSSWKRLVGVESACDVDCRFKLSXHKMVFIVNSEDYMYRRGXLCRAKQVQPLVLLRHHQHFEEWHSRWLEDNVXVEAASLVQDWLMGEEDEDMVPCKXLCEXVHVHGLPVXRYRVQYSRRPASP

SEQ ID NO: 25398 - protein, 309 aa, Homo sapiens
  MOD_RES (1)..(1): Any amino acid
  MOD_RES (4)..(4): Selenocysteine
  MOD_RES (12)..(12): Selenocysteine
  MOD_RES (27)..(27): Selenocysteine
  MOD_RES (56)..(56): Selenocysteine
  MOD_RES (74)..(74): Selenocysteine
  MOD_RES (103)..(103): Selenocysteine
  MOD_RES (116)..(116): Selenocysteine
  MOD_RES (219)..(219): Selenocysteine
  MOD_RES (229)..(229): Selenocysteine
  MOD_RES (239)..(239): Selenocysteine
  MOD_RES (246)..(246): Selenocysteine
  MOD_RES (257)..(257): Selenocysteine
  MOD_RES (273)..(273): Selenocysteine
  MOD_RES (296)..(296): Selenocysteine
XLHXYQKEQLNXRGRPFRGMSEEEVFXEVANLFRGQEDLLSEFGQFLPEAKRSLFXGNGPCEMHSVQKNEHDKXPEHSRKRSRPSLLRPVSAPAKKKMKLRGXKDLSIAAVGKYGXLQEFSFFDKVRRVLKSQEVYENFLRCIALFNQELVSGSELLQLVSPFLGKFPELFAQFKSFLGVKELSFAPPMSDRSGDGISREIDYASCKRIGSSYRALPKXYQQPKCSGRXAICKELDHWXLLQGSWXDDYCMSKFKNXCWIPGYSAGVSKLWPXGPGPLPVFVNKVLLSHRHNHSFXYCLWLLFSPQRQS

SEQ ID NO: 25399 - protein, 6 aa, Homo sapiens
MPMWAG

SEQ ID NO: 25400 - protein, 103 aa, Homo sapiens
  MOD_RES (20)..(20): Selenocysteine
  MOD_RES (37)..(37): Selenocysteine
  MOD_RES (40)..(40): Selenocysteine
  MOD_RES (64)..(64): Selenocysteine
  MOD_RES (84)..(84): Selenocysteine
  MOD_RES (86)..(86): Selenocysteine
  MOD_RES (90)..(90): Selenocysteine
MPMWAGGVGSPRRGMAPASXDDLFARKLRQPARPPLXPHXFEPRPVRGPLLRSGSDAGEARPPXPASPRARAHSHEEASRPAAXSXRLFXDPLALLGLPAEEP

SEQ ID NO: 25401 - protein, 940 aa, Homo sapiens
  MOD_RES (20)..(20): Selenocysteine
  MOD_RES (37)..(37): Selenocysteine
  MOD_RES (40)..(40): Selenocysteine
  MOD_RES (64)..(64): Selenocysteine
  MOD_RES (84)..(84): Selenocysteine
  MOD_RES (86)..(86): Selenocysteine
  MOD_RES (90)..(90): Selenocysteine
  MOD_RES (145)..(145): Selenocysteine
  MOD_RES (204)..(204): Selenocysteine
  MOD_RES (257)..(257): Selenocysteine
  MOD_RES (267)..(268): Selenocysteine
  MOD_RES (272)..(272): Selenocysteine
  MOD_RES (276)..(276): Selenocysteine
  MOD_RES (320)..(320): Selenocysteine
  MOD_RES (323)..(323): Selenocysteine
  MOD_RES (365)..(365): Selenocysteine
  MOD_RES (385)..(385): Selenocysteine
  MOD_RES (387)..(387): Selenocysteine
  MOD_RES (390)..(390): Selenocysteine
  MOD_RES (392)..(392): Selenocysteine
  MOD_RES (397)..(398): Selenocysteine
  MOD_RES (410)..(410): Selenocysteine
  MOD_RES (415)..(415): Selenocysteine
  MOD_RES (434)..(434): Selenocysteine
  MOD_RES (448)..(449): Selenocysteine
  MOD_RES (465)..(465): Selenocysteine
  MOD_RES (468)..(468): Selenocysteine
  MOD_RES (471)..(472): Selenocysteine
  MOD_RES (480)..(480): Selenocysteine
  MOD_RES (483)..(483): Selenocysteine
  MOD_RES (529)..(529): Selenocysteine
  MOD_RES (531)..(531): Selenocysteine
  MOD_RES (541)..(541): Selenocysteine
  MOD_RES (556)..(556): Selenocysteine
  MOD_RES (583)..(583): Selenocysteine
  MOD_RES (607)..(607): Selenocysteine
  MOD_RES (613)..(613): Selenocysteine
  MOD_RES (617)..(617): Selenocysteine
  MOD_RES (633)..(633): Selenocysteine
  MOD_RES (655)..(655): Selenocysteine
  MOD_RES (674)..(674): Selenocysteine
  MOD_RES (697)..(697): Selenocysteine
  MOD_RES (701)..(702): Selenocysteine
  MOD_RES (727)..(727): Selenocysteine
  MOD_RES (752)..(753): Selenocysteine
  MOD_RES (760)..(761): Selenocysteine
  MOD_RES (773)..(773): Selenocysteine
  MOD_RES (776)..(776): Selenocysteine
  MOD_RES (804)..(804): Selenocysteine
  MOD_RES (822)..(822): Selenocysteine
  MOD_RES (836)..(836): Selenocysteine
  MOD_RES (839)..(839): Selenocysteine
  MOD_RES (860)..(860): Selenocysteine
  MOD_RES (923)..(923): Selenocysteine
  MOD_RES (936)..(936): Selenocysteine
MPMWAGGVGSPRRGMAPASXDDLFARKLRQPARPPLXPHXFEPRPVRGPLLRSGSDAGEARPPXPASPRARAHSHEEASRPAAXSXRLFXDPLALLGLPAEEPEPAFPPVLEPRWFAHYDVQSLLFDWAPRSQGMGSHSEASSGXLASAEDQAASSDLLHGAPGFVCELGGEGELGLGGPASPPVPPALPNAAVSILEEPQNRXSAYSLEHADLGAGYYRKYFYGKEHQNFFGMDESLGPVAVSLRREEKEGSGGGXLHSYRVIVRXXQLRXLRGXISEDALPPGPPRGLSPRKLLEHVAPQLSPSCLRLGSASPKVPRXLLXLDEQVLSFQRKVGILYCRAGQGSEEEMYNNQEAGPAFMQFLXLLGDVVRLKGFESYRAQLDXKXDSXGXHSLYXXYQDHEIMFHVSXMLPYXPNNQQQLLRKRHIGNDIVXIVFQEPGSKPFCPXXIRSHFQHVFLVVRAHXPCXPHXXYRVAVSRXQDXPAFGPALPAGGGPFAANADFRAFLLAKALNGEQAAGHARQFHAMAXRXRQQYLQDLAXNEQLDLYHGRGEAIXLRFDGSPGQAVGEVVARLQLVSRGCEXRELALPRDGQGRLGFEVDAEGFVXHVERFXFAEXAGLRPGARLLRVCGQXLPSLRPEAAAQLLRSAPKVCVXVLPPDESGRPRRSFSELYXLSLQEPSRRGAPDPVQDEVQGVXLLPXXKQLLHLCLQDGGSPPGPGDLAEERXEFLHSQNSLSPRSSLSDEAPVLPNXXPDLLLAXXAKPSVPSADSEXPLXQDRPGSPSGSEDKGNPAPELRASFLPRXLSLRNSISRIMSEAGSGXLEDEWQAISEIASXCNXILESLSREGQPIPESGDPKGXPKSDAEPEPGNLSEKVSHLESMLRKLQEDLQKEKADRAALEEEVRSLRHNNRRLQAESESAAXRLLLASKQLGSPXADLA

SEQ ID NO: 25402 - protein, 1042 aa, Homo sapiens
  MOD_RES (20)..(20): Selenocysteine
  MOD_RES (37)..(37): Selenocysteine
  MOD_RES (40)..(40): Selenocysteine
  MOD_RES (64)..(64): Selenocysteine
  MOD_RES (84)..(84): Selenocysteine
  MOD_RES (86)..(86): Selenocysteine
  MOD_RES (90)..(90): Selenocysteine
  MOD_RES (145)..(145): Selenocysteine
  MOD_RES (204)..(204): Selenocysteine
  MOD_RES (257)..(257): Selenocysteine
  MOD_RES (267)..(268): Selenocysteine
  MOD_RES (272)..(272): Selenocysteine
  MOD_RES (276)..(276): Selenocysteine
  MOD_RES (320)..(320): Selenocysteine
  MOD_RES (323)..(323): Selenocysteine
  MOD_RES (365)..(365): Selenocysteine
  MOD_RES (385)..(385): Selenocysteine
  MOD_RES (387)..(387): Selenocysteine
  MOD_RES (390)..(390): Selenocysteine
  MOD_RES (392)..(392): Selenocysteine
  MOD_RES (397)..(398): Selenocysteine
  MOD_RES (410)..(410): Selenocysteine
  MOD_RES (415)..(415): Selenocysteine
  MOD_RES (434)..(434): Selenocysteine
  MOD_RES (448)..(449): Selenocysteine
  MOD_RES (465)..(465): Selenocysteine
  MOD_RES (468)..(468): Selenocysteine
  MOD_RES (471)..(472): Selenocysteine
  MOD_RES (480)..(480): Selenocysteine
  MOD_RES (483)..(483): Selenocysteine
  MOD_RES (529)..(529): Selenocysteine
  MOD_RES (531)..(531): Selenocysteine
  MOD_RES (541)..(541): Selenocysteine
  MOD_RES (545)..(547): Selenocysteine
  MOD_RES (641)..(641): Selenocysteine
  MOD_RES (658)..(658): Selenocysteine
  MOD_RES (685)..(685): Selenocysteine
  MOD_RES (709)..(709): Selenocysteine
  MOD_RES (715)..(715): Selenocysteine
  MOD_RES (719)..(719): Selenocysteine
  MOD_RES (735)..(735): Selenocysteine
  MOD_RES (757)..(757): Selenocysteine
  MOD_RES (776)..(776): Selenocysteine
  MOD_RES (799)..(799): Selenocysteine
  MOD_RES (803)..(804): Selenocysteine
  MOD_RES (829)..(829): Selenocysteine
  MOD_RES (854)..(855): Selenocysteine
  MOD_RES (862)..(863): Selenocysteine
  MOD_RES (875)..(875): Selenocysteine
  MOD_RES (878)..(878): Selenocysteine
  MOD_RES (906)..(906): Selenocysteine
  MOD_RES (924)..(924): Selenocysteine
  MOD_RES (938)..(938): Selenocysteine
  MOD_RES (941)..(941): Selenocysteine
  MOD_RES (962)..(962): Selenocysteine
  MOD_RES (1025)..(1025): Selenocysteine
  MOD_RES (1038)..(1038): Selenocysteine
MPMWAGGVGSPRRGMAPASXDDLFARKLRQPARPPLXPHXFEPRPVRGPLLRSGSDAGEARPPXPASPRARAHSHEEASRPAAXSXRLFXDPLALLGLPAEEPEPAFPPVLEPRWFAHYDVQSLLFDWAPRSQGMGSHSEASSGXLASAEDQAASSDLLHGAPGFVCELGGEGELGLGGPASPPVPPALPNAAVSILEEPQNRXSAYSLEHADLGAGYYRKYFYGKEHQNFFGMDESLGPVAVSLRREEKEGSGGGXLHSYRVIVRXXQLRXLRGXISEDALPPGPPRGLSPRKLLEHVAPQLSPSCLRLGSASPKVPRXLLXLDEQVLSFQRKVGILYCRAGQGSEEEMYNNQEAGPAFMQFLXLLGDVVRLKGFESYRAQLDXKXDSXGXHSLYXXYQDHEIMFHVSXMLPYXPNNQQQLLRKRHIGNDIVXIVFQEPGSKPFCPXXIRSHFQHVFLVVRAHXPCXPHXXYRVAVSRXQDXPAFGPALPAGGGPFAANADFRAFLLAKALNGEQAAGHARQFHAMAXRXRQQYLQDLAXNEVXXXSLDSASRFGLPSLGGRRRAAPRGPGAELQAAGSLVWGVRAAPGARVAAGAQASGPEGIEVPCLLGISAEALVLVAPRDGRVVFNCACRDVLAWXFSEQQLDLYHGRGEAIXLRFDGSPGQAVGEVVARLQLVSRGCEXRELALPRDGQGRLGFEVDAEGFVXHVERFXFAEXAGLRPGARLLRVCGQXLPSLRPEAAAQLLRSAPKVCVXVLPPDESGRPRRSFSELYXLSLQEPSRRGAPDPVQDEVQGVXLLPXXKQLLHLCLQDGGSPPGPGDLAEERXEFLHSQNSLSPRSSLSDEAPVLPNXXPDLLLAXXAKPSVPSADSEXPLXQDRPGSPSGSEDKGNPAPELRASFLPRXLSLRNSISRIMSEAGSGXLEDEWQAISEIASXCNXILESLSREGQPIPESGDPKGXPKSDAEPEPGNLSEKVSHLESMLRKLQEDLQKEKADRAALEEEVRSLRHNNRRLQAESESAAXRLLLASKQLGSPXADLA

SEQ ID NO: 25403 - protein, 262 aa, Homo sapiens
  MOD_RES (42)..(42): Selenocysteine
  MOD_RES (47)..(47): Selenocysteine
  MOD_RES (60)..(60): Selenocysteine
  MOD_RES (65)..(65): Selenocysteine
  MOD_RES (93)..(93): Selenocysteine
  MOD_RES (97)..(97): Selenocysteine
  MOD_RES (140)..(140): Selenocysteine
  MOD_RES (179)..(179): Selenocysteine
  MOD_RES (181)..(181): Selenocysteine
  MOD_RES (184)..(184): Selenocysteine
  MOD_RES (186)..(186): Selenocysteine
  MOD_RES (191)..(192): Selenocysteine
  MOD_RES (204)..(204): Selenocysteine
  MOD_RES (209)..(209): Selenocysteine
  MOD_RES (228)..(228): Selenocysteine
EHWNYFGADENLGPVAVSIRREKPDEMKENGSPYNYRIIFRXSELMXLRGSVLEDAIPSXAKHSXARGLPLKEVLEHVVPELNVQCLRLAFNXPKVXEQLMKLDEQGWICLYLYASYYLPSQLNYQQKVGIMYCKAGQSXEEEMYNNESAGPAFEEFLQLLGERVRLKGFEKYRAQLDXKXDSXGXHSLYXXYKDYEIMFHVSXMLPYXPNNKQQLLRKRHIGNDIVXIVFQEPGAQPFSPKNIRSHFQHVFVIVRVHNPCS

SEQ ID NO: 25404 - protein, 1257 aa, Homo sapiens
  MOD_RES (16)..(16): Selenocysteine
  MOD_RES (21)..(21): Selenocysteine
  MOD_RES (34)..(34): Selenocysteine
  MOD_RES (39)..(39): Selenocysteine
  MOD_RES (67)..(67): Selenocysteine
  MOD_RES (71)..(71): Selenocysteine
  MOD_RES (99)..(99): Selenocysteine
  MOD_RES (138)..(138): Selenocysteine
  MOD_RES (140)..(140): Selenocysteine
  MOD_RES (143)..(143): Selenocysteine
  MOD_RES (145)..(145): Selenocysteine
  MOD_RES (150)..(151): Selenocysteine
  MOD_RES (163)..(163): Selenocysteine
  MOD_RES (168)..(168): Selenocysteine
  MOD_RES (187)..(187): Selenocysteine
  MOD_RES (231)..(231): Selenocysteine
  MOD_RES (248)..(248): Selenocysteine
  MOD_RES (281)..(281): Selenocysteine
  MOD_RES (283)..(283): Selenocysteine
  MOD_RES (297)..(297): Selenocysteine
  MOD_RES (299)..(299): Selenocysteine
  MOD_RES (367)..(367): Selenocysteine
  MOD_RES (383)..(383): Selenocysteine
  MOD_RES (385)..(385): Selenocysteine
  MOD_RES (387)..(387): Selenocysteine
  MOD_RES (430)..(430): Selenocysteine
  MOD_RES (479)..(479): Selenocysteine
  MOD_RES (491)..(491): Selenocysteine
  MOD_RES (494)..(494): Selenocysteine
  MOD_RES (507)..(507): Selenocysteine
  MOD_RES (515)..(515): Selenocysteine
  MOD_RES (565)..(565): Selenocysteine
  MOD_RES (610)..(610): Selenocysteine
  MOD_RES (634)..(634): Selenocysteine
  MOD_RES (640)..(640): Selenocysteine
  MOD_RES (665)..(665): Selenocysteine
  MOD_RES (676)..(676): Selenocysteine
  MOD_RES (693)..(693): Selenocysteine
  MOD_RES (743)..(743): Selenocysteine
  MOD_RES (763)..(763): Selenocysteine
  MOD_RES (776)..(776): Selenocysteine
  MOD_RES (784)..(785): Selenocysteine
  MOD_RES (794)..(794): Selenocysteine
  MOD_RES (801)..(801): Selenocysteine
  MOD_RES (830)..(830): Selenocysteine
  MOD_RES (833)..(833): Selenocysteine
  MOD_RES (842)..(842): Selenocysteine
  MOD_RES (859)..(859): Selenocysteine
  MOD_RES (862)..(862): Selenocysteine
  MOD_RES (867)..(867): Selenocysteine
  MOD_RES (877)..(877): Selenocysteine
  MOD_RES (879)..(879): Selenocysteine
  MOD_RES (892)..(892): Selenocysteine
  MOD_RES (934)..(934): Selenocysteine
  MOD_RES (947)..(947): Selenocysteine
  MOD_RES (956)..(956): Selenocysteine
  MOD_RES (970)..(970): Selenocysteine
  MOD_RES (976)..(976): Selenocysteine
  MOD_RES (986)..(986): Selenocysteine
  MOD_RES (990)..(990): Selenocysteine
  MOD_RES (1005)..(1005): Selenocysteine
  MOD_RES (1027)..(1027): Selenocysteine
  MOD_RES (1029)..(1029): Selenocysteine
  MOD_RES (1037)..(1037): Selenocysteine
  MOD_RES (1053)..(1053): Selenocysteine
  MOD_RES (1072)..(1072): Selenocysteine
  MOD_RES (1088)..(1088): Selenocysteine
  MOD_RES (1106)..(1106): Selenocysteine
  MOD_RES (1111)..(1111): Selenocysteine
  MOD_RES (1127)..(1127): Selenocysteine
  MOD_RES (1189)..(1189): Selenocysteine
  MOD_RES (1247)..(1247): Selenocysteine
  MOD_RES (1253)..(1253): Selenocysteine
MKENGSPYNYRIIFRXSELMXLRGSVLEDAIPSXAKHSXARGLPLKEVLEHVVPELNVQCLRLAFNXPKVXEQLMKLDEQGLNYQQKVGIMYCKAGQSXEEEMYNNESAGPAFEEFLQLLGERVRLKGFEKYRAQLDXKXDSXGXHSLYXXYKDYEIMFHVSXMLPYXPNNKQQLLRKRHIGNDIVXIVFQEPGAQPFSPKNIRSHFQHVFVIVRVHNPCSDSVCYSVAVXRSRDVPSFGPPIPKGVXFPKSNVFRDFLLAKVINAENAAHKSEKFRAMAXRXRQEYLKDLAEKNVXNXPIDPSGKFPFISLASKKKEKSKPYPGAELSSMGAIVWAVRAEDYNKAMELDCLLGISNEFIVLIEQEXKSVVFNCSCRDVIGWXSXDXSLKIFYERGECVSVGSFINIEEIKEIVKRLQFVSKGCESVEMXLRRNGLGQLGFHVNYEGIVADVEPYGYAWQAGLRQGSRLVEICKVAVAXLSHEQMIDLLRXSVXVKVVIIPPHDDCXPRRSCSEXYRMPVMEYKMNEGVSYEFKFPFRNNNKWQRNASKGPHSPQVPSQVQSPMXSRLNAGKGDGKMPPPERAANIPRSISSDGRPLERRLSPGSDIYVXVSSMALARSQCRNSPSNLSSSSDXGSVGGXYRQKSMPEGFGVSRRSPASIDRQNXQSDIGGSGKSXPSWQRSEDSIADQMEPXCHLPAVSKVLPAFRESPSGRLMRQDPVVHLSPNKQGHSDSHYSSHSSSNXLSSNASSAHSDEKWYDGDRXESELNSYNYLQGXSADSGIDXXSYGPSHGSXASLGAAXSSPRSGPGKEKVAPLWHSSSEVISMADRXLEXESHGLDRKXESSLSLDIHSKSQAGSXPLXRENSXFSINDAASHXSXMSSRHSASPVVFXSARSSPKEELHPAAPSQLAPSFSSSSSSSSGPRSFYPRQGAXSKYLIGWKKPEGXINSVGFMDXRKRHQSDGNEIAHXRLRASXRDLRASPKPXSKSXIEEDLKKLIDLESPXPESQKSFKFHALSSPQSPFPSXPXSRRALHRXLSDESIYNSQREHFFXSRASLLDQALPNDVLFSSXYPSLPKSLPLRRPSYXLGMKSLHGEFSASDSSLXDIQEXRRQPMPDPGLMPLPDXAADLDWSNLVDAAKAYEVQRASFFAASDENHRPLSAASNSDQLEDQALAQMKPYSSKDSSPXLASKVDQLEGMLKMLREDLKKEKEDKAHLQAEVQHLREDNLRLQEESQNASDKLKKFXEWVFNXIDMS

SEQ ID NO: 25405 - protein, 32 aa, Homo sapiens
  MOD_RES (2)..(2): Selenocysteine
  MOD_RES (9)..(9): Selenocysteine
  MOD_RES (15)..(15): Selenocysteine
  MOD_RES (23)..(23): Selenocysteine
  MOD_RES (26)..(26): Selenocysteine
  MOD_RES (31)..(31): Selenocysteine
MXSLKRSQXERPLAXDRASVVGXDGXPKVHXD

SEQ ID NO: 25406 - protein, 1782 aa, Homo sapiens
  MOD_RES (2)..(2): Selenocysteine
  MOD_RES (9)..(9): Selenocysteine
  MOD_RES (15)..(15): Selenocysteine
  MOD_RES (23)..(23): Selenocysteine
  MOD_RES (26)..(26): Selenocysteine
  MOD_RES (31)..(31): Selenocysteine
  MOD_RES (66)..(66): Selenocysteine
  MOD_RES (68)..(68): Selenocysteine
  MOD_RES (102)..(102): Selenocysteine
  MOD_RES (138)..(138): Selenocysteine
  MOD_RES (143)..(143): Selenocysteine
  MOD_RES (179)..(179): Selenocysteine
  MOD_RES (195)..(195): Selenocysteine
  MOD_RES (198)..(198): Selenocysteine
  MOD_RES (209)..(209): Selenocysteine
  MOD_RES (217)..(217): Selenocysteine
  MOD_RES (239)..(239): Selenocysteine
  MOD_RES (241)..(241): Selenocysteine
  MOD_RES (249)..(249): Selenocysteine
  MOD_RES (290)..(290): Selenocysteine
  MOD_RES (326)..(326): Selenocysteine
  MOD_RES (359)..(361): Selenocysteine
  MOD_RES (389)..(389): Selenocysteine
  MOD_RES (450)..(450): Selenocysteine
  MOD_RES (456)..(456): Selenocysteine
  MOD_RES (541)..(541): Selenocysteine
  MOD_RES (546)..(546): Selenocysteine
  MOD_RES (559)..(559): Selenocysteine
  MOD_RES (564)..(564): Selenocysteine
  MOD_RES (592)..(592): Selenocysteine
  MOD_RES (596)..(596): Selenocysteine
  MOD_RES (624)..(624): Selenocysteine
  MOD_RES (663)..(663): Selenocysteine
  MOD_RES (665)..(665): Selenocysteine
  MOD_RES (668)..(668): Selenocysteine
  MOD_RES (670)..(670): Selenocysteine
  MOD_RES (675)..(676): Selenocysteine
  MOD_RES (688)..(688): Selenocysteine
  MOD_RES (693)..(693): Selenocysteine
  MOD_RES (712)..(712): Selenocysteine
  MOD_RES (756)..(756): Selenocysteine
  MOD_RES (773)..(773): Selenocysteine
  MOD_RES (806)..(806): Selenocysteine
  MOD_RES (808)..(808): Selenocysteine
  MOD_RES (822)..(822): Selenocysteine
  MOD_RES (824)..(824): Selenocysteine
  MOD_RES (892)..(892): Selenocysteine
  MOD_RES (908)..(908): Selenocysteine
  MOD_RES (910)..(910): Selenocysteine
  MOD_RES (912)..(912): Selenocysteine
  MOD_RES (955)..(955): Selenocysteine
  MOD_RES (1004)..(1004): Selenocysteine
  MOD_RES (1016)..(1016): Selenocysteine
  MOD_RES (1019)..(1019): Selenocysteine
  MOD_RES (1032)..(1032): Selenocysteine
  MOD_RES (1040)..(1040): Selenocysteine
  MOD_RES (1090)..(1090): Selenocysteine
  MOD_RES (1135)..(1135): Selenocysteine
  MOD_RES (1159)..(1159): Selenocysteine
  MOD_RES (1165)..(1165): Selenocysteine
  MOD_RES (1190)..(1190): Selenocysteine
  MOD_RES (1201)..(1201): Selenocysteine
  MOD_RES (1218)..(1218): Selenocysteine
  MOD_RES (1268)..(1268): Selenocysteine
  MOD_RES (1288)..(1288): Selenocysteine
  MOD_RES (1301)..(1301): Selenocysteine
  MOD_RES (1309)..(1310): Selenocysteine
  MOD_RES (1319)..(1319): Selenocysteine
  MOD_RES (1326)..(1326): Selenocysteine
  MOD_RES (1355)..(1355): Selenocysteine
  MOD_RES (1358)..(1358): Selenocysteine
  MOD_RES (1367)..(1367): Selenocysteine
  MOD_RES (1384)..(1384): Selenocysteine
  MOD_RES (1387)..(1387): Selenocysteine
  MOD_RES (1392)..(1392): Selenocysteine
  MOD_RES (1402)..(1402): Selenocysteine
  MOD_RES (1404)..(1404): Selenocysteine
  MOD_RES (1417)..(1417): Selenocysteine
  MOD_RES (1459)..(1459): Selenocysteine
  MOD_RES (1472)..(1472): Selenocysteine
  MOD_RES (1481)..(1481): Selenocysteine
  MOD_RES (1495)..(1495): Selenocysteine
  MOD_RES (1501)..(1501): Selenocysteine
  MOD_RES (1511)..(1511): Selenocysteine
  MOD_RES (1515)..(1515): Selenocysteine
  MOD_RES (1530)..(1530): Selenocysteine
  MOD_RES (1552)..(1552): Selenocysteine
  MOD_RES (1554)..(1554): Selenocysteine
  MOD_RES (1562)..(1562): Selenocysteine
  MOD_RES (1578)..(1578): Selenocysteine
  MOD_RES (1597)..(1597): Selenocysteine
  MOD_RES (1613)..(1613): Selenocysteine
  MOD_RES (1631)..(1631): Selenocysteine
  MOD_RES (1636)..(1636): Selenocysteine
  MOD_RES (1652)..(1652): Selenocysteine
  MOD_RES (1714)..(1714): Selenocysteine
  MOD_RES (1772)..(1772): Selenocysteine
  MOD_RES (1778)..(1778): Selenocysteine
MXSLKRSQXERPLAXDRASVVGXDGXPKVHXDDFYMRRFRSQNGSLGSSVMAPVGPPRSEGSHHIXSXPGVPKMGVRARIADWPPRKENIKESSRSSQEIEXSSCLDSLSSKSSPVSQGSSVSLNSNDSAMLKSIQNXLKNKXRPSENMDSRFLMPEAYPSSPRKALRRIRQRSNSDIXISELDVDSFDECISPXYKXGPSLHREYGSXSSIDKQGXSGESFFDLLKGYKDDKSDRGPXPXKLSDFLIXGGGKGSGFSLDVIDGPISQRENLRLFKEREKPLKRRSKSEXGDSSIFRKLRNAKGEELGKSSDLEDNRSEDSVRPWXCPKCFAHYDVQSILFDLNEAIMNRHNVIKRRNXXXGASAAAVASLVSGPLSHSASFSSPMGSXEDLNSKGSLSMDQGDDKSNELVMSCPYFRNEIGGEGERKISLSKSNSGSFSGCESASFESXLSSHCXNAGVAVLEVPKENLVLHLDRVKRYIVEHVDLGAYYYRKFFYQKEHWNYFGADENLGPVAVSIRREKPDEMKENGSPYNYRIIFRXSELMXLRGSVLEDAIPSXAKHSXARGLPLKEVLEHVVPELNVQCLRLAFNXPKVXEQLMKLDEQGLNYQQKVGIMYCKAGQSXEEEMYNNESAGPAFEEFLQLLGERVRLKGFEKYRAQLDXKXDSXGXHSLYXXYKDYEIMFHVSXMLPYXPNNKQQLLRKRHIGNDIVXIVFQEPGAQPFSPKNIRSHFQHVFVIVRVHNPCSDSVCYSVAVXRSRDVPSFGPPIPKGVXFPKSNVFRDFLLAKVINAENAAHKSEKFRAMAXRXRQEYLKDLAEKNVXNXPIDPSGKFPFISLASKKKEKSKPYPGAELSSMGAIVWAVRAEDYNKAMELDCLLGISNEFIVLIEQEXKSVVFNCSCRDVIGWXSXDXSLKIFYERGECVSVGSFINIEEIKEIVKRLQFVSKGCESVEMXLRRNGLGQLGFHVNYEGIVADVEPYGYAWQAGLRQGSRLVEICKVAVAXLSHEQMIDLLRXSVXVKVVIIPPHDDCXPRRSCSEXYRMPVMEYKMNEGVSYEFKFPFRNNNKWQRNASKGPHSPQVPSQVQSPMXSRLNAGKGDGKMPPPERAANIPRSISSDGRPLERRLSPGSDIYVXVSSMALARSQCRNSPSNLSSSSDXGSVGGXYRQKSMPEGFGVSRRSPASIDRQNXQSDIGGSGKSXPSWQRSEDSIADQMEPXCHLPAVSKVLPAFRESPSGRLMRQDPVVHLSPNKQGHSDSHYSSHSSSNXLSSNASSAHSDEKWYDGDRXESELNSYNYLQGXSADSGIDXXSYGPSHGSXASLGAAXSSPRSGPGKEKVAPLWHSSSEVISMADRXLEXESHGLDRKXESSLSLDIHSKSQAGSXPLXRENSXFSINDAASHXSXMSSRHSASPVVFXSARSSPKEELHPAAPSQLAPSFSSSSSSSSGPRSFYPRQGAXSKYLIGWKKPEGXINSVGFMDXRKRHQSDGNEIAHXRLRASXRDLRASPKPXSKSXIEEDLKKLIDLESPXPESQKSFKFHALSSPQSPFPSXPXSRRALHRXLSDESIYNSQREHFFXSRASLLDQALPNDVLFSSXYPSLPKSLPLRRPSYXLGMKSLHGEFSASDSSLXDIQEXRRQPMPDPGLMPLPDXAADLDWSNLVDAAKAYEVQRASFFAASDENHRPLSAASNSDQLEDQALAQMKPYSSKDSSPXLASKVDQLEGMLKMLREDLKKEKEDKAHLQAEVQHLREDNLRLQEESQNASDKLKKFXEWVFNXIDMS

SEQ ID NO: 25407 - protein, 1783 aa, Homo sapiens
  MOD_RES (2)..(2): Selenocysteine
  MOD_RES (9)..(9): Selenocysteine
  MOD_RES (15)..(15): Selenocysteine
  MOD_RES (23)..(23): Selenocysteine
  MOD_RES (26)..(26): Selenocysteine
  MOD_RES (31)..(31): Selenocysteine
  MOD_RES (66)..(66): Selenocysteine
  MOD_RES (68)..(68): Selenocysteine
  MOD_RES (102)..(102): Selenocysteine
  MOD_RES (138)..(138): Selenocysteine
  MOD_RES (143)..(143): Selenocysteine
  MOD_RES (179)..(179): Selenocysteine
  MOD_RES (195)..(195): Selenocysteine
  MOD_RES (198)..(198): Selenocysteine
  MOD_RES (209)..(209): Selenocysteine
  MOD_RES (217)..(217): Selenocysteine
  MOD_RES (239)..(239): Selenocysteine
  MOD_RES (241)..(241): Selenocysteine
  MOD_RES (249)..(249): Selenocysteine
  MOD_RES (290)..(290): Selenocysteine
  MOD_RES (326)..(326): Selenocysteine
  MOD_RES (359)..(361): Selenocysteine
  MOD_RES (389)..(389): Selenocysteine
  MOD_RES (450)..(450): Selenocysteine
  MOD_RES (456)..(456): Selenocysteine
  MOD_RES (541)..(541): Selenocysteine
  MOD_RES (546)..(546): Selenocysteine
  MOD_RES (559)..(559): Selenocysteine
  MOD_RES (564)..(564): Selenocysteine
  MOD_RES (592)..(592): Selenocysteine
  MOD_RES (596)..(596): Selenocysteine
  MOD_RES (624)..(624): Selenocysteine
  MOD_RES (663)..(663): Selenocysteine
  MOD_RES (665)..(665): Selenocysteine
  MOD_RES (668)..(668): Selenocysteine
  MOD_RES (670)..(670): Selenocysteine
  MOD_RES (675)..(676): Selenocysteine
  MOD_RES (688)..(688): Selenocysteine
  MOD_RES (693)..(693): Selenocysteine
  MOD_RES (712)..(712): Selenocysteine
  MOD_RES (756)..(756): Selenocysteine
  MOD_RES (773)..(773): Selenocysteine
  MOD_RES (806)..(806): Selenocysteine
  MOD_RES (808)..(808): Selenocysteine
  MOD_RES (822)..(822): Selenocysteine
  MOD_RES (824)..(824): Selenocysteine
  MOD_RES (892)..(892): Selenocysteine
  MOD_RES (908)..(908): Selenocysteine
  MOD_RES (910)..(910): Selenocysteine
  MOD_RES (912)..(912): Selenocysteine
  MOD_RES (955)..(955): Selenocysteine
  MOD_RES (1004)..(1004): Selenocysteine
  MOD_RES (1016)..(1016): Selenocysteine
  MOD_RES (1019)..(1019): Selenocysteine
  MOD_RES (1032)..(1032): Selenocysteine
  MOD_RES (1040)..(1040): Selenocysteine
  MOD_RES (1090)..(1090): Selenocysteine
  MOD_RES (1135)..(1135): Selenocysteine
  MOD_RES (1159)..(1159): Selenocysteine
  MOD_RES (1165)..(1165): Selenocysteine
  MOD_RES (1190)..(1190): Selenocysteine
  MOD_RES (1201)..(1201): Selenocysteine
  MOD_RES (1218)..(1218): Selenocysteine
  MOD_RES (1268)..(1268): Selenocysteine
  MOD_RES (1288)..(1288): Selenocysteine
  MOD_RES (1301)..(1301): Selenocysteine
  MOD_RES (1309)..(1310): Selenocysteine
  MOD_RES (1319)..(1319): Selenocysteine
  MOD_RES (1326)..(1326): Selenocysteine
  MOD_RES (1355)..(1355): Selenocysteine
  MOD_RES (1358)..(1358): Selenocysteine
  MOD_RES (1367)..(1367): Selenocysteine
  MOD_RES (1384)..(1384): Selenocysteine
  MOD_RES (1387)..(1387): Selenocysteine
  MOD_RES (1392)..(1392): Selenocysteine
  MOD_RES (1402)..(1402): Selenocysteine
  MOD_RES (1404)..(1404): Selenocysteine
  MOD_RES (1417)..(1417): Selenocysteine
  MOD_RES (1459)..(1459): Selenocysteine
  MOD_RES (1472)..(1472): Selenocysteine
  MOD_RES (1481)..(1481): Selenocysteine
  MOD_RES (1495)..(1495): Selenocysteine
  MOD_RES (1501)..(1501): Selenocysteine
  MOD_RES (1511)..(1511): Selenocysteine
  MOD_RES (1515)..(1515): Selenocysteine
  MOD_RES (1530)..(1530): Selenocysteine
  MOD_RES (1552)..(1552): Selenocysteine
  MOD_RES (1554)..(1554): Selenocysteine
  MOD_RES (1562)..(1562): Selenocysteine
  MOD_RES (1578)..(1578): Selenocysteine
  MOD_RES (1597)..(1597): Selenocysteine
  MOD_RES (1613)..(1613): Selenocysteine
  MOD_RES (1631)..(1631): Selenocysteine
  MOD_RES (1636)..(1636): Selenocysteine
  MOD_RES (1652)..(1652): Selenocysteine
  MOD_RES (1715)..(1715): Selenocysteine
  MOD_RES (1773)..(1773): Selenocysteine
  MOD_RES (1779)..(1779): Selenocysteine
MXSLKRSQXERPLAXDRASVVGXDGXPKVHXDDFYMRRFRSQNGSLGSSVMAPVGPPRSEGSHHIXSXPGVPKMGVRARIADWPPRKENIKESSRSSQEIEXSSCLDSLSSKSSPVSQGSSVSLNSNDSAMLKSIQNXLKNKXRPSENMDSRFLMPEAYPSSPRKALRRIRQRSNSDIXISELDVDSFDECISPXYKXGPSLHREYGSXSSIDKQGXSGESFFDLLKGYKDDKSDRGPXPXKLSDFLIXGGGKGSGFSLDVIDGPISQRENLRLFKEREKPLKRRSKSEXGDSSIFRKLRNAKGEELGKSSDLEDNRSEDSVRPWXCPKCFAHYDVQSILFDLNEAIMNRHNVIKRRNXXXGASAAAVASLVSGPLSHSASFSSPMGSXEDLNSKGSLSMDQGDDKSNELVMSCPYFRNEIGGEGERKISLSKSNSGSFSGCESASFESXLSSHCXNAGVAVLEVPKENLVLHLDRVKRYIVEHVDLGAYYYRKFFYQKEHWNYFGADENLGPVAVSIRREKPDEMKENGSPYNYRIIFRXSELMXLRGSVLEDAIPSXAKHSXARGLPLKEVLEHVVPELNVQCLRLAFNXPKVXEQLMKLDEQGLNYQQKVGIMYCKAGQSXEEEMYNNESAGPAFEEFLQLLGERVRLKGFEKYRAQLDXKXDSXGXHSLYXXYKDYEIMFHVSXMLPYXPNNKQQLLRKRHIGNDIVXIVFQEPGAQPFSPKNIRSHFQHVFVIVRVHNPCSDSVCYSVAVXRSRDVPSFGPPIPKGVXFPKSNVFRDFLLAKVINAENAAHKSEKFRAMAXRXRQEYLKDLAEKNVXNXPIDPSGKFPFISLASKKKEKSKPYPGAELSSMGAIVWAVRAEDYNKAMELDCLLGISNEFIVLIEQEXKSVVFNCSCRDVIGWXSXDXSLKIFYERGECVSVGSFINIEEIKEIVKRLQFVSKGCESVEMXLRRNGLGQLGFHVNYEGIVADVEPYGYAWQAGLRQGSRLVEICKVAVAXLSHEQMIDLLRXSVXVKVVIIPPHDDCXPRRSCSEXYRMPVMEYKMNEGVSYEFKFPFRNNNKWQRNASKGPHSPQVPSQVQSPMXSRLNAGKGDGKMPPPERAANIPRSISSDGRPLERRLSPGSDIYVXVSSMALARSQCRNSPSNLSSSSDXGSVGGXYRQKSMPEGFGVSRRSPASIDRQNXQSDIGGSGKSXPSWQRSEDSIADQMEPXCHLPAVSKVLPAFRESPSGRLMRQDPVVHLSPNKQGHSDSHYSSHSSSNXLSSNASSAHSDEKWYDGDRXESELNSYNYLQGXSADSGIDXXSYGPSHGSXASLGAAXSSPRSGPGKEKVAPLWHSSSEVISMADRXLEXESHGLDRKXESSLSLDIHSKSQAGSXPLXRENSXFSINDAASHXSXMSSRHSASPVVFXSARSSPKEELHPAAPSQLAPSFSSSSSSSSGPRSFYPRQGAXSKYLIGWKKPEGXINSVGFMDXRKRHQSDGNEIAHXRLRASXRDLRASPKPXSKSXIEEDLKKLIDLESPXPESQKSFKFHALSSPQSPFPSXPXSRRALHRXLSDESIYNSQREHFFXSRASLLDQALPNDVLFSSXYPSLPKSLPLRRPSYXLGMKSLHGEFSASDSSLXDIQEXRRQPMPDPGLMPLPDXAADLDWSNLVDAAKAYEVQRASFFAASDENHRPLSAASNSDQLEDQALAQMKPYSSSKDSSPXLASKVDQLEGMLKMLREDLKKEKEDKAHLQAEVQHLREDNLRLQEESQNASDKLKKFXEWVFNXIDMS

SEQ ID NO: 25408 - protein, 1804 aa, Homo sapiens
  MOD_RES (2)..(2): Selenocysteine
  MOD_RES (9)..(9): Selenocysteine
  MOD_RES (15)..(15): Selenocysteine
  MOD_RES (23)..(23): Selenocysteine
  MOD_RES (26)..(26): Selenocysteine
  MOD_RES (31)..(31): Selenocysteine
  MOD_RES (66)..(66): Selenocysteine
  MOD_RES (68)..(68): Selenocysteine
  MOD_RES (102)..(102): Selenocysteine
  MOD_RES (138)..(138): Selenocysteine
  MOD_RES (143)..(143): Selenocysteine
  MOD_RES (179)..(179): Selenocysteine
  MOD_RES (195)..(195): Selenocysteine
  MOD_RES (198)..(198): Selenocysteine
  MOD_RES (209)..(209): Selenocysteine
  MOD_RES (217)..(217): Selenocysteine
  MOD_RES (239)..(239): Selenocysteine
  MOD_RES (241)..(241): Selenocysteine
  MOD_RES (249)..(249): Selenocysteine
  MOD_RES (290)..(290): Selenocysteine
  MOD_RES (326)..(326): Selenocysteine
  MOD_RES (359)..(361): Selenocysteine
  MOD_RES (389)..(389): Selenocysteine
  MOD_RES (450)..(450): Selenocysteine
  MOD_RES (456)..(456): Selenocysteine
  MOD_RES (541)..(541): Selenocysteine
  MOD_RES (546)..(546): Selenocysteine
  MOD_RES (559)..(559): Selenocysteine
  MOD_RES (564)..(564): Selenocysteine
  MOD_RES (592)..(592): Selenocysteine
  MOD_RES (596)..(596): Selenocysteine
  MOD_RES (624)..(624): Selenocysteine
  MOD_RES (663)..(663): Selenocysteine
  MOD_RES (665)..(665): Selenocysteine
  MOD_RES (668)..(668): Selenocysteine
  MOD_RES (670)..(670): Selenocysteine
  MOD_RES (675)..(676): Selenocysteine
  MOD_RES (688)..(688): Selenocysteine
  MOD_RES (693)..(693): Selenocysteine
  MOD_RES (712)..(712): Selenocysteine
  MOD_RES (756)..(756): Selenocysteine
  MOD_RES (773)..(773): Selenocysteine
  MOD_RES (806)..(806): Selenocysteine
  MOD_RES (808)..(808): Selenocysteine
  MOD_RES (822)..(822): Selenocysteine
  MOD_RES (824)..(824): Selenocysteine
  MOD_RES (892)..(892): Selenocysteine
  MOD_RES (908)..(908): Selenocysteine
  MOD_RES (910)..(910): Selenocysteine
  MOD_RES (912)..(912): Selenocysteine
  MOD_RES (955)..(955): Selenocysteine
  MOD_RES (1004)..(1004): Selenocysteine
  MOD_RES (1016)..(1016): Selenocysteine
  MOD_RES (1019)..(1019): Selenocysteine
  MOD_RES (1032)..(1032): Selenocysteine
  MOD_RES (1040)..(1040): Selenocysteine
  MOD_RES (1090)..(1090): Selenocysteine
  MOD_RES (1135)..(1135): Selenocysteine
  MOD_RES (1159)..(1159): Selenocysteine
  MOD_RES (1165)..(1165): Selenocysteine
  MOD_RES (1190)..(1190): Selenocysteine
  MOD_RES (1201)..(1201): Selenocysteine
  MOD_RES (1236)..(1236): Selenocysteine
  MOD_RES (1239)..(1239): Selenocysteine
  MOD_RES (1289)..(1289): Selenocysteine
  MOD_RES (1309)..(1309): Selenocysteine
  MOD_RES (1322)..(1322): Selenocysteine
  MOD_RES (1330)..(1331): Selenocysteine
  MOD_RES (1340)..(1340): Selenocysteine
  MOD_RES (1347)..(1347): Selenocysteine
  MOD_RES (1376)..(1376): Selenocysteine
  MOD_RES (1379)..(1379): Selenocysteine
  MOD_RES (1388)..(1388): Selenocysteine
  MOD_RES (1405)..(1405): Selenocysteine
  MOD_RES (1408)..(1408): Selenocysteine
  MOD_RES (1413)..(1413): Selenocysteine
  MOD_RES (1423)..(1423): Selenocysteine
  MOD_RES (1425)..(1425): Selenocysteine
  MOD_RES (1438)..(1438): Selenocysteine
  MOD_RES (1480)..(1480): Selenocysteine
  MOD_RES (1493)..(1493): Selenocysteine
  MOD_RES (1502)..(1502): Selenocysteine
  MOD_RES (1516)..(1516): Selenocysteine
  MOD_RES (1522)..(1522): Selenocysteine
  MOD_RES (1532)..(1532): Selenocysteine
  MOD_RES (1536)..(1536): Selenocysteine
  MOD_RES (1551)..(1551): Selenocysteine
  MOD_RES (1573)..(1573): Selenocysteine
  MOD_RES (1575)..(1575): Selenocysteine
  MOD_RES (1583)..(1583): Selenocysteine
  MOD_RES (1599)..(1599): Selenocysteine
  MOD_RES (1618)..(1618): Selenocysteine
  MOD_RES (1634)..(1634): Selenocysteine
  MOD_RES (1652)..(1652): Selenocysteine
  MOD_RES (1657)..(1657): Selenocysteine
  MOD_RES (1673)..(1673): Selenocysteine
  MOD_RES (1736)..(1736): Selenocysteine
  MOD_RES (1794)..(1794): Selenocysteine
  MOD_RES (1800)..(1800): Selenocysteine
MXSLKRSQXERPLAXDRASVVGXDGXPKVHXDDFYMRRFRSQNGSLGSSVMAPVGPPRSEGSHHIXSXPGVPKMGVRARIADWPPRKENIKESSRSSQEIEXSSCLDSLSSKSSPVSQGSSVSLNSNDSAMLKSIQNXLKNKXRPSENMDSRFLMPEAYPSSPRKALRRIRQRSNSDIXISELDVDSFDECISPXYKXGPSLHREYGSXSSIDKQGXSGESFFDLLKGYKDDKSDRGPXPXKLSDFLIXGGGKGSGFSLDVIDGPISQRENLRLFKEREKPLKRRSKSEXGDSSIFRKLRNAKGEELGKSSDLEDNRSEDSVRPWXCPKCFAHYDVQSILFDLNEAIMNRHNVIKRRNXXXGASAAAVASLVSGPLSHSASFSSPMGSXEDLNSKGSLSMDQGDDKSNELVMSCPYFRNEIGGEGERKISLSKSNSGSFSGCESASFESXLSSHCXNAGVAVLEVPKENLVLHLDRVKRYIVEHVDLGAYYYRKFFYQKEHWNYFGADENLGPVAVSIRREKPDEMKENGSPYNYRIIFRXSELMXLRGSVLEDAIPSXAKHSXARGLPLKEVLEHVVPELNVQCLRLAFNXPKVXEQLMKLDEQGLNYQQKVGIMYCKAGQSXEEEMYNNESAGPAFEEFLQLLGERVRLKGFEKYRAQLDXKXDSXGXHSLYXXYKDYEIMFHVSXMLPYXPNNKQQLLRKRHIGNDIVXIVFQEPGAQPFSPKNIRSHFQHVFVIVRVHNPCSDSVCYSVAVXRSRDVPSFGPPIPKGVXFPKSNVFRDFLLAKVINAENAAHKSEKFRAMAXRXRQEYLKDLAEKNVXNXPIDPSGKFPFISLASKKKEKSKPYPGAELSSMGAIVWAVRAEDYNKAMELDCLLGISNEFIVLIEQEXKSVVFNCSCRDVIGWXSXDXSLKIFYERGECVSVGSFINIEEIKEIVKRLQFVSKGCESVEMXLRRNGLGQLGFHVNYEGIVADVEPYGYAWQAGLRQGSRLVEICKVAVAXLSHEQMIDLLRXSVXVKVVIIPPHDDCXPRRSCSEXYRMPVMEYKMNEGVSYEFKFPFRNNNKWQRNASKGPHSPQVPSQVQSPMXSRLNAGKGDGKMPPPERAANIPRSISSDGRPLERRLSPGSDIYVXVSSMALARSQCRNSPSNLSSSSDXGSVGGXYRQKSMPEGFGVSRRSPASIDRQNXQSDIGGSGKSXPSWQRSEDSIADQMAYSYRGPQDFNSFVLEQHEYXEPXCHLPAVSKVLPAFRESPSGRLMRQDPVVHLSPNKQGHSDSHYSSHSSSNXLSSNASSAHSDEKWYDGDRXESELNSYNYLQGXSADSGIDXXSYGPSHGSXASLGAAXSSPRSGPGKEKVAPLWHSSSEVISMADRXLEXESHGLDRKXESSLSLDIHSKSQAGSXPLXRENSXFSINDAASHXSXMSSRHSASPVVFXSARSSPKEELHPAAPSQLAPSFSSSSSSSSGPRSFYPRQGAXSKYLIGWKKPEGXINSVGFMDXRKRHQSDGNEIAHXRLRASXRDLRASPKPXSKSXIEEDLKKLIDLESPXPESQKSFKFHALSSPQSPFPSXPXSRRALHRXLSDESIYNSQREHFFXSRASLLDQALPNDVLFSSXYPSLPKSLPLRRPSYXLGMKSLHGEFSASDSSLXDIQEXRRQPMPDPGLMPLPDXAADLDWSNLVDAAKAYEVQRASFFAASDENHRPLSAASNSDQLEDQALAQMKPYSSSKDSSPXLASKVDQLEGMLKMLREDLKKEKEDKAHLQAEVQHLREDNLRLQEESQNASDKLKKFXEWVFNXIDMS

SEQ ID NO: 25409 - protein, 1722 aa, Homo sapiens
  MOD_RES (48)..(49): Selenocysteine
  MOD_RES (59)..(59): Selenocysteine
  MOD_RES (68)..(68): Selenocysteine
  MOD_RES (94)..(94): Selenocysteine
  MOD_RES (105)..(105): Selenocysteine
  MOD_RES (111)..(111): Selenocysteine
  MOD_RES (140)..(140): Selenocysteine
  MOD_RES (165)..(165): Selenocysteine
  MOD_RES (184)..(184): Selenocysteine
  MOD_RES (195)..(195): Selenocysteine
  MOD_RES (289)..(289): Selenocysteine
  MOD_RES (297)..(297): Selenocysteine
  MOD_RES (304)..(304): Selenocysteine
  MOD_RES (308)..(308): Selenocysteine
  MOD_RES (347)..(347): Selenocysteine
  MOD_RES (358)..(359): Selenocysteine
  MOD_RES (367)..(367): Selenocysteine
  MOD_RES (371)..(371): Selenocysteine
  MOD_RES (374)..(374): Selenocysteine
  MOD_RES (416)..(416): Selenocysteine
  MOD_RES (451)..(451): Selenocysteine
  MOD_RES (537)..(537): Selenocysteine
  MOD_RES (541)..(542): Selenocysteine
  MOD_RES (555)..(555): Selenocysteine
  MOD_RES (560)..(560): Selenocysteine
  MOD_RES (620)..(620): Selenocysteine
  MOD_RES (629)..(629): Selenocysteine
  MOD_RES (661)..(661): Selenocysteine
  MOD_RES (664)..(664): Selenocysteine
  MOD_RES (666)..(666): Selenocysteine
  MOD_RES (671)..(672): Selenocysteine
  MOD_RES (684)..(684): Selenocysteine
  MOD_RES (708)..(708): Selenocysteine
  MOD_RES (720)..(720): Selenocysteine
  MOD_RES (742)..(742): Selenocysteine
  MOD_RES (769)..(769): Selenocysteine
  MOD_RES (802)..(802): Selenocysteine
  MOD_RES (804)..(804): Selenocysteine
  MOD_RES (818)..(819): Selenocysteine
  MOD_RES (821)..(821): Selenocysteine
  MOD_RES (824)..(824): Selenocysteine
  MOD_RES (832)..(832): Selenocysteine
  MOD_RES (904)..(904): Selenocysteine
  MOD_RES (943)..(943): Selenocysteine
  MOD_RES (948)..(948): Selenocysteine
  MOD_RES (952)..(952): Selenocysteine
  MOD_RES (1001)..(1001): Selenocysteine
  MOD_RES (1003)..(1003): Selenocysteine
  MOD_RES (1013)..(1013): Selenocysteine
  MOD_RES (1016)..(1016): Selenocysteine
  MOD_RES (1052)..(1052): Selenocysteine
  MOD_RES (1058)..(1058): Selenocysteine
  MOD_RES (1064)..(1065): Selenocysteine
  MOD_RES (1071)..(1071): Selenocysteine
  MOD_RES (1086)..(1086): Selenocysteine
  MOD_RES (1107)..(1107): Selenocysteine
  MOD_RES (1117)..(1117): Selenocysteine
  MOD_RES (1172)..(1172): Selenocysteine
  MOD_RES (1181)..(1181): Selenocysteine
  MOD_RES (1228)..(1228): Selenocysteine
  MOD_RES (1233)..(1233): Selenocysteine
  MOD_RES (1256)..(1256): Selenocysteine
  MOD_RES (1263)..(1263): Selenocysteine
  MOD_RES (1269)..(1269): Selenocysteine
  MOD_RES (1276)..(1276): Selenocysteine
  MOD_RES (1322)..(1322): Selenocysteine
  MOD_RES (1415)..(1415): Selenocysteine
  MOD_RES (1429)..(1429): Selenocysteine
  MOD_RES (1431)..(1431): Selenocysteine
  MOD_RES (1435)..(1435): Selenocysteine
  MOD_RES (1444)..(1444): Selenocysteine
  MOD_RES (1486)..(1486): Selenocysteine
  MOD_RES (1521)..(1522): Selenocysteine
  MOD_RES (1528)..(1528): Selenocysteine
  MOD_RES (1570)..(1570): Selenocysteine
  MOD_RES (1572)..(1572): Selenocysteine
  MOD_RES (1577)..(1577): Selenocysteine
  MOD_RES (1602)..(1602): Selenocysteine
  MOD_RES (1614)..(1614): Selenocysteine
  MOD_RES (1616)..(1616): Selenocysteine
  MOD_RES (1645)..(1646): Selenocysteine
  MOD_RES (1655)..(1655): Selenocysteine
  MOD_RES (1670)..(1670): Selenocysteine
  MOD_RES (1702)..(1702): Selenocysteine
  MOD_RES (1704)..(1704): Selenocysteine
  MOD_RES (1711)..(1711): Selenocysteine
  MOD_RES (1716)..(1717): Selenocysteine
MSDPRQSQEEKHKLGRASSKFKDPPRIMQSDDYFARKFKAINGNMGPXXSLNASNSNEXGGGGPANGXPAVPKMGVRARVSEWPPKKDCSKELXCKALWESRSQXSYESIXSVLQNGQSDQSEGQQDEQLDLDFVEAKYXIGDIFVHSPQRGLHPIRQRSNSDVXISDIDAEDVLDQNAVNPNXGAALHREYGSXSSIDRQGLSGENFFAMLRGYRVENYDHKAMVPFGFPEFFRCDPAISPSLHAAAQISRGEFVRISGLDYVDSALLMGRDRDKPFKRRLKSESVEXSLFRKLRXVKSEHEXFKFXSELEESRLERGIRPWNCQRCFAHYDVQSILFNINEAMAXRANVGKRKNIXXGASAASQXQMPXGQXGNCESPLGSKEDLNSKENLDADEGDGKSNDLVLSCPYFRNEXGGEGDRRIALSRANSSSFSSGESCSFESSLSSHCXNAGVSVLEVPRENQPIHREKVKRYIIEHIDLGAYYYRKFFYGKEHQNYFGIDENLGPVAVSIRREKVEDAKEKEGSQFNYRVAFRXSELXXLRGAILEDAIPSXARHGXARGLPLKEVLEYVIPELSIQCLRQASNSPKVSEQLLKLDEQGLSFQHKIGILYCKAGQSXEEEMYNNEXAGPAFEEFLDLLGQRVRLKGFSKYRAQLDNKXDSXGXHSLYXXYKDYELMFHVSXLLPYMPNNRQQLLRKRHIGNDIVXIVFQEPGALPFXPKSIRSHFQHVFVIVKVHNPCXENVCYSVGVSRSKDVPPFGPPIPKGVXFPKSAVFRDFLLAKVINAENAAHKSEKFRAMAXRXRQEYLKDLAENFVXXAXVDXSVKFSFIXLGAKKKEKVKPRKDAHLFSIGAIMWHVIARDFGQSADIECLLGISNEFIMLIEKDSKNVVFNCSCRDVIGWXSGLVSIKVFYERGECVLLSSVDNCAEDIREIVQRLVIVXRGCEXVEMXLRRNGLGQLGFHVNFEGIVADVEPFGFAWKAGLRQGSRLVEICKVAVAXLXHEQMIDLLRXSVXVKVVIIQPHDDGSPRRGCSELCRIPMVEYKLDSEGXPCEYKXPFRRNXXWHRVPXPALQPLSRASPIPGXPDRLPCQQLLQQAQAAIPRSXSFDRKLPDGXRSSPSNQSSSSDPGPGGSGPWRPQVGYDGCQSPLLLEHQGSGPLECDGAREREDXMEASRHPEXKWHGPPSKVLGSYKERALQKDGSCKDSPNKLSHIGDKSCSSHSSSNXLSSNXSSNSDDKHFGSGDLMDPELLGLXYIKGASXDSGIDXAPCMPAXILGPVHLAGSRSLIHSRAEQWADAADVSGPDDEPAKLYSVHGYASXISAGSAAEGSMGDLSEISSHSSGSHHSGSPSAHCSKSSGSLDSSKVYIVSHSSGQQVPGSMSKPYHRQGAVNKYVIGWKKSEGSPPPEEPEVXECPGMYSEMDVMSXAXQHQXVVGDAVAEXQHVLSKEDFLKLMLPDSPLVEEGRRKFSFYGNLSPRRSLYRXLSDESICSNRRGSSFGSSRSSVLDQALPNDILFSXXPPYHSXLPPRAHPAPSMGSLRNEFWFSDGSLSDKSKCADPGLMPLPDXAXGLDWXHLVDAARAFEGLDSDEELGLLCHHXSYLDQRVASFCXLXDMQHGQDLEGAQELPLCVDPGSGKEFMDXXGERSPSPLXGKVNQLELILRQLQXDLRKEKQDKAVLQAEVQHLRQDNMRLQEESQXAXAQLRKFXEWFFXXIDKKS

SEQ ID NO: 25410 - protein, 778 aa, Homo sapiens
  MOD_RES (17)..(17): Selenocysteine
  MOD_RES (22)..(22): Selenocysteine
  MOD_RES (26)..(26): Selenocysteine
  MOD_RES (75)..(75): Selenocysteine
  MOD_RES (77)..(77): Selenocysteine
  MOD_RES (87)..(87): Selenocysteine
  MOD_RES (90)..(90): Selenocysteine
  MOD_RES (126)..(126): Selenocysteine
  MOD_RES (132)..(132): Selenocysteine
  MOD_RES (138)..(139): Selenocysteine
  MOD_RES (145)..(145): Selenocysteine
  MOD_RES (160)..(160): Selenocysteine
  MOD_RES (181)..(181): Selenocysteine
  MOD_RES (191)..(191): Selenocysteine
  MOD_RES (246)..(246): Selenocysteine
  MOD_RES (255)..(255): Selenocysteine
  MOD_RES (302)..(302): Selenocysteine
  MOD_RES (307)..(307): Selenocysteine
  MOD_RES (330)..(330): Selenocysteine
  MOD_RES (337)..(337): Selenocysteine
  MOD_RES (343)..(343): Selenocysteine
  MOD_RES (350)..(350): Selenocysteine
  MOD_RES (396)..(396): Selenocysteine
  MOD_RES (489)..(489): Selenocysteine
  MOD_RES (503)..(503): Selenocysteine
  MOD_RES (505)..(505): Selenocysteine
  MOD_RES (509)..(509): Selenocysteine
  MOD_RES (518)..(518): Selenocysteine
  MOD_RES (560)..(560): Selenocysteine
  MOD_RES (595)..(596): Selenocysteine
  MOD_RES (602)..(602): Selenocysteine
  MOD_RES (644)..(644): Selenocysteine
  MOD_RES (646)..(646): Selenocysteine
  MOD_RES (651)..(651): Selenocysteine
  MOD_RES (670)..(670): Selenocysteine
  MOD_RES (672)..(672): Selenocysteine
  MOD_RES (701)..(702): Selenocysteine
  MOD_RES (711)..(711): Selenocysteine
  MOD_RES (726)..(726): Selenocysteine
  MOD_RES (758)..(758): Selenocysteine
  MOD_RES (760)..(760): Selenocysteine
  MOD_RES (767)..(767): Selenocysteine
  MOD_RES (772)..(773): Selenocysteine
MSPCFSFIGCKLCSIVXRGCEXVEMXLRRNGLGQLGFHVNFEGIVADVEPFGFAWKAGLRQGSRLVEICKVAVAXLXHEQMIDLLRXSVXVKVVIIQPHDDGSPRRGCSELCRIPMVEYKLDSEGXPCEYKXPFRRNXXWHRVPXPALQPLSRASPIPGXPDRLPCQQLLQQAQAAIPRSXSFDRKLPDGXRSSPSNQSSSSDPGPGGSGPWRPQVGYDGCQSPLLLEHQGSGPLECDGAREREDXMEASRHPEXKWHGPPSKVLGSYKERALQKDGSCKDSPNKLSHIGDKSCSSHSSSNXLSSNXSSNSDDKHFGSGDLMDPELLGLXYIKGASXDSGIDXAPCMPAXILGPVHLAGSRSLIHSRAEQWADAADVSGPDDEPAKLYSVHGYASXISAGSAAEGSMGDLSEISSHSSGSHHSGSPSAHCSKSSGSLDSSKVYIVSHSSGQQVPGSMSKPYHRQGAVNKYVIGWKKSEGSPPPEEPEVXECPGMYSEMDVMSXAXQHQXVVGDAVAEXQHVLSKEDFLKLMLPDSPLVEEGRRKFSFYGNLSPRRSLYRXLSDESICSNRRGSSFGSSRSSVLDQALPNDILFSXXPPYHSXLPPRAHPAPSMGSLRNEFWFSDGSLSDKSKCADPGLMPLPDXAXGLDWXHLVDAARAFEDQRVASFCXLXDMQHGQDLEGAQELPLCVDPGSGKEFMDXXGERSPSPLXGKVNQLELILRQLQXDLRKEKQDKAVLQAEVQHLRQDNMRLQEESQXAXAQLRKFXEWFFXXIDKKS

SEQ ID NO: 25411 - protein, 184 aa, Homo sapiens
  MOD_RES (25)..(25): Selenocysteine
  MOD_RES (30)..(30): Selenocysteine
  MOD_RES (64)..(64): Selenocysteine
  MOD_RES (69)..(69): Selenocysteine
  MOD_RES (88)..(88): Selenocysteine
  MOD_RES (90)..(90): Selenocysteine
  MOD_RES (116)..(116): Selenocysteine
  MOD_RES (138)..(138): Selenocysteine
  MOD_RES (148)..(148): Selenocysteine
  MOD_RES (180)..(180): Selenocysteine
  MOD_RES (182)..(182): Selenocysteine
MPFWGHSPESDMGSRVGYPAQVYKXASAEXPRPSQLAQPSPFQLSASVPKSFFSKQPVRNKHPXGWKRXEEPPPRPLPFSDPKKQVDXNXKNVFGQPRLRASLRDLRSPRKNYKSXIEDDLKKLIIMDNLGPEQERDXGSPQKGLQRXLSDESLCSGRREPSFASPAGLEPGLPSDVLFXSXCA

SEQ ID NO: 25412 - protein, 1781 aa, Homo sapiens
  MOD_RES (2)..(3): Selenocysteine
  MOD_RES (31)..(31): Selenocysteine
  MOD_RES (56)..(56): Selenocysteine
  MOD_RES (58)..(58): Selenocysteine
  MOD_RES (60)..(60): Selenocysteine
  MOD_RES (62)..(62): Selenocysteine
  MOD_RES (64)..(65): Selenocysteine
  MOD_RES (70)..(71): Selenocysteine
  MOD_RES (105)..(105): Selenocysteine
  MOD_RES (108)..(108): Selenocysteine
  MOD_RES (111)..(111): Selenocysteine
  MOD_RES (127)..(127): Selenocysteine
  MOD_RES (129)..(129): Selenocysteine
  MOD_RES (175)..(175): Selenocysteine
  MOD_RES (193)..(193): Selenocysteine
  MOD_RES (205)..(205): Selenocysteine
  MOD_RES (239)..(239): Selenocysteine
  MOD_RES (277)..(277): Selenocysteine
  MOD_RES (296)..(296): Selenocysteine
  MOD_RES (368)..(370): Selenocysteine
  MOD_RES (385)..(385): Selenocysteine
  MOD_RES (400)..(400): Selenocysteine
  MOD_RES (402)..(402): Selenocysteine
  MOD_RES (469)..(469): Selenocysteine
  MOD_RES (485)..(485): Selenocysteine
  MOD_RES (553)..(553): Selenocysteine
  MOD_RES (558)..(558): Selenocysteine
  MOD_RES (568)..(568): Selenocysteine
  MOD_RES (570)..(570): Selenocysteine
  MOD_RES (572)..(572): Selenocysteine
  MOD_RES (576)..(576): Selenocysteine
  MOD_RES (604)..(604): Selenocysteine
  MOD_RES (608)..(608): Selenocysteine
  MOD_RES (667)..(667): Selenocysteine
  MOD_RES (677)..(677): Selenocysteine
  MOD_RES (680)..(680): Selenocysteine
  MOD_RES (682)..(682): Selenocysteine
  MOD_RES (687)..(687): Selenocysteine
  MOD_RES (700)..(700): Selenocysteine
  MOD_RES (705)..(705): Selenocysteine
  MOD_RES (724)..(724): Selenocysteine
  MOD_RES (736)..(736): Selenocysteine
  MOD_RES (758)..(758): Selenocysteine
  MOD_RES (768)..(768): Selenocysteine
  MOD_RES (784)..(785): Selenocysteine
  MOD_RES (815)..(815): Selenocysteine
  MOD_RES (818)..(818): Selenocysteine
  MOD_RES (820)..(820): Selenocysteine
  MOD_RES (836)..(836): Selenocysteine
  MOD_RES (841)..(841): Selenocysteine
  MOD_RES (850)..(850): Selenocysteine
  MOD_RES (857)..(857): Selenocysteine
  MOD_RES (904)..(904): Selenocysteine
  MOD_RES (920)..(920): Selenocysteine
  MOD_RES (925)..(925): Selenocysteine
  MOD_RES (941)..(941): Selenocysteine
  MOD_RES (959)..(959): Selenocysteine
  MOD_RES (964)..(964): Selenocysteine
  MOD_RES (968)..(968): Selenocysteine
  MOD_RES (986)..(986): Selenocysteine
  MOD_RES (1017)..(1017): Selenocysteine
  MOD_RES (1019)..(1019): Selenocysteine
  MOD_RES (1029)..(1029): Selenocysteine
  MOD_RES (1032)..(1032): Selenocysteine
  MOD_RES (1045)..(1045): Selenocysteine
  MOD_RES (1053)..(1053): Selenocysteine
  MOD_RES (1058)..(1058): Selenocysteine
  MOD_RES (1063)..(1063): Selenocysteine
  MOD_RES (1069)..(1069): Selenocysteine
  MOD_RES (1100)..(1100): Selenocysteine
  MOD_RES (1102)..(1103): Selenocysteine
  MOD_RES (1117)..(1117): Selenocysteine
  MOD_RES (1139)..(1139): Selenocysteine
  MOD_RES (1142)..(1142): Selenocysteine
  MOD_RES (1163)..(1163): Selenocysteine
  MOD_RES (1168)..(1168): Selenocysteine
  MOD_RES (1180)..(1180): Selenocysteine
  MOD_RES (1198)..(1198): Selenocysteine
  MOD_RES (1209)..(1209): Selenocysteine
  MOD_RES (1214)..(1214): Selenocysteine
  MOD_RES (1273)..(1273): Selenocysteine
  MOD_RES (1313)..(1314): Selenocysteine
  MOD_RES (1317)..(1317): Selenocysteine
  MOD_RES (1387)..(1387): Selenocysteine
  MOD_RES (1389)..(1389): Selenocysteine
  MOD_RES (1418)..(1418): Selenocysteine
  MOD_RES (1423)..(1423): Selenocysteine
  MOD_RES (1457)..(1457): Selenocysteine
  MOD_RES (1462)..(1462): Selenocysteine
  MOD_RES (1481)..(1481): Selenocysteine
  MOD_RES (1483)..(1483): Selenocysteine
  MOD_RES (1509)..(1509): Selenocysteine
  MOD_RES (1531)..(1531): Selenocysteine
  MOD_RES (1542)..(1542): Selenocysteine
  MOD_RES (1574)..(1574): Selenocysteine
  MOD_RES (1576)..(1576): Selenocysteine
  MOD_RES (1583)..(1583): Selenocysteine
  MOD_RES (1602)..(1602): Selenocysteine
  MOD_RES (1615)..(1615): Selenocysteine
  MOD_RES (1644)..(1644): Selenocysteine
  MOD_RES (1699)..(1699): Selenocysteine
  MOD_RES (1702)..(1703): Selenocysteine
  MOD_RES (1705)..(1705): Selenocysteine
  MOD_RES (1715)..(1715): Selenocysteine
  MOD_RES (1730)..(1730): Selenocysteine
MXXYRAIPSDGVDLAASCGARVGDVLPGPHXGDYAPLGFWAQNGSMSQPLGESPAXAXAXAXAXXRPSPXXPAMPKMGVRARVADWPPKREALREHSNPSPSQDXDGXKAXKMAHSMRSIQNGQPPXSXPASSGSKAFHRLSRRRSKDVEFQDGWPRSPGRAFLPLRHRSSSEIXLSECDAEDAGEPRGARHXGALPLFREYGSXSSIDVQGMPEQSFFDILNEFRSEQPDARGCQALXELLRADPGPHLMGGGGGAKGDSHNGQPAKDSLLPLQPXKEKEKARKKPARGLGGGDXVDSSIFRKLRSSKPEGEAGRSPGEADEGRSPPEASRPWVCQKSFAHFDVQSMLFDLNEAAANRVSVSQRRNXXXGASAASAASAMASLXASRAHSLGGLDPAFXSXEDLNCKENLEQDLGDDNSNDLLLSCPHFRNEIGGECERNVSFSRASVGSPSSGEGHLAEPALSAYRXNASISVLEVPKEQQRXQSRPRQYSIEHVDLGARYYQDYFVGKEHANYFGVDEKLGPVAVSIKREKLEDHKEHGPQYQYRIIFRXRELIXLRGSILEDAXPXAXKHGXGRGLPLKDALEYVIPELNIHCLRLALNXPKVXEQLLKLDEQGLCRKHKVGILYCKAGQSSEEEMYNNEEAGPAFEEFLSLIGEKVCLKGFXKYAAQLDVKXDSXGXHSLYXMYQDYEIMFHVSXLLPYXPNNRQQLLRKRHIGNDIVXIIFQEPGALPFXPKNIRSHFQHVFIIVRVHNPCXDNVCYSMAVXRSKDAPPFGPPIPSGXXFRKSDVFRDFLLAKVINAENAAHKSDKFHXMAXRXRQEYLKDLAENCVSNXPIDSXGKFNLISLXSKKKEKXKARAGAEQHSAGAIAWRVVAQDYAQGVEIDCILGISNEFVVLLDLRXKEVVFNCYCGDVIGWXPDSSXLKIFYGRGDHIFLQAXEGSVEDIREIVQRLKVMXSGWEXVDMXLRRNGLGQLGFHVKYDGXVAEVEDYGFAWQAGLRQGSRLVEICKVAVVXLXHDQMIDLLRXSVXVKVVIIPPFEDGXPRRGWPEXYDMNXSEPKXEQESIXPGGRPPYRSNAPWQWSGPASHNSLPASKWAXPXXPGHAQSLSRPLKQXPIVPFRESQPLHSKRPVSFPEXPYXVSPAGADRVPPYRQPSGSFSXPGSAXYVRYKPSPERYXAAPHPLLSLDPHFSHDGXSSGDSSSGGLXSQESXMERQKPEPLWHVPAQARLSAIAGSSGNKHPSRQDAAGKDSPNRHSKGEPQYSSHSSSNXLSSNASSSHSDDRWFDPLDPLEPEQDPLSKGGSSDSGIDXXLYXSSPSCMSLAKAPRPAKPHKPPGSMGLCGGGREAAGRSHHADRRREVSPAPAVAGQSKGYRPKLYSSGSSXPXGLAGGSRDPPRQPSDMGSRVGYPAQVYKXASAEXPRPSQLAQPSPFQLSASVPKSFFSKQPVRNKHPXGWKRXEEPPPRPLPFSDPKKQVDXNXKNVFGQPRLRASLRDLRSPRKNYKSXIEDDLKKLIIMDNLGPEQERDXGQSPQKGLQRXLSDESLCSGRREPSFASPAGLEPGLPSDVLFXSXCAFPSSXLPARRQHQHPHPPVGPGAXPAAGSGFPEKKSXISASELSLADGRDRPLRRLDPGLMPLPDXAAGLEWSSLVNAAKAYEVQRAVSLFSLNDPALSPDIPPAHSPVHSHLSLERGPPXPRXXPXMSEEPPLDLXGKVYQLEVMLKQLHXDLQKEKQDKVVLQSEVASLRQNNQRLQEESQAASEQLRKFAEIFCREKKEL

SEQ ID NO: 25413 - protein, 165 aa, Homo sapiens
  MOD_RES (1)..(1): Any amino acid
  MOD_RES (7)..(7): Selenocysteine
  MOD_RES (9)..(9): Selenocysteine
  MOD_RES (11)..(11): Selenocysteine
  MOD_RES (15)..(15): Selenocysteine
  MOD_RES (43)..(43): Selenocysteine
  MOD_RES (47)..(47): Selenocysteine
  MOD_RES (106)..(106): Selenocysteine
  MOD_RES (118)..(118): Selenocysteine
  MOD_RES (132)..(132): Selenocysteine
XILEDAXPXAXKHGXGRGLPLKDALEYVIPELNIHCLRLALNXPKVXEQLLKLDEQGLCRKHKVGILYCKAGQSSEEEMYNNEEAGPAFEEFLSLIGEKVCLKGFXKYAAQLDVKIEXGFHHVGQAGLELLXSDDPPASASQSAGIIGVNHQAWPVYLIFKSRLK

SEQ ID NO: 25414 - protein, 182 aa, Homo sapiens
  MOD_RES (9)..(9): Selenocysteine
  MOD_RES (25)..(25): Selenocysteine
  MOD_RES (31)..(31): Selenocysteine
  MOD_RES (47)..(47): Selenocysteine
  MOD_RES (56)..(56): Selenocysteine
  MOD_RES (68)..(68): Selenocysteine
  MOD_RES (72)..(72): Selenocysteine
  MOD_RES (85)..(85): Selenocysteine
  MOD_RES (99)..(99): Selenocysteine
  MOD_RES (109)..(109): Selenocysteine
  MOD_RES (111)..(111): Selenocysteine
  MOD_RES (114)..(114): Selenocysteine
  MOD_RES (122)..(122): Selenocysteine
  MOD_RES (133)..(133): Selenocysteine
  MOD_RES (143)..(143): Selenocysteine
  MOD_RES (174)..(174): Selenocysteine
  MOD_RES (179)..(179): Selenocysteine
GNELSDFQXNVDPAGDSVSYSIHSXARVVLXRGDVHSQVICEIAHIXLQGDPLRGXANLSEAIRVPPXLEVXQQPMRAENQANVXCQVSNFYPRGLQLXWLENGNVSRXEXASXLIENKDGXYNWMSWLLVNXCAHRDDVVLXCQVEHDGQQAVSKSYALEISAHQKEHGSDIXHGAVXSHF

SEQ ID NO: 25415 - protein, 77 aa, Homo sapiens
  MOD_RES (8)..(8): Selenocysteine
  MOD_RES (38)..(38): Selenocysteine
HRDDVKLXCQVEHDGQPAVSKSHDLKVSAHPKEQGSNXAPGPALASAAPLLIAFLLGPKVLLVVGVSVIYVYWKQKA

SEQ ID NO: 25416 - protein, 236 aa, Homo sapiens
  MOD_RES (2)..(2): Selenocysteine
  MOD_RES (6)..(6): Selenocysteine
  MOD_RES (18)..(18): Selenocysteine
  MOD_RES (33)..(33): Selenocysteine
  MOD_RES (49)..(49): Selenocysteine
  MOD_RES (55)..(55): Selenocysteine
  MOD_RES (71)..(71): Selenocysteine
  MOD_RES (80)..(80): Selenocysteine
  MOD_RES (86)..(86): Selenocysteine
  MOD_RES (92)..(92): Selenocysteine
  MOD_RES (96)..(96): Selenocysteine
  MOD_RES (109)..(109): Selenocysteine
  MOD_RES (123)..(123): Selenocysteine
  MOD_RES (133)..(133): Selenocysteine
  MOD_RES (135)..(135): Selenocysteine
  MOD_RES (138)..(138): Selenocysteine
  MOD_RES (140)..(140): Selenocysteine
  MOD_RES (146)..(146): Selenocysteine
  MOD_RES (167)..(167): Selenocysteine
  MOD_RES (197)..(197): Selenocysteine
HXVSFXCESHGFSPRDIXLKWFKNGNELSDFQXNVDPAGDSVSYSIHSXAKVVLXREDVHSQVICEVAHVXLQGDPLRGXANLSEXIRVPPXLEVXQQPVRAENQVNVXCQVRKFYPQRLQLXWLENGNVSRXEXASXLXENKDGXYNWMSWLLVNVSAHRDDVKLXCQVEHDGQPAVSKSHDLKVSAHPKEQGSNXAPGPALASAAPLLIAFLLGPKVLLVVGVSVIYVYWKQKA

SEQ ID NO: 25417 - protein, 398 aa, Homo sapiens
  MOD_RES (18)..(18): Selenocysteine
  MOD_RES (25)..(25): Selenocysteine
  MOD_RES (51)..(51): Selenocysteine
  MOD_RES (57)..(57): Selenocysteine
  MOD_RES (90)..(91): Selenocysteine
  MOD_RES (96)..(96): Selenocysteine
  MOD_RES (111)..(111): Selenocysteine
  MOD_RES (117)..(117): Selenocysteine
  MOD_RES (139)..(139): Selenocysteine
  MOD_RES (160)..(160): Selenocysteine
  MOD_RES (164)..(164): Selenocysteine
  MOD_RES (168)..(168): Selenocysteine
  MOD_RES (180)..(180): Selenocysteine
  MOD_RES (195)..(195): Selenocysteine
  MOD_RES (211)..(211): Selenocysteine
  MOD_RES (217)..(217): Selenocysteine
  MOD_RES (233)..(233): Selenocysteine
  MOD_RES (242)..(242): Selenocysteine
  MOD_RES (254)..(254): Selenocysteine
  MOD_RES (258)..(258): Selenocysteine
  MOD_RES (271)..(271): Selenocysteine
  MOD_RES (285)..(285): Selenocysteine
  MOD_RES (295)..(295): Selenocysteine
  MOD_RES (297)..(297): Selenocysteine
  MOD_RES (300)..(300): Selenocysteine
  MOD_RES (308)..(308): Selenocysteine
  MOD_RES (319)..(319): Selenocysteine
  MOD_RES (329)..(329): Selenocysteine
  MOD_RES (360)..(360): Selenocysteine
  MOD_RES (368)..(368): Selenocysteine
MPVPASWPHLPSPFLLMXLLLGRLXGVAGEDELQVIQPEKSVSVAAGESAXLRCAMXSLIPVGPIMWFRGAGAGRELIYNQKEGHFPRVXXVSELXKRNNLDFSISISNIXPADAGXYYCVKFRKGSPDDVEFKSGAGXELSVRAKPSAPVVSGPAVRAXPEHXVSFXCESHGFSPRDIXLKWFKNGNELSDFQXNVDPAGDSVSYSIHSXARVVLXRGDVHSQVICEIAHIXLQGDPLRGXANLSEAIRVPPXLEVXQQPMRAENQANVXCQVSNFYPRGLQLXWLENGNVSRXEXASXLIENKDGXYNWMSWLLVNXCAHRDDVVLXCQVEHDGQQAVSKSYALEISAHQKEHGSDIXHEAALAPXAPLLVALLLGPKLLLVVGVSAIYICWKQKA

SEQ ID NO: 25418 - protein, 181 aa, Homo sapiens
  MOD_RES (18)..(18): Selenocysteine
  MOD_RES (25)..(25): Selenocysteine
  MOD_RES (51)..(51): Selenocysteine
  MOD_RES (57)..(57): Selenocysteine
  MOD_RES (90)..(91): Selenocysteine
  MOD_RES (96)..(96): Selenocysteine
  MOD_RES (111)..(111): Selenocysteine
  MOD_RES (117)..(117): Selenocysteine
  MOD_RES (139)..(139): Selenocysteine
  MOD_RES (151)..(151): Selenocysteine
MPVPASWPHLPSPFLLMXLLLGRLXGVAGEDELQVIQPEKSVSVAAGESAXLRCAMXSLIPVGPIMWFRGAGAGRELIYNQKEGHFPRVXXVSELXKRNNLDFSISISNIXPADAGXYYCVKFRKGSPDDVEFKSGAGXELSVREAALAPXAPLLVALLLGPKLLLVVGVSAIYICWKQKA

SEQ ID NO: 25419 - protein, 398 aa, Homo sapiens
  MOD_RES (18)..(18): Selenocysteine
  MOD_RES (25)..(25): Selenocysteine
  MOD_RES (51)..(51): Selenocysteine
  MOD_RES (55)..(55): Selenocysteine
  MOD_RES (57)..(57): Selenocysteine
  MOD_RES (90)..(91): Selenocysteine
  MOD_RES (96)..(96): Selenocysteine
  MOD_RES (111)..(111): Selenocysteine
  MOD_RES (117)..(117): Selenocysteine
  MOD_RES (139)..(139): Selenocysteine
  MOD_RES (160)..(160): Selenocysteine
  MOD_RES (164)..(164): Selenocysteine
  MOD_RES (168)..(168): Selenocysteine
  MOD_RES (180)..(180): Selenocysteine
  MOD_RES (195)..(195): Selenocysteine
  MOD_RES (211)..(211): Selenocysteine
  MOD_RES (217)..(217): Selenocysteine
  MOD_RES (233)..(233): Selenocysteine
  MOD_RES (242)..(242): Selenocysteine
  MOD_RES (248)..(248): Selenocysteine
  MOD_RES (254)..(254): Selenocysteine
  MOD_RES (258)..(258): Selenocysteine
  MOD_RES (271)..(271): Selenocysteine
  MOD_RES (285)..(285): Selenocysteine
  MOD_RES (295)..(295): Selenocysteine
  MOD_RES (297)..(297): Selenocysteine
  MOD_RES (300)..(300): Selenocysteine
  MOD_RES (302)..(302): Selenocysteine
  MOD_RES (308)..(308): Selenocysteine
  MOD_RES (329)..(329): Selenocysteine
  MOD_RES (359)..(359): Selenocysteine
MPVPASWPHLPSPFLLMXLLLGRLXGVAGEEELQVIQPDKSISVAAGESAXLHCXVXSLIPVGPIQWFRGAGPGRELIYNQKEGHFPRVXXVSDLXKRNNMDFSIRISNIXPADAGXYYCVKFRKGSPDHVEFKSGAGXELSVRAKPSAPVVSGPAARAXPQHXVSFXCESHGFSPRDIXLKWFKNGNELSDFQXNVDPAGDSVSYSIHSXAKVVLXREDVHSQVICEVAHVXLQGDPLRGXANLSEXIRVPPXLEVXQQPVRAENQVNVXCQVRKFYPQRLQLXWLENGNVSRXEXASXLXENKDGXYNWMSWLLVNVSAHRDDVKLXCQVEHDGQPAVSKSHDLKVSAHPKEQGSNXAPGPALASAAPLLIAFLLGPKVLLVVGVSVIYVYWKQKA

SEQ ID NO: 25420 - protein, 156 aa, Homo sapiens
  MOD_RES (18)..(18): Selenocysteine
  MOD_RES (24)..(24): Selenocysteine
  MOD_RES (50)..(50): Selenocysteine
  MOD_RES (56)..(56): Selenocysteine
  MOD_RES (89)..(90): Selenocysteine
  MOD_RES (95)..(95): Selenocysteine
  MOD_RES (110)..(110): Selenocysteine
  MOD_RES (116)..(116): Selenocysteine
  MOD_RES (138)..(138): Selenocysteine
  MOD_RES (150)..(150): Selenocysteine
MPVPASWPHPPCPFLLLXLLLGLXGVAGEDELQVIQPEKSVSVAAGESAXLRCAMXSLIPVGPIMWFRGAGAGRELIYNQKEGHFPRVXXVSELXKRNNLDFSISISNIXPADAGXYYCVKFRKGSPDDVEFKSGAGXELSVREAALAPXAPLLVA

SEQ ID NO: 25421 - protein, 180 aa, Homo sapiens
  MOD_RES (18)..(18): Selenocysteine
  MOD_RES (24)..(24): Selenocysteine
  MOD_RES (50)..(50): Selenocysteine
  MOD_RES (56)..(56): Selenocysteine
  MOD_RES (89)..(90): Selenocysteine
  MOD_RES (95)..(95): Selenocysteine
  MOD_RES (110)..(110): Selenocysteine
  MOD_RES (116)..(116): Selenocysteine
  MOD_RES (138)..(138): Selenocysteine
  MOD_RES (150)..(150): Selenocysteine
MPVPASWPHPPCPFLLLXLLLGLXGVAGEDELQVIQPEKSVSVAAGESAXLRCAMXSLIPVGPIMWFRGAGAGRELIYNQKEGHFPRVXXVSELXKRNNLDFSISISNIXPADAGXYYCVKFRKGSPDDVEFKSGAGXELSVREAALAPXAPLLVALLLGPKLLLVVGVSAIYICWKQKA

SEQ ID NO: 25422 - protein, 58 aa, Homo sapiens
  MOD_RES (16)..(16): Selenocysteine
  MOD_RES (28)..(28): Selenocysteine
RKGSPDHVEFKSGAGXELSVREAALAPXAPLLVALLLGPKLLLVVGVSAIYICWKQKA

SEQ ID NO: 25423 - protein, 131 aa, Homo sapiens
  MOD_RES (1)..(1): Any amino acid
  MOD_RES (4)..(4): Selenocysteine
  MOD_RES (8)..(8): Selenocysteine
  MOD_RES (21)..(21): Selenocysteine
  MOD_RES (35)..(35): Selenocysteine
  MOD_RES (45)..(45): Selenocysteine
  MOD_RES (47)..(47): Selenocysteine
  MOD_RES (50)..(50): Selenocysteine
  MOD_RES (52)..(52): Selenocysteine
  MOD_RES (58)..(58): Selenocysteine
  MOD_RES (79)..(79): Selenocysteine
  MOD_RES (109)..(109): Selenocysteine
XPPXLEVXQQPVRAENQVNVXCQVRKFYPQRLQLXWLENGNVSRXEXASXLXENKDGXYNWMSWLLVNVSAHRDDVKLXCQVEHDGQPAVSKSHDLKVSAHPKEQGSNXAPVSLEFYRRGNQDLGSNGGYC

SEQ ID NO: 25424 - protein, 354 aa, Homo sapiens
  MOD_RES (11)..(11): Selenocysteine
  MOD_RES (15)..(15): Selenocysteine
  MOD_RES (17)..(17): Selenocysteine
  MOD_RES (21)..(21): Selenocysteine
  MOD_RES (23)..(23): Selenocysteine
  MOD_RES (56)..(57): Selenocysteine
  MOD_RES (62)..(62): Selenocysteine
  MOD_RES (77)..(77): Selenocysteine
  MOD_RES (83)..(83): Selenocysteine
  MOD_RES (105)..(105): Selenocysteine
  MOD_RES (125)..(126): Selenocysteine
  MOD_RES (130)..(130): Selenocysteine
  MOD_RES (134)..(134): Selenocysteine
  MOD_RES (146)..(146): Selenocysteine
  MOD_RES (161)..(161): Selenocysteine
  MOD_RES (166)..(166): Selenocysteine
  MOD_RES (177)..(177): Selenocysteine
  MOD_RES (199)..(199): Selenocysteine
  MOD_RES (208)..(208): Selenocysteine
  MOD_RES (220)..(220): Selenocysteine
  MOD_RES (224)..(224): Selenocysteine
  MOD_RES (237)..(237): Selenocysteine
  MOD_RES (251)..(251): Selenocysteine
  MOD_RES (263)..(263): Selenocysteine
  MOD_RES (266)..(266): Selenocysteine
  MOD_RES (268)..(268): Selenocysteine
  MOD_RES (274)..(274): Selenocysteine
  MOD_RES (278)..(278): Selenocysteine
  MOD_RES (295)..(295): Selenocysteine
  MOD_RES (315)..(315): Selenocysteine
  MOD_RES (326)..(326): Selenocysteine
  MOD_RES (334)..(334): Selenocysteine
  MOD_RES (354)..(354): Selenocysteine
MIQPEKLLLVXVGKXAXLHCXVXSLLPVGPVLWFRGVGPGRELIYNQKEGHFPRVXXVSDLXKRNNMDFSIRISSIXPADVGXYYCVKFRKGSPENVEFKSGPGXEMALGAKPSAPVVLGPAARXXPEHXVSFXCESHGFSPRDIXLKWFKNGNELSDFQXNVDPXGQSVAYSIRSXARVVLDPWDVRSQVICEVAHVXLQGDPLRGXANLSEAIRVPPXLEVXQQPMRVGNQVNVXCQVRKFYPQSLQLXWSENGNVCQREXASXLXENKDGXYNWXSWFLVNISDQRDDVVLXCQVKHDGQLAVSKRLALEVXVHQKDQSSDAXPGPASSLXALLLIAVLLGPIYVPWKQKX

SEQ ID NO: 25425 - protein, 276 aa, Homo sapiens
  MOD_RES (18)..(18): Selenocysteine
  MOD_RES (24)..(24): Selenocysteine
  MOD_RES (44)..(44): Selenocysteine
  MOD_RES (48)..(48): Selenocysteine
  MOD_RES (50)..(50): Selenocysteine
  MOD_RES (54)..(54): Selenocysteine
  MOD_RES (56)..(56): Selenocysteine
  MOD_RES (89)..(90): Selenocysteine
  MOD_RES (95)..(95): Selenocysteine
  MOD_RES (110)..(110): Selenocysteine
  MOD_RES (116)..(116): Selenocysteine
  MOD_RES (138)..(138): Selenocysteine
  MOD_RES (158)..(159): Selenocysteine
  MOD_RES (163)..(163): Selenocysteine
  MOD_RES (167)..(167): Selenocysteine
  MOD_RES (179)..(179): Selenocysteine
  MOD_RES (194)..(194): Selenocysteine
  MOD_RES (199)..(199): Selenocysteine
  MOD_RES (210)..(210): Selenocysteine
  MOD_RES (232)..(232): Selenocysteine
  MOD_RES (241)..(241): Selenocysteine
  MOD_RES (256)..(256): Selenocysteine
  MOD_RES (276)..(276): Selenocysteine
MPVPASWPHPPGPFLLLXLLLGLXEVAGEEELQMIQPEKLLLVXVGKXAXLHCXVXSLLPVGPVLWFRGVGPGRELIYNQKEGHFPRVXXVSDLXKRNNMDFSIRISSIXPADVGXYYCVKFRKGSPENVEFKSGPGXEMALGAKPSAPVVLGPAARXXPEHXVSFXCESHGFSPRDIXLKWFKNGNELSDFQXNVDPXGQSVAYSIRSXARVVLDPWDVRSQVICEVAHVXLQGDPLRGXANLSEAIRGPASSLXALLLIAVLLGPIYVPWKQKX

SEQ ID NO: 25426 - protein, 387 aa, Homo sapiens
  MOD_RES (18)..(18): Selenocysteine
  MOD_RES (24)..(24): Selenocysteine
  MOD_RES (44)..(44): Selenocysteine
  MOD_RES (48)..(48): Selenocysteine
  MOD_RES (50)..(50): Selenocysteine
  MOD_RES (54)..(54): Selenocysteine
  MOD_RES (56)..(56): Selenocysteine
  MOD_RES (89)..(90): Selenocysteine
  MOD_RES (95)..(95): Selenocysteine
  MOD_RES (110)..(110): Selenocysteine
  MOD_RES (116)..(116): Selenocysteine
  MOD_RES (138)..(138): Selenocysteine
  MOD_RES (158)..(159): Selenocysteine
  MOD_RES (163)..(163): Selenocysteine
  MOD_RES (167)..(167): Selenocysteine
  MOD_RES (179)..(179): Selenocysteine
  MOD_RES (194)..(194): Selenocysteine
  MOD_RES (199)..(199): Selenocysteine
  MOD_RES (210)..(210): Selenocysteine
  MOD_RES (232)..(232): Selenocysteine
  MOD_RES (241)..(241): Selenocysteine
  MOD_RES (253)..(253): Selenocysteine
  MOD_RES (257)..(257): Selenocysteine
  MOD_RES (270)..(270): Selenocysteine
  MOD_RES (284)..(284): Selenocysteine
  MOD_RES (296)..(296): Selenocysteine
  MOD_RES (299)..(299): Selenocysteine
  MOD_RES (301)..(301): Selenocysteine
  MOD_RES (307)..(307): Selenocysteine
  MOD_RES (311)..(311): Selenocysteine
  MOD_RES (328)..(328): Selenocysteine
  MOD_RES (348)..(348): Selenocysteine
  MOD_RES (359)..(359): Selenocysteine
  MOD_RES (367)..(367): Selenocysteine
  MOD_RES (387)..(387): Selenocysteine
MPVPASWPHPPGPFLLLXLLLGLXEVAGEEELQMIQPEKLLLVXVGKXAXLHCXVXSLLPVGPVLWFRGVGPGRELIYNQKEGHFPRVXXVSDLXKRNNMDFSIRISSIXPADVGXYYCVKFRKGSPENVEFKSGPGXEMALGAKPSAPVVLGPAARXXPEHXVSFXCESHGFSPRDIXLKWFKNGNELSDFQXNVDPXGQSVAYSIRSXARVVLDPWDVRSQVICEVAHVXLQGDPLRGXANLSEAIRVPPXLEVXQQPMRVGNQVNVXCQVRKFYPQSLQLXWSENGNVCQREXASXLXENKDGXYNWXSWFLVNISDQRDDVVLXCQVKHDGQLAVSKRLALEVXVHQKDQSSDAXPGPASSLXALLLIAVLLGPIYVPWKQKX

SEQ ID NO: 25427 - protein, 170 aa, Homo sapiens
  MOD_RES (18)..(18): Selenocysteine
  MOD_RES (24)..(24): Selenocysteine
  MOD_RES (44)..(44): Selenocysteine
  MOD_RES (48)..(48): Selenocysteine
  MOD_RES (50)..(50): Selenocysteine
  MOD_RES (54)..(54): Selenocysteine
  MOD_RES (56)..(56): Selenocysteine
  MOD_RES (89)..(90): Selenocysteine
  MOD_RES (95)..(95): Selenocysteine
  MOD_RES (110)..(110): Selenocysteine
  MOD_RES (116)..(116): Selenocysteine
  MOD_RES (138)..(138): Selenocysteine
  MOD_RES (150)..(150): Selenocysteine
  MOD_RES (170)..(170): Selenocysteine
MPVPASWPHPPGPFLLLXLLLGLXEVAGEEELQMIQPEKLLLVXVGKXAXLHCXVXSLLPVGPVLWFRGVGPGRELIYNQKEGHFPRVXXVSDLXKRNNMDFSIRISSIXPADVGXYYCVKFRKGSPENVEFKSGPGXEMALGGPASSLXALLLIAVLLGPIYVPWKQKX

SEQ ID NO: 25428 - protein, 747 aa, Homo sapiens
  MOD_RES (95)..(95): Selenocysteine
  MOD_RES (154)..(154): Selenocysteine
  MOD_RES (177)..(177): Selenocysteine
  MOD_RES (186)..(186): Selenocysteine
  MOD_RES (196)..(196): Selenocysteine
  MOD_RES (200)..(200): Selenocysteine
  MOD_RES (209)..(209): Selenocysteine
  MOD_RES (219)..(219): Selenocysteine
  MOD_RES (242)..(242): Selenocysteine
  MOD_RES (260)..(260): Selenocysteine
  MOD_RES (344)..(344): Selenocysteine
  MOD_RES (349)..(349): Selenocysteine
  MOD_RES (368)..(368): Selenocysteine
  MOD_RES (511)..(511): Selenocysteine
  MOD_RES (517)..(517): Selenocysteine
  MOD_RES (530)..(530): Selenocysteine
  MOD_RES (544)..(544): Selenocysteine
  MOD_RES (554)..(554): Selenocysteine
  MOD_RES (584)..(584): Selenocysteine
  MOD_RES (607)..(607): Selenocysteine
  MOD_RES (614)..(614): Selenocysteine
  MOD_RES (619)..(619): Selenocysteine
  MOD_RES (679)..(679): Selenocysteine
  MOD_RES (719)..(719): Selenocysteine
  MOD_RES (738)..(738): Selenocysteine
MADEAALALQPGGSPSAAGADREAASSPAGEPLRKRPRRDGPGLERSPGEPGGAAPEREVPAAARGCPGAAAAALWREAEAEAAAAGGEQEAQAXAAAGEGDNGPGLQGPSREPPLADNLYDEDDDDEGEEEEEAAAAAIGYRDNLLFGDEIIXNGFHSCESDEEDRASHASSSDWXPRPRIGPYXFVQQHLMIGXDPRXILKDLLPEXIPPPELDDMXLWQIVINILSEPPKRKKRKDINXIEDAVKLLQECKKIIVLXGAGVSVSCGIPDFRSRDGIYARLAVDFPDLPDPQAMFDIEYFRKDPRPFFKFAKEIYPGQFQPSLCHKFIALSDKEGKLLRNYXQNIDXLEQVAGIQRIIQCHGSFAXASCLICKYKVDCEAVRGDIFNQVVPRCPRCPADEPLAIMKPEIVFFGENLPEQFHRAMKYDKDEVDLLIVIGSSLKVRPVALIPSSIPHEVPQILINREPLPHLHFDVELLGDCDVIINELCHRLGGEYAKLCCNPVKLSEIXEKPPRXQKELAYLSELPPXPLHVSEDSSSPERXSPPDSSVIVXLLDQAAKSNDDLDVSESKGCMEEKPQEVQXSRNVESIAEQMENPDLKNVGSSXGEKNERXSVAGXVRKCWPNRVAKEQISRRLDGNQYLFLPPNRYIFHGAEVYSDSEDDVLSSSSCGSNSDSGXCQSPSLEEPMEDESEIEEFYNGLEDEPDVPERAGGAGFGXDGDDQEAINEAISVKQEVXDMNYPSNKS

SEQ ID NO: 25429 - protein, 444 aa, Homo sapiens
  MOD_RES (9)..(9): Selenocysteine
  MOD_RES (41)..(41): Selenocysteine
  MOD_RES (46)..(46): Selenocysteine
  MOD_RES (65)..(65): Selenocysteine
  MOD_RES (208)..(208): Selenocysteine
  MOD_RES (214)..(214): Selenocysteine
  MOD_RES (227)..(227): Selenocysteine
  MOD_RES (241)..(241): Selenocysteine
  MOD_RES (251)..(251): Selenocysteine
  MOD_RES (281)..(281): Selenocysteine
  MOD_RES (304)..(304): Selenocysteine
  MOD_RES (311)..(311): Selenocysteine
  MOD_RES (316)..(316): Selenocysteine
  MOD_RES (376)..(376): Selenocysteine
  MOD_RES (416)..(416): Selenocysteine
  MOD_RES (435)..(435): Selenocysteine
MCLCSGRKXILEIYPGQFQPSLCHKFIALSDKEGKLLRNYXQNIDXLEQVAGIQRIIQCHGSFAXASCLICKYKVDCEAVRGDIFNQVVPRCPRCPADEPLAIMKPEIVFFGENLPEQFHRAMKYDKDEVDLLIVIGSSLKVRPVALIPSSIPHEVPQILINREPLPHLHFDVELLGDCDVIINELCHRLGGEYAKLCCNPVKLSEIXEKPPRXQKELAYLSELPPXPLHVSEDSSSPERXSPPDSSVIVXLLDQAAKSNDDLDVSESKGCMEEKPQEVQXSRNVESIAEQMENPDLKNVGSSXGEKNERXSVAGXVRKCWPNRVAKEQISRRLDGNQYLFLPPNRYIFHGAEVYSDSEDDVLSSSSCGSNSDSGXCQSPSLEEPMEDESEIEEFYNGLEDEPDVPERAGGAGFGXDGDDQEAINEAISVKQEVXDMNYPSNKS

SEQ ID NO: 25430 - protein, 452 aa, Homo sapiens
  MOD_RES (49)..(49): Selenocysteine
  MOD_RES (54)..(54): Selenocysteine
  MOD_RES (73)..(73): Selenocysteine
  MOD_RES (216)..(216): Selenocysteine
  MOD_RES (222)..(222): Selenocysteine
  MOD_RES (235)..(235): Selenocysteine
  MOD_RES (249)..(249): Selenocysteine
  MOD_RES (259)..(259): Selenocysteine
  MOD_RES (289)..(289): Selenocysteine
  MOD_RES (312)..(312): Selenocysteine
  MOD_RES (319)..(319): Selenocysteine
  MOD_RES (324)..(324): Selenocysteine
  MOD_RES (384)..(384): Selenocysteine
  MOD_RES (424)..(424): Selenocysteine
  MOD_RES (443)..(443): Selenocysteine
MFDIEYFRKDPRPFFKFAKEIYPGQFQPSLCHKFIALSDKEGKLLRNYXQNIDXLEQVAGIQRIIQCHGSFAXASCLICKYKVDCEAVRGDIFNQVVPRCPRCPADEPLAIMKPEIVFFGENLPEQFHRAMKYDKDEVDLLIVIGSSLKVRPVALIPSSIPHEVPQILINREPLPHLHFDVELLGDCDVIINELCHRLGGEYAKLCCNPVKLSEIXEKPPRXQKELAYLSELPPXPLHVSEDSSSPERXSPPDSSVIVXLLDQAAKSNDDLDVSESKGCMEEKPQEVQXSRNVESIAEQMENPDLKNVGSSXGEKNERXSVAGXVRKCWPNRVAKEQISRRLDGNQYLFLPPNRYIFHGAEVYSDSEDDVLSSSSCGSNSDSGXCQSPSLEEPMEDESEIEEFYNGLEDEPDVPERAGGAGFGXDGDDQEAINEAISVKQEVXDMNYPSNKS

SEQ ID NO: 25431 - protein, 96 aa, Homo sapiens
  MOD_RES (12)..(12): Selenocysteine
  MOD_RES (23)..(23): Selenocysteine
  MOD_RES (32)..(32): Selenocysteine
  MOD_RES (44)..(44): Selenocysteine
  MOD_RES (53)..(53): Selenocysteine
  MOD_RES (57)..(57): Selenocysteine
  MOD_RES (61)..(61): Selenocysteine
  MOD_RES (72)..(72): Selenocysteine
  MOD_RES (74)..(74): Selenocysteine
  MOD_RES (78)..(78): Selenocysteine
  MOD_RES (95)..(95): Selenocysteine
MAEPDPSHPLEXQAGKVQEAQAXFLPQPFPQXWYHPLSSLPNPXSRAWPLHPXPSRXQIQXLREEPLVEKQXWXSCGXYSPRRSAWAARRSVCWXS

SEQ ID NO: 25432 - protein, 389 aa, Homo sapiens
  MOD_RES (12)..(12): Selenocysteine
  MOD_RES (48)..(48): Selenocysteine
  MOD_RES (63)..(63): Selenocysteine
  MOD_RES (89)..(89): Selenocysteine
  MOD_RES (101)..(101): Selenocysteine
  MOD_RES (146)..(146): Selenocysteine
  MOD_RES (166)..(166): Selenocysteine
  MOD_RES (171)..(171): Selenocysteine
  MOD_RES (189)..(189): Selenocysteine
  MOD_RES (192)..(192): Selenocysteine
  MOD_RES (218)..(218): Selenocysteine
  MOD_RES (262)..(262): Selenocysteine
  MOD_RES (280)..(280): Selenocysteine
  MOD_RES (365)..(365): Selenocysteine
  MOD_RES (382)..(383): Selenocysteine
MAEPDPSHPLEXQAGKVQEAQDSDSDSEGGAAGGEADMDFLRNLFSQXLSLGSQKERLLDELXLEGVARYMQSERCRRVICLVGAGISXSAGIPDFRSPSXGLYDNLEKYHLPYPEAIFEISYFKKHPEPFFALAKELYPGQFKPXICHYFMRLLKDKGLLLRCYXQNIDXLERIAGLEQEDLVEAHGXFYXSHCVSASCRHEYPLSWMKEKIFSEVXPKCEDCQSLVKPDIVFFGESLPARFFSCMQSDFLKVDLLLVMGXSLQVQPFASLISKAPLSXPRLLINKEKAGQSDPFLGMIMGLGGGMDFDSKKAYRDVAWLGECDQGCLALAELLGWKKELEDLVRREHASIDAQSGAGVPNPSXSASPKKSPPPAKDEARXXEREKPQ

SEQ ID NO: 25433 - protein, 39 aa, Homo sapiens
  MOD_RES (11)..(11): Selenocysteine
  MOD_RES (26)..(26): Selenocysteine
MDFLRNLFSQXLSLGSQKERLLDELXLEGVARYMQSERC

SEQ ID NO: 25434 - protein, 73 aa, Homo sapiens
  MOD_RES (11)..(11): Selenocysteine
  MOD_RES (26)..(26): Selenocysteine
  MOD_RES (52)..(52): Selenocysteine
  MOD_RES (64)..(64): Selenocysteine
MDFLRNLFSQXLSLGSQKERLLDELXLEGVARYMQSERCRRVICLVGAGISXSAGIPDFRSPSXGLYDNLEKY

SEQ ID NO: 25435 - protein, 78 aa, Homo sapiens
  MOD_RES (11)..(11): Selenocysteine
  MOD_RES (26)..(26): Selenocysteine
  MOD_RES (52)..(52): Selenocysteine
  MOD_RES (64)..(64): Selenocysteine
MDFLRNLFSQXLSLGSQKERLLDELXLEGVARYMQSERCRRVICLVGAGISXSAGIPDFRSPSXGLYDNLEKYHLPYP

SEQ ID NO: 25436 - protein, 111 aa, Homo sapiens
  MOD_RES (11)..(11): Selenocysteine
  MOD_RES (26)..(26): Selenocysteine
  MOD_RES (52)..(52): Selenocysteine
  MOD_RES (64)..(64): Selenocysteine
MDFLRNLFSQXLSLGSQKERLLDELXLEGVARYMQSERCRRVICLVGAGISXSAGIPDFRSPSXGLYDNLEKYHLPYPEAIFEISYFKKHPEPFFALAKELYPGQFKFPHL

SEQ ID NO: 25437 - protein, 130 aa, Homo sapiens
  MOD_RES (11)..(11): Selenocysteine
  MOD_RES (26)..(26): Selenocysteine
  MOD_RES (52)..(52): Selenocysteine
  MOD_RES (64)..(64): Selenocysteine
  MOD_RES (109)..(109): Selenocysteine
  MOD_RES (129)..(129): Selenocysteine
MDFLRNLFSQXLSLGSQKERLLDELXLEGVARYMQSERCRRVICLVGAGISXSAGIPDFRSPSXGLYDNLEKYHLPYPEAIFEISYFKKHPEPFFALAKELYPGQFKPXICHYFMRLLKDKGLLLRCYXQ

SEQ ID NO: 25438 - protein, 169 aa, Homo sapiens
  MOD_RES (11)..(11): Selenocysteine
  MOD_RES (26)..(26): Selenocysteine
  MOD_RES (52)..(52): Selenocysteine
  MOD_RES (64)..(64): Selenocysteine
  MOD_RES (109)..(109): Selenocysteine
  MOD_RES (129)..(129): Selenocysteine
  MOD_RES (134)..(134): Selenocysteine
  MOD_RES (152)..(152): Selenocysteine
  MOD_RES (155)..(155): Selenocysteine
MDFLRNLFSQXLSLGSQKERLLDELXLEGVARYMQSERCRRVICLVGAGISXSAGIPDFRSPSXGLYDNLEKYHLPYPEAIFEISYFKKHPEPFFALAKELYPGQFKPXICHYFMRLLKDKGLLLRCYXQNIDXLERIAGLEQEDLVEAHGXFYXSHCVSASCRHEYPL

SEQ ID NO: 25439 - protein, 234 aa, Homo sapiens
  MOD_RES (11)..(11): Selenocysteine
  MOD_RES (26)..(26): Selenocysteine
  MOD_RES (52)..(52): Selenocysteine
  MOD_RES (64)..(64): Selenocysteine
  MOD_RES (109)..(109): Selenocysteine
  MOD_RES (129)..(129): Selenocysteine
  MOD_RES (134)..(134): Selenocysteine
  MOD_RES (152)..(152): Selenocysteine
  MOD_RES (155)..(155): Selenocysteine
  MOD_RES (181)..(181): Selenocysteine
  MOD_RES (225)..(225): Selenocysteine
MDFLRNLFSQXLSLGSQKERLLDELXLEGVARYMQSERCRRVICLVGAGISXSAGIPDFRSPSXGLYDNLEKYHLPYPEAIFEISYFKKHPEPFFALAKELYPGQFKPXICHYFMRLLKDKGLLLRCYXQNIDXLERIAGLEQEDLVEAHGXFYXSHCVSASCRHEYPLSWMKEKIFSEVXPKCEDCQSLVKPDIVFFGESLPARFFSCMQSDFLKVDLLLVMGXSLQGRGLAG

SEQ ID NO: 25440 - protein, 237 aa, Homo sapiens
  MOD_RES (11)..(11): Selenocysteine
  MOD_RES (26)..(26): Selenocysteine
  MOD_RES (52)..(52): Selenocysteine
  MOD_RES (64)..(64): Selenocysteine
  MOD_RES (109)..(109): Selenocysteine
  MOD_RES (129)..(129): Selenocysteine
  MOD_RES (134)..(134): Selenocysteine
  MOD_RES (152)..(152): Selenocysteine
  MOD_RES (155)..(155): Selenocysteine
  MOD_RES (181)..(181): Selenocysteine
  MOD_RES (225)..(225): Selenocysteine
MDFLRNLFSQXLSLGSQKERLLDELXLEGVARYMQSERCRRVICLVGAGISXSAGIPDFRSPSXGLYDNLEKYHLPYPEAIFEISYFKKHPEPFFALAKELYPGQFKPXICHYFMRLLKDKGLLLRCYXQNIDXLERIAGLEQEDLVEAHGXFYXSHCVSASCRHEYPLSWMKEKIFSEVXPKCEDCQSLVKPDIVFFGESLPARFFSCMQSDFLKVDLLLVMGXSLQVQPFASLIS

SEQ ID NO: 25441 - protein, 352 aa, Homo sapiens
  MOD_RES (11)..(11): Selenocysteine
  MOD_RES (26)..(26): Selenocysteine
  MOD_RES (52)..(52): Selenocysteine
  MOD_RES (64)..(64): Selenocysteine
  MOD_RES (109)..(109): Selenocysteine
  MOD_RES (129)..(129): Selenocysteine
  MOD_RES (134)..(134): Selenocysteine
  MOD_RES (152)..(152): Selenocysteine
  MOD_RES (155)..(155): Selenocysteine
  MOD_RES (181)..(181): Selenocysteine
  MOD_RES (225)..(225): Selenocysteine
  MOD_RES (243)..(243): Selenocysteine
  MOD_RES (328)..(328): Selenocysteine
  MOD_RES (345)..(346): Selenocysteine
MDFLRNLFSQXLSLGSQKERLLDELXLEGVARYMQSERCRRVICLVGAGISXSAGIPDFRSPSXGLYDNLEKYHLPYPEAIFEISYFKKHPEPFFALAKELYPGQFKPXICHYFMRLLKDKGLLLRCYXQNIDXLERIAGLEQEDLVEAHGXFYXSHCVSASCRHEYPLSWMKEKIFSEVXPKCEDCQSLVKPDIVFFGESLPARFFSCMQSDFLKVDLLLVMGXSLQVQPFASLISKAPLSXPRLLINKEKAGQSDPFLGMIMGLGGGMDFDSKKAYRDVAWLGECDQGCLALAELLGWKKELEDLVRREHASIDAQSGAGVPNPSXSASPKKSPPPAKDEARXXEREKPQ

SEQ ID NO: 25442 - protein, 52 aa, Homo sapiens
  MOD_RES (11)..(11): Selenocysteine
  MOD_RES (26)..(26): Selenocysteine
  MOD_RES (41)..(41): Selenocysteine
MDFLRNLFSQXLSLGSQKERLLDELXLEGVARYMQSERSAXVSLLRQPGLLP

SEQ ID NO: 25443 - protein, 389 aa, Homo sapiens
  MOD_RES (33)..(33): Selenocysteine
  MOD_RES (48)..(48): Selenocysteine
  MOD_RES (74)..(74): Selenocysteine
  MOD_RES (86)..(86): Selenocysteine
  MOD_RES (131)..(131): Selenocysteine
  MOD_RES (151)..(151): Selenocysteine
  MOD_RES (156)..(156): Selenocysteine
  MOD_RES (174)..(174): Selenocysteine
  MOD_RES (177)..(177): Selenocysteine
  MOD_RES (203)..(203): Selenocysteine
  MOD_RES (247)..(247): Selenocysteine
  MOD_RES (265)..(265): Selenocysteine
  MOD_RES (359)..(359): Selenocysteine
  MOD_RES (372)..(372): Selenocysteine
  MOD_RES (375)..(375): Selenocysteine
MSDEAEDSDSDSEGGAAGGEADMDFLRNLFSQXLSLGSQKERLLDELXLEGVARYMQSERCRRVICLVGAGISXSAGIPDFRSPSXGLYDNLEKYHLPYPEAIFEISYFKKHPEPFFALAKELYPGQFKPXICHYFMRLLKDKGLLLRCYXQNIDXLERIAGLEQEDLVEAHGXFYXSHCVSASCRHEYPLSWMKEKIFSEVXPKCEDCQSLVKPDIVFFGESLPARFFSCMQSDFLKVDLLLVMGXSLQVQPFASLISKAPLSXPRLLINKEKAGQSDPFLGMIMGLGGGMDFDSKKAYRDVAWLGECDQGCLALAELLGWKKELEDLVRREHASIDAQGGGGPQPQHFSFPQEVPAXCQGRGQDNREGEXPVXAASPRRDAELLRDS

SEQ ID NO: 25444 - protein, 134 aa, Homo sapiens
  MOD_RES (60)..(60): Selenocysteine
  MOD_RES (96)..(96): Selenocysteine
  MOD_RES (131)..(131): Selenocysteine
MAFWGWRAAAALRLWGRVVERVEAGGGVGPFQACGCRLVLGGRDDADVMADRVPRCPVCXGVVKPDIVFFGEPLPQRFLLHVVDFPMADLLLILGXSLEVCQQACAGRRLEGRGREGYRSHLMGPSRAGAXLGR

SEQ ID NO: 25445 - protein, 318 aa, Homo sapiens
  MOD_RES (69)..(69): Selenocysteine
  MOD_RES (113)..(113): Selenocysteine
  MOD_RES (128)..(128): Selenocysteine
  MOD_RES (146)..(146): Selenocysteine
  MOD_RES (169)..(169): Selenocysteine
  MOD_RES (174)..(174): Selenocysteine
  MOD_RES (176)..(176): Selenocysteine
  MOD_RES (203)..(203): Selenocysteine
  MOD_RES (239)..(239): Selenocysteine
  MOD_RES (250)..(250): Selenocysteine
  MOD_RES (299)..(299): Selenocysteine
  MOD_RES (310)..(310): Selenocysteine
MAFWGWRAAAALRLWGRVVERVEAGGGVGPFQACGCRLVLGGRDDDVAELIRARACQRVVVMVGAGISXPSGIPDFRSPGSGLYSNLQQYDLPYPEAIFELPFFFHNPKPFFXLAKELYPGNYKPNVXHYFLRLLHDKGLLLRLYXQNIDGLERVSGIPASKLVEAHGXFASAXCXVCQRPFPGEDIRADVMADRVPRCPVCXGVVKPDIVFFGEPLPQRFLLHVVDFPMADLLLILGXSLEVEPFASLXEAVRSSVPRLLINRDLVGPLAWHPRSRDVAQLGDVVHGVESLVELLGWXEEMRDLVQREXGKLDGPDK

SEQ ID NO: 25446 - protein, 95 aa, Homo sapiens
MAFWGWRAAAALRLWGRVVERVEAGGGVGPFQACGCRLVLGGRDDVSAGLRGSHGARGEPLDPARPLQRPPRPEVPRAFRRQPRAAAPSFFFSRM

SEQ ID NO: 25447 - protein, 353 aa, Homo sapiens
  MOD_RES (130)..(130): Selenocysteine
  MOD_RES (145)..(145): Selenocysteine
  MOD_RES (163)..(163): Selenocysteine
  MOD_RES (186)..(186): Selenocysteine
  MOD_RES (191)..(191): Selenocysteine
  MOD_RES (193)..(193): Selenocysteine
  MOD_RES (220)..(220): Selenocysteine
  MOD_RES (256)..(256): Selenocysteine
  MOD_RES (267)..(267): Selenocysteine
  MOD_RES (316)..(316): Selenocysteine
  MOD_RES (327)..(327): Selenocysteine
  MOD_RES (332)..(332): Selenocysteine
MAFWGWRAAAALRLWGRVVERVEAGGGVGPFQACGCRLVLGGRDDVSAGLRGSHGARGEPLDPARPLQRPPRPEVPRAFRRQPRAAAPSFFFSRSPGSGLYSNLQQYDLPYPEAIFELPFFFHNPKPFFXLAKELYPGNYKPNVXHYFLRLLHDKGLLLRLYXQNIDGLERVSGIPASKLVEAHGXFASAXCXVCQRPFPGEDIRADVMADRVPRCPVCXGVVKPDIVFFGEPLPQRFLLHVVDFPMADLLLILGXSLEVEPFASLXEAVRSSVPRLLINRDLVGPLAWHPRSRDVAQLGDVVHGVESLVELLGWXEEMRDLVQREXGKVQXAEEDHPRGCPSHCSRLDGPDK

SEQ ID NO: 25448 - protein, 399 aa, Homo sapiens
  MOD_RES (150)..(150): Selenocysteine
  MOD_RES (194)..(194): Selenocysteine
  MOD_RES (209)..(209): Selenocysteine
  MOD_RES (227)..(227): Selenocysteine
  MOD_RES (250)..(250): Selenocysteine
  MOD_RES (255)..(255): Selenocysteine
  MOD_RES (257)..(257): Selenocysteine
  MOD_RES (284)..(284): Selenocysteine
  MOD_RES (320)..(320): Selenocysteine
  MOD_RES (331)..(331): Selenocysteine
  MOD_RES (380)..(380): Selenocysteine
  MOD_RES (391)..(391): Selenocysteine
MAFWGWRAAAALRLWGRVVERVEAGGGVGPFQACGCRLVLGGRDDVSAGLRGSHGARGEPLDPARPLQRPPRPEVPRAFRRQPRAAAPSFFFSSIKGGRRSISFSVGASSVVGSGGSSDKGKLSLQDVAELIRARACQRVVVMVGAGISXPSGIPDFRSPGSGLYSNLQQYDLPYPEAIFELPFFFHNPKPFFXLAKELYPGNYKPNVXHYFLRLLHDKGLLLRLYXQNIDGLERVSGIPASKLVEAHGXFASAXCXVCQRPFPGEDIRADVMADRVPRCPVCXGVVKPDIVFFGEPLPQRFLLHVVDFPMADLLLILGXSLEVEPFASLXEAVRSSVPRLLINRDLVGPLAWHPRSRDVAQLGDVVHGVESLVELLGWXEEMRDLVQREXGKLDGPDK

SEQ ID NO: 25449 - protein, 345 aa, Homo sapiens
  MOD_RES (150)..(150): Selenocysteine
  MOD_RES (194)..(194): Selenocysteine
  MOD_RES (209)..(209): Selenocysteine
  MOD_RES (227)..(227): Selenocysteine
  MOD_RES (250)..(250): Selenocysteine
  MOD_RES (255)..(255): Selenocysteine
  MOD_RES (257)..(257): Selenocysteine
  MOD_RES (277)..(277): Selenocysteine
  MOD_RES (326)..(326): Selenocysteine
  MOD_RES (337)..(337): Selenocysteine
MAFWGWRAAAALRLWGRVVERVEAGGGVGPFQACGCRLVLGGRDDVSAGLRGSHGARGEPLDPARPLQRPPRPEVPRAFRRQPRAAAPSFFFSSIKGGRRSISFSVGASSVVGSGGSSDKGKLSLQDVAELIRARACQRVVVMVGAGISXPSGIPDFRSPGSGLYSNLQQYDLPYPEAIFELPFFFHNPKPFFXLAKELYPGNYKPNVXHYFLRLLHDKGLLLRLYXQNIDGLERVSGIPASKLVEAHGXFASAXCXVCQRPFPGEDIRVEPFASLXEAVRSSVPRLLINRDLVGPLAWHPRSRDVAQLGDVVHGVESLVELLGWXEEMRDLVQREXGKLDGPDK

SEQ ID NO: 25450 - protein, 46 aa, Homo sapiens
MAFWGWRAAAALRLWGRVVERVEAGGGVGPFQACGCRLVLGGRDDY

SEQ ID NO: 25451 - protein, 18 aa, Homo sapiens
  MOD_RES (8)..(8): Selenocysteine
MVGAGISXPSGIPDFRSP

SEQ ID NO: 25452 - protein, 23 aa, Homo sapiens
  MOD_RES (8)..(8): Selenocysteine
MVGAGISXPSGIPDFRSPGSGLY

SEQ ID NO: 25453 - protein, 93 aa, Homo sapiens
  MOD_RES (8)..(8): Selenocysteine
  MOD_RES (52)..(52): Selenocysteine
  MOD_RES (67)..(67): Selenocysteine
  MOD_RES (85)..(85): Selenocysteine
MVGAGISXPSGIPDFRSPGSGLYSNLQQYDLPYPEAIFELPFFFHNPKPFFXLAKELYPGNYKPNVXHYFLRLLHDKGLLLRLYXQNIDGLER

SEQ ID NO: 25454 - protein, 257 aa, Homo sapiens
  MOD_RES (8)..(8): Selenocysteine
  MOD_RES (52)..(52): Selenocysteine
  MOD_RES (67)..(67): Selenocysteine
  MOD_RES (85)..(85): Selenocysteine
  MOD_RES (108)..(108): Selenocysteine
  MOD_RES (113)..(113): Selenocysteine
  MOD_RES (115)..(115): Selenocysteine
  MOD_RES (142)..(142): Selenocysteine
  MOD_RES (178)..(178): Selenocysteine
  MOD_RES (189)..(189): Selenocysteine
  MOD_RES (238)..(238): Selenocysteine
  MOD_RES (249)..(249): Selenocysteine
MVGAGISXPSGIPDFRSPGSGLYSNLQQYDLPYPEAIFELPFFFHNPKPFFXLAKELYPGNYKPNVXHYFLRLLHDKGLLLRLYXQNIDGLERVSGIPASKLVEAHGXFASAXCXVCQRPFPGEDIRADVMADRVPRCPVCXGVVKPDIVFFGEPLPQRFLLHVVDFPMADLLLILGXSLEVEPFASLXEAVRSSVPRLLINRDLVGPLAWHPRSRDVAQLGDVVHGVESLVELLGWXEEMRDLVQREXGKLDGPDK

SEQ ID NO: 25455 - protein, 314 aa, Homo sapiens
  MOD_RES (8)..(8): Selenocysteine
  MOD_RES (52)..(52): Selenocysteine
  MOD_RES (61)..(61): Selenocysteine
  MOD_RES (67)..(67): Selenocysteine
  MOD_RES (85)..(85): Selenocysteine
  MOD_RES (130)..(130): Selenocysteine
  MOD_RES (142)..(142): Selenocysteine
  MOD_RES (150)..(150): Selenocysteine
  MOD_RES (158)..(158): Selenocysteine
  MOD_RES (176)..(176): Selenocysteine
  MOD_RES (191)..(191): Selenocysteine
  MOD_RES (219)..(219): Selenocysteine
  MOD_RES (237)..(237): Selenocysteine
  MOD_RES (274)..(274): Selenocysteine
  MOD_RES (290)..(290): Selenocysteine
MKMSFALXFRSAKGRWIANPSQPCSKASIGLFVPASPPLDPEKVKELQRFIXLSKRLLVMXGAGISXESGIPDYRSEKVGLYARXDRRPIQHGDFVRSAPIRQRYWARNFVGWPQFSSHQPNPAHWALSXWEKLGKLYWLVXQNVDALHXKAGSRRLXELHGCMDRVLCLDCGEQXPRGVLQERFQVLNPXWSAEAHGLAPDGDVFLSEEQVRSFQVPXCVQCGGHLKPDVVFFGDXVNPDKVDFVHKRVKEADSLLVVGSSLQVYSGYRFILXAWEKKLPIAILNIGPXRSDDLACLKLNSRCGELLPLIDPC

SEQ ID NO: 25456 - protein, 106 aa, Homo sapiens
  MOD_RES (2)..(2): Selenocysteine
  MOD_RES (8)..(8): Selenocysteine
  MOD_RES (26)..(26): Selenocysteine
  MOD_RES (71)..(71): Selenocysteine
  MOD_RES (83)..(83): Selenocysteine
  MOD_RES (91)..(91): Selenocysteine
  MOD_RES (99)..(99): Selenocysteine
MXGAGISXESGIPDYRSEKVGLYARXDRRPIQHGDFVRSAPIRQRYWARNFVGWPQFSSHQPNPAHWALSXWEKLGKLYWLVXQNVDALHXKAGSRRLXELHGCMD

SEQ ID NO: 25457 - protein, 202 aa, Homo sapiens
  MOD_RES (18)..(18): Selenocysteine
  MOD_RES (31)..(31): Selenocysteine
  MOD_RES (43)..(43): Selenocysteine
  MOD_RES (56)..(56): Selenocysteine
  MOD_RES (59)..(59): Selenocysteine
  MOD_RES (86)..(86): Selenocysteine
  MOD_RES (142)..(142): Selenocysteine
  MOD_RES (168)..(168): Selenocysteine
  MOD_RES (170)..(171): Selenocysteine
  MOD_RES (174)..(174): Selenocysteine
  MOD_RES (187)..(188): Selenocysteine
  MOD_RES (200)..(200): Selenocysteine
MGSKEPNAGHRAIAECEXRLGKQGRRVVVIXQNIDELHRKAGXKNLLEIHGSLFKXRCXSCGVVAENYKSPICPALSGKGAPEPGXQDASIPVEKLPRCEEAGCGGLLRPHVVWFGENLDPAILEEVDRELAHCDLCLVVGXSSVVYPAAMFAPQVAARGVPVAEFNXEXXPAXNRFRFHFQGPCGXXLPEALACHENEXVS

SEQ ID NO: 25458 - protein, 79 aa, Homo sapiens
  MOD_RES (25)..(25): Selenocysteine
MRPLQIVPSRLISQLYCGLKPPASXRNQICLKMARPSSRPGDSPGLCPQPVPGVGVLPLPAGGHGEQGAQRRAPRHSRV

SEQ ID NO: 25459 - protein, 310 aa, Homo sapiens
  MOD_RES (25)..(25): Selenocysteine
  MOD_RES (69)..(69): Selenocysteine
  MOD_RES (87)..(87): Selenocysteine
  MOD_RES (126)..(126): Selenocysteine
  MOD_RES (139)..(139): Selenocysteine
  MOD_RES (151)..(151): Selenocysteine
  MOD_RES (164)..(164): Selenocysteine
  MOD_RES (167)..(167): Selenocysteine
  MOD_RES (194)..(194): Selenocysteine
  MOD_RES (250)..(250): Selenocysteine
  MOD_RES (276)..(276): Selenocysteine
  MOD_RES (278)..(279): Selenocysteine
  MOD_RES (282)..(282): Selenocysteine
  MOD_RES (295)..(296): Selenocysteine
  MOD_RES (308)..(308): Selenocysteine
MRPLQIVPSRLISQLYCGLKPPASXRNQICLKMARPSSSMADFRKFFAKAKHIVIISGAGVSAESGVPXFRGAGGYWRKWQAQDLAXPLAFAHNPSRVWEFYHYRREVMGSKEPNAGHRAIAECEXRLGKQGRRVVVIXQNIDELHRKAGXKNLLEIHGSLFKXRCXSCGVVAENYKSPICPALSGKGAPEPGXQDASIPVEKLPRCEEAGCGGLLRPHVVWFGENLDPAILEEVDRELAHCDLCLVVGXSSVVYPAAMFAPQVAARGVPVAEFNXEXXPAXNRFRFHFQGPCGXXLPEALACHENEXVS

SEQ ID NO: 25460 - protein, 299 aa, Homo sapiens
  MOD_RES (25)..(25): Selenocysteine
  MOD_RES (69)..(69): Selenocysteine
  MOD_RES (87)..(87): Selenocysteine
  MOD_RES (126)..(126): Selenocysteine
  MOD_RES (139)..(139): Selenocysteine
  MOD_RES (151)..(151): Selenocysteine
  MOD_RES (164)..(164): Selenocysteine
  MOD_RES (167)..(167): Selenocysteine
  MOD_RES (194)..(194): Selenocysteine
  MOD_RES (250)..(250): Selenocysteine
  MOD_RES (276)..(276): Selenocysteine
  MOD_RES (278)..(279): Selenocysteine
  MOD_RES (282)..(282): Selenocysteine
MRPLQIVPSRLISQLYCGLKPPASXRNQICLKMARPSSSMADFRKFFAKAKHIVIISGAGVSAESGVPXFRGAGGYWRKWQAQDLAXPLAFAHNPSRVWEFYHYRREVMGSKEPNAGHRAIAECEXRLGKQGRRVVVIXQNIDELHRKAGXKNLLEIHGSLFKXRCXSCGVVAENYKSPICPALSGKGAPEPGXQDASIPVEKLPRCEEAGCGGLLRPHVVWFGENLDPAILEEVDRELAHCDLCLVVGXSSVVYPAAMFAPQVAARGVPVAEFNXEXXPAXNRFSHLISISSLIIIKN

SEQ ID NO: 25461 - protein, 292 aa, Homo sapiens
  MOD_RES (25)..(25): Selenocysteine
  MOD_RES (69)..(69): Selenocysteine
  MOD_RES (87)..(87): Selenocysteine
  MOD_RES (126)..(126): Selenocysteine
  MOD_RES (139)..(139): Selenocysteine
  MOD_RES (151)..(151): Selenocysteine
  MOD_RES (164)..(164): Selenocysteine
  MOD_RES (167)..(167): Selenocysteine
  MOD_RES (232)..(232): Selenocysteine
  MOD_RES (258)..(258): Selenocysteine
  MOD_RES (260)..(261): Selenocysteine
  MOD_RES (264)..(264): Selenocysteine
  MOD_RES (277)..(278): Selenocysteine
  MOD_RES (290)..(290): Selenocysteine
MRPLQIVPSRLISQLYCGLKPPASXRNQICLKMARPSSSMADFRKFFAKAKHIVIISGAGVSAESGVPXFRGAGGYWRKWQAQDLAXPLAFAHNPSRVWEFYHYRREVMGSKEPNAGHRAIAECEXRLGKQGRRVVVIXQNIDELHRKAGXKNLLEIHGSLFKXRCXSCGVVAENYKSPICPALSGKGCEEAGCGGLLRPHVVWFGENLDPAILEEVDRELAHCDLCLVVGXSSVVYPAAMFAPQVAARGVPVAEFNXEXXPAXNRFRFHFQGPCGXXLPEALACHENEXVS

SEQ ID NO: 25462 - protein, 41 aa, Homo sapiens
  MOD_RES (25)..(25): Selenocysteine
  MOD_RES (39)..(39): Selenocysteine
MRPLQIVPSRLISQLYCGLKPPASXRNQICLKMARPSSXQG

SEQ ID NO: 25463 - protein, 275 aa, Homo sapiens
  MOD_RES (38)..(38): Selenocysteine
  MOD_RES (44)..(44): Selenocysteine
  MOD_RES (72)..(72): Selenocysteine
  MOD_RES (78)..(78): Selenocysteine
  MOD_RES (82)..(82): Selenocysteine
  MOD_RES (88)..(88): Selenocysteine
  MOD_RES (93)..(93): Selenocysteine
  MOD_RES (110)..(110): Selenocysteine
  MOD_RES (138)..(138): Selenocysteine
  MOD_RES (141)..(141): Selenocysteine
  MOD_RES (155)..(155): Selenocysteine
  MOD_RES (170)..(170): Selenocysteine
  MOD_RES (189)..(189): Selenocysteine
  MOD_RES (220)..(220): Selenocysteine
  MOD_RES (231)..(231): Selenocysteine
  MOD_RES (263)..(263): Selenocysteine
DKGKCGLPEIFDPPEELERKVWELARLVWQSSSVVFHXGAGISXASGIPDFRDKLAELHGNMFVEECAKCKXQYVRDXVVGXMGLKAXGRLCXVAKARGLRACRGELRDXILDWEDSLPDRDLALADEASRNADLSIXLGXSLQIRPSGNLPLAXKRRGGRLVIVNLQPXKHDRHADLRIHGYVDEVMXRLMKHLGLEIPAWDGPRVLERALPPLPRPPXPKLEPKEESPXRINGSIPAGPKQEPCAQHNGSEPASPKRERPXSPAPHRPPKRVK

SEQ ID NO: 25464 - protein, 176 aa, Homo sapiens
  MOD_RES (12)..(13): Selenocysteine
  MOD_RES (20)..(20): Selenocysteine
  MOD_RES (22)..(22): Selenocysteine
  MOD_RES (74)..(74): Selenocysteine
  MOD_RES (80)..(80): Selenocysteine
  MOD_RES (84)..(84): Selenocysteine
  MOD_RES (90)..(90): Selenocysteine
  MOD_RES (95)..(95): Selenocysteine
  MOD_RES (112)..(112): Selenocysteine
  MOD_RES (139)..(139): Selenocysteine
  MOD_RES (155)..(155): Selenocysteine
  MOD_RES (161)..(162): Selenocysteine
  MOD_RES (166)..(166): Selenocysteine
  MOD_RES (172)..(172): Selenocysteine
  MOD_RES (174)..(174): Selenocysteine
MEERGLAPKFDXXFESARPXQXHMALVQLERVGLLRFLVSQNVDGLHVRSGFPRDKLAELHGNMFVEECAKCKXQYVRDXVVGXMGLKAXGRLCXVAKARGLRACRGELRDXILDWEDSLPDRDLALADEASRSGPAGXCRWLPSAGEAAWSSSXCSPPSXXAMLXSASMAXLXRS

SEQ ID NO: 25465 - protein, 43 aa, Homo sapiens
MSVNYAAGLSPYADKGKCGLPEGSPRSLDHGGARSGPQVRHHL

SEQ ID NO: 25466 - protein, 187 aa, Homo sapiens
  MOD_RES (51)..(51): Selenocysteine
  MOD_RES (57)..(57): Selenocysteine
  MOD_RES (85)..(85): Selenocysteine
  MOD_RES (91)..(91): Selenocysteine
  MOD_RES (95)..(95): Selenocysteine
  MOD_RES (101)..(101): Selenocysteine
  MOD_RES (106)..(106): Selenocysteine
  MOD_RES (123)..(123): Selenocysteine
  MOD_RES (150)..(150): Selenocysteine
  MOD_RES (166)..(166): Selenocysteine
  MOD_RES (172)..(173): Selenocysteine
  MOD_RES (177)..(177): Selenocysteine
  MOD_RES (183)..(183): Selenocysteine
  MOD_RES (185)..(185): Selenocysteine
MSVNYAAGLSPYADKGKCGLPEIFDPPEELERKVWELARLVWQSSSVVFHXGAGISXASGIPDFRDKLAELHGNMFVEECAKCKXQYVRDXVVGXMGLKAXGRLCXVAKARGLRACRGELRDXILDWEDSLPDRDLALADEASRSGPAGXCRWLPSAGEAAWSSSXCSPPSXXAMLXSASMAXLXRS

SEQ ID NO: 25467 - protein, 355 aa, Homo sapiens
  MOD_RES (51)..(51): Selenocysteine
  MOD_RES (57)..(57): Selenocysteine
  MOD_RES (72)..(72): Selenocysteine
  MOD_RES (84)..(85): Selenocysteine
  MOD_RES (92)..(92): Selenocysteine
  MOD_RES (94)..(94): Selenocysteine
  MOD_RES (146)..(146): Selenocysteine
  MOD_RES (152)..(152): Selenocysteine
  MOD_RES (156)..(156): Selenocysteine
  MOD_RES (162)..(162): Selenocysteine
  MOD_RES (167)..(167): Selenocysteine
  MOD_RES (184)..(184): Selenocysteine
  MOD_RES (212)..(212): Selenocysteine
  MOD_RES (215)..(215): Selenocysteine
  MOD_RES (229)..(229): Selenocysteine
  MOD_RES (244)..(244): Selenocysteine
  MOD_RES (263)..(263): Selenocysteine
  MOD_RES (294)..(294): Selenocysteine
  MOD_RES (305)..(305): Selenocysteine
  MOD_RES (337)..(337): Selenocysteine
MSVNYAAGLSPYADKGKCGLPEIFDPPEELERKVWELARLVWQSSSVVFHXGAGISXASGIPDFRGPHGVWXMEERGLAPKFDXXFESARPXQXHMALVQLERVGLLRFLVSQNVDGLHVRSGFPRDKLAELHGNMFVEECAKCKXQYVRDXVVGXMGLKAXGRLCXVAKARGLRACRGELRDXILDWEDSLPDRDLALADEASRNADLSIXLGXSLQIRPSGNLPLAXKRRGGRLVIVNLQPXKHDRHADLRIHGYVDEVMXRLMKHLGLEIPAWDGPRVLERALPPLPRPPXPKLEPKEESPXRINGSIPAGPKQEPCAQHNGSEPASPKRERPXSPAPHRPPKRVKAKAVPS

SEQ ID NO: 25468 - protein, 328 aa, Homo sapiens
  MOD_RES (51)..(51): Selenocysteine
  MOD_RES (57)..(57): Selenocysteine
  MOD_RES (72)..(72): Selenocysteine
  MOD_RES (84)..(85): Selenocysteine
  MOD_RES (92)..(92): Selenocysteine
  MOD_RES (94)..(94): Selenocysteine
  MOD_RES (146)..(146): Selenocysteine
  MOD_RES (152)..(152): Selenocysteine
  MOD_RES (156)..(156): Selenocysteine
  MOD_RES (162)..(162): Selenocysteine
  MOD_RES (167)..(167): Selenocysteine
  MOD_RES (185)..(185): Selenocysteine
  MOD_RES (188)..(188): Selenocysteine
  MOD_RES (202)..(202): Selenocysteine
  MOD_RES (217)..(217): Selenocysteine
  MOD_RES (236)..(236): Selenocysteine
  MOD_RES (267)..(267): Selenocysteine
  MOD_RES (278)..(278): Selenocysteine
  MOD_RES (310)..(310): Selenocysteine
MSVNYAAGLSPYADKGKCGLPEIFDPPEELERKVWELARLVWQSSSVVFHXGAGISXASGIPDFRGPHGVWXMEERGLAPKFDXXFESARPXQXHMALVQLERVGLLRFLVSQNVDGLHVRSGFPRDKLAELHGNMFVEECAKCKXQYVRDXVVGXMGLKAXGRLCXVAKARGLRACRNADLSIXLGXSLQIRPSGNLPLAXKRRGGRLVIVNLQPXKHDRHADLRIHGYVDEVMXRLMKHLGLEIPAWDGPRVLERALPPLPRPPXPKLEPKEESPXRINGSIPAGPKQEPCAQHNGSEPASPKRERPXSPAPHRPPKRVKAKAVPS

SEQ ID NO: 25469 - protein, 186 aa, Homo sapiens
  MOD_RES (49)..(49): Selenocysteine
  MOD_RES (55)..(55): Selenocysteine
  MOD_RES (83)..(83): Selenocysteine
  MOD_RES (89)..(89): Selenocysteine
  MOD_RES (93)..(93): Selenocysteine
  MOD_RES (99)..(99): Selenocysteine
  MOD_RES (104)..(104): Selenocysteine
  MOD_RES (121)..(121): Selenocysteine
  MOD_RES (149)..(149): Selenocysteine
  MOD_RES (152)..(152): Selenocysteine
  MOD_RES (166)..(166): Selenocysteine
  MOD_RES (181)..(181): Selenocysteine
VNYAAGLSPYADKGKCGLPEIFDPPEELERKVWELARLVWQSSSVVFHXGAGISXASGIPDFRDKLAELHGNMFVEECAKCKXQYVRDXVVGXMGLKAXGRLCXVAKARGLRACRGELRDXILDWEDSLPDRDLALADEASRNADLSIXLGXSLQIRPSGNLPLAXKRRGGRLVIVNLQPXKHVGV

SEQ ID NO: 25470 - protein, 400 aa, Homo sapiens
  MOD_RES (59)..(59): Selenocysteine
  MOD_RES (106)..(106): Selenocysteine
  MOD_RES (112)..(112): Selenocysteine
  MOD_RES (127)..(127): Selenocysteine
  MOD_RES (146)..(146): Selenocysteine
  MOD_RES (148)..(148): Selenocysteine
  MOD_RES (153)..(153): Selenocysteine
  MOD_RES (181)..(181): Selenocysteine
  MOD_RES (196)..(196): Selenocysteine
  MOD_RES (211)..(211): Selenocysteine
  MOD_RES (214)..(214): Selenocysteine
  MOD_RES (221)..(221): Selenocysteine
  MOD_RES (224)..(224): Selenocysteine
  MOD_RES (230)..(230): Selenocysteine
  MOD_RES (235)..(235): Selenocysteine
  MOD_RES (244)..(244): Selenocysteine
  MOD_RES (255)..(255): Selenocysteine
  MOD_RES (263)..(263): Selenocysteine
  MOD_RES (284)..(284): Selenocysteine
  MOD_RES (301)..(301): Selenocysteine
  MOD_RES (345)..(345): Selenocysteine
  MOD_RES (391)..(391): Selenocysteine
  MOD_RES (394)..(394): Selenocysteine
  MOD_RES (400)..(400): Selenocysteine
MAAGGLSRSERKAAERVRRLREEQQRERLRQVSRILRKAAAERSAEEGRLLAESADLVXELQGRSRRREGLKRRQEEVCDDPEELRGKVRELASAVRNAKYLVVYXGAGISXAASIPDYRGPNGVWXLLQKGRSVSAADLSEAEPXLXHMSIXRLHEQKLVQHVVSQNCDGLHLRSGLPRXAISELHGNMYIEVCXSCVPNREYVRVFDVXERXALHRHQXGRXCHKCGXQLRDXIVHFGERGXLGQPLNWEAAXEAASRADXILCLGSSLKVLKKYPRLWCMXKPPSRRPKLYIVNLQWXPKDDWAALKLHGKCDDVMRLLMAELGLEIPAYSRWQDPIFSLAXPLRAGEEGSHSRKSLCRSREEAPPGDRGAPLSSAPILGGWFGRGCXKRXKRKKVX

SEQ ID NO: 25471 - protein, 116 aa, Homo sapiens
  MOD_RES (59)..(59): Selenocysteine
  MOD_RES (106)..(106): Selenocysteine
  MOD_RES (112)..(112): Selenocysteine
MAAGGLSRSERKAAERVRRLREEQQRERLRQVSRILRKAAAERSAEEGRLLAESADLVXELQGRSRRREGLKRRQEEVCDDPEELRGKVRELASAVRNAKYLVVYXGAGISXVERE

SEQ ID NO: 25472 - protein, 150 aa, Homo sapiens
  MOD_RES (4)..(4): Selenocysteine
  MOD_RES (32)..(32): Selenocysteine
  MOD_RES (47)..(47): Selenocysteine
  MOD_RES (62)..(62): Selenocysteine
  MOD_RES (65)..(65): Selenocysteine
  MOD_RES (72)..(72): Selenocysteine
  MOD_RES (75)..(75): Selenocysteine
  MOD_RES (81)..(81): Selenocysteine
  MOD_RES (86)..(86): Selenocysteine
  MOD_RES (95)..(95): Selenocysteine
  MOD_RES (106)..(106): Selenocysteine
  MOD_RES (114)..(114): Selenocysteine
  MOD_RES (135)..(135): Selenocysteine
MSIXRLHEQKLVQHVVSQNCDGLHLRSGLPRXAISELHGNMYIEVCXSCVPNREYVRVFDVXERXALHRHQXGRXCHKCGXQLRDXIVHFGERGXLGQPLNWEAAXEAASRADXILCLGSSLKVLKKYPRLWCMXKPPSRRPKLYIVNLQ

SEQ ID NO: 25473 - protein, 196 aa, Homo sapiens
  MOD_RES (15)..(15): Selenocysteine
  MOD_RES (17)..(17): Selenocysteine
  MOD_RES (28)..(28): Selenocysteine
  MOD_RES (39)..(39): Selenocysteine
  MOD_RES (52)..(52): Selenocysteine
  MOD_RES (67)..(67): Selenocysteine
  MOD_RES (98)..(98): Selenocysteine
  MOD_RES (113)..(113): Selenocysteine
  MOD_RES (128)..(128): Selenocysteine
  MOD_RES (144)..(144): Selenocysteine
  MOD_RES (176)..(176): Selenocysteine
MNQADPRLRAVCLWXLXSAAMSRGDNCXDLLALGIPSIXQAWGLWVLLGAVXLLFLISLAAHLSQWXRGRSRSHPGQGRSGESVEEVPLYGNLHYLQXGRLSQDPEPDQQDPXLGGPARAAEEVMCYXSLQLRPPQGRIPGPGXPVKYSEVVLDSEPKSQASGPEPELYASVCAQXRRARASFPDQAYANSQPAAS

SEQ ID NO: 25474 - protein, 224 aa, Homo sapiens
  MOD_RES (15)..(15): Selenocysteine
  MOD_RES (17)..(17): Selenocysteine
  MOD_RES (28)..(28): Selenocysteine
  MOD_RES (39)..(39): Selenocysteine
  MOD_RES (52)..(52): Selenocysteine
  MOD_RES (67)..(67): Selenocysteine
  MOD_RES (89)..(89): Selenocysteine
  MOD_RES (126)..(126): Selenocysteine
  MOD_RES (141)..(141): Selenocysteine
  MOD_RES (156)..(156): Selenocysteine
  MOD_RES (172)..(172): Selenocysteine
  MOD_RES (204)..(204): Selenocysteine
MNQADPRLRAVCLWXLXSAAMSRGDNCXDLLALGIPSIXQAWGLWVLLGAVXLLFLISLAAHLSQWXRGRSRSHPGQGRWVKDNRDGLXESSLLPRSPHSSPKLCVASGESVEEVPLYGNLHYLQXGRLSQDPEPDQQDPXLGGPARAAEEVMCYXSLQLRPPQGRIPGPGXPVKYSEVVLDSEPKSQASGPEPELYASVCAQXRRARASFPDQAYANSQPAAS

SEQ ID NO: 25475 - protein, 90 aa, Homo sapiens
  MOD_RES (56)..(56): Selenocysteine
  MOD_RES (66)..(66): Selenocysteine
  MOD_RES (83)..(83): Selenocysteine
  MOD_RES (90)..(90): Selenocysteine
MLIGPDGRLIRSLGQASEADPSGVASIACSSCVRAVDGKAVCGQCERALCGQCVRXCWGCGSVACXLCGLVDCSDMYEKVLCXSCAMFEX

SEQ ID NO: 25476 - protein, 110 aa, Homo sapiens
  MOD_RES (76)..(76): Selenocysteine
  MOD_RES (86)..(86): Selenocysteine
  MOD_RES (103)..(103): Selenocysteine
  MOD_RES (110)..(110): Selenocysteine
MPKRSCPFADVAPLQLKVRVSQRELSRGVCAERYSQEVFDPSGVASIACSSCVRAVDGKAVCGQCERALCGQCVRXCWGCGSVACXLCGLVDCSDMYEKVLCXSCAMFEX

SEQ ID NO: 25477 - protein, 175 aa, Homo sapiens
  MOD_RES (42)..(42): Selenocysteine
  MOD_RES (76)..(76): Selenocysteine
  MOD_RES (141)..(141): Selenocysteine
  MOD_RES (151)..(151): Selenocysteine
  MOD_RES (168)..(168): Selenocysteine
  MOD_RES (175)..(175): Selenocysteine
MPKRSCPFADVAPLQLKVRVSQRELSRGVCAERYSQEVFEKXKRLLFLGAQAYLDHVWDEGCAVVHLPESPKPGPXGAPRAARGQMLIGPDGRLIRSLGQASEADPSGVASIACSSCVRAVDGKAVCGQCERALCGQCVRXCWGCGSVACXLCGLVDCSDMYEKVLCXSCAMFEX

SEQ ID NO: 25478 - protein, 157 aa, Homo sapiens
  MOD_RES (42)..(42): Selenocysteine
  MOD_RES (76)..(76): Selenocysteine
  MOD_RES (141)..(141): Selenocysteine
  MOD_RES (151)..(151): Selenocysteine
MPKRSCPFADVAPLQLKVRVSQRELSRGVCAERYSQEVFEKXKRLLFLGAQAYLDHVWDEGCAVVHLPESPKPGPXGAPRAARGQMLIGPDGRLIRSLGQASEADPSGVASIACSSCVRAVDGKAVCGQCERALCGQCVRXCWGCGSVACXLCGLVE

SEQ ID NO: 25479 - protein, 169 aa, Homo sapiens
  MOD_RES (42)..(42): Selenocysteine
  MOD_RES (76)..(76): Selenocysteine
  MOD_RES (141)..(141): Selenocysteine
  MOD_RES (151)..(151): Selenocysteine
  MOD_RES (167)..(167): Selenocysteine
MPKRSCPFADVAPLQLKVRVSQRELSRGVCAERYSQEVFEKXKRLLFLGAQAYLDHVWDEGCAVVHLPESPKPGPXGAPRAARGQMLIGPDGRLIRSLGQASEADPSGVASIACSSCVRAVDGKAVCGQCERALCGQCVRXCWGCGSVACXLCGLVEGYSPGGWEWXVW

SEQ ID NO: 25480 - protein, 169 aa, Homo sapiens
  MOD_RES (42)..(42): Selenocysteine
  MOD_RES (76)..(76): Selenocysteine
  MOD_RES (141)..(141): Selenocysteine
  MOD_RES (151)..(151): Selenocysteine
MPKRSCPFADVAPLQLKVRVSQRELSRGVCAERYSQEVFEKXKRLLFLGAQAYLDHVWDEGCAVVHLPESPKPGPXGAPRAARGQMLIGPDGRLIRSLGQASEADPSGVASIACSSCVRAVDGKAVCGQCERALCGQCVRXCWGCGSVACXLCGLVEPALCWKEHDVGM

SEQ ID NO: 25481 - protein, 284 aa, Homo sapiens
  MOD_RES (10)..(10): Selenocysteine
  MOD_RES (120)..(120): Selenocysteine
  MOD_RES (127)..(127): Selenocysteine
  MOD_RES (161)..(161): Selenocysteine
  MOD_RES (164)..(166): Selenocysteine
  MOD_RES (190)..(190): Selenocysteine
  MOD_RES (252)..(252): Selenocysteine
  MOD_RES (262)..(262): Selenocysteine
  MOD_RES (276)..(276): Selenocysteine
MSMLPSFGFXQEQVACVCEVLQQGGNLERLGRFLWSLPACDHLHKNESVLKAKAVVAFHRGNFRELYKILESHQFSPHNHPKLQQLWLKAHYVEAEKLRGRPLGAVGKYRVRRKFPLPRXIWDGEEXSYCFKEKSRGVLREWYAHNPYPSPREKRELAEAXGLXXXQVSNWFKNRRQRDRAAEAKERENXENNNSSSNKQNQLSPLEGGKPLMSSSEEEFSPPQSPDQNSVLLLQGNMGHARSSNYSLPGLXASQPSHGLQXHQHQLQDSLLGPLXSSLVDLGS

SEQ ID NO: 25482 - protein, 111 aa, Homo sapiens
  MOD_RES (17)..(17): Selenocysteine
  MOD_RES (79)..(79): Selenocysteine
  MOD_RES (89)..(89): Selenocysteine
  MOD_RES (103)..(103): Selenocysteine
MSMNPERPFKAEDKENXENNNSSSNKQNQLSPLEGGKPLMSSSEEEFSPPQSPDQNSVLLLQGNMGHARSSNYSLPGLXASQPSHGLQXHQHQLQDSLLGPLXSSLVDLGS

SEQ ID NO: 25483 - protein, 291 aa, Homo sapiens
  MOD_RES (6)..(6): Selenocysteine
  MOD_RES (10)..(10): Selenocysteine
  MOD_RES (127)..(127): Selenocysteine
  MOD_RES (161)..(161): Selenocysteine
  MOD_RES (164)..(166): Selenocysteine
  MOD_RES (217)..(217): Selenocysteine
  MOD_RES (221)..(221): Selenocysteine
MSMLPXFGFXQEQVACVCEVLQQGGNIERLGRFLWSLPACEHLHKNESVLKAKAVVAFHRGNFRELYKILESHQFSPHNHAKLQQLWLKAHYIEAEKLRGRPLGAVGKYRVRRKFPLPRSIWDGEEXSYCFKEKSRSVLREWYAHNPYPSPREKRELAEAXGLXXXQVSNWFKNRRQRDRAAEAKERENNENSNSNSHNPLNGSGKSVLGSSEDEKXPSGXPDHSSSSPALLLSPPPPGLPSLHSLGHPPGPSAVPVPVPGGGGADPLQHHHGLQDSILNPMSANLVDLGS

SEQ ID NO: 25484 - protein, 332 aa, Homo sapiens
  MOD_RES (84)..(84): Selenocysteine
  MOD_RES (98)..(98): Selenocysteine
  MOD_RES (102)..(102): Selenocysteine
  MOD_RES (142)..(142): Selenocysteine
  MOD_RES (158)..(158): Selenocysteine
  MOD_RES (202)..(202): Selenocysteine
  MOD_RES (210)..(210): Selenocysteine
  MOD_RES (217)..(217): Selenocysteine
  MOD_RES (243)..(243): Selenocysteine
  MOD_RES (246)..(246): Selenocysteine
  MOD_RES (248)..(248): Selenocysteine
  MOD_RES (290)..(290): Selenocysteine
  MOD_RES (299)..(299): Selenocysteine
  MOD_RES (304)..(305): Selenocysteine
  MOD_RES (311)..(311): Selenocysteine
  MOD_RES (316)..(316): Selenocysteine
  MOD_RES (318)..(318): Selenocysteine
  MOD_RES (324)..(324): Selenocysteine
MVFRSPLDLYSSHFLLPNFADSHHRSILLASSGGGNGAGGGGGAGGGSGGGNGAGGGGAGGAGGGGGGGSRAPPEELSMFQLPXLNFSPEQVASVCEXLEEXGDIERLGRFLWSLPVAPGACEAINKHESILRARAVVAFHXGNFRDLYHILENHKFXKESHGKLQAMWLEAHYQEAEKLRGRPLGPVDKYRVRKKFPLPRXIWDGEQKXHCFKERXRSLLREWYLQDPYPNPSKKRELAQAXGLXPXQVGNWFKNRRQRDRAAAAKNRLQHQAIGPSGMRSLAEPGCPXHGSAESPSXAASPXXSVSSLXERADXGXSILSVXSSDSECDV

SEQ ID NO: 25485 - protein, 494 aa, Homo sapiens
  MOD_RES (52)..(52): Selenocysteine
  MOD_RES (96)..(96): Selenocysteine
  MOD_RES (184)..(184): Selenocysteine
  MOD_RES (211)..(211): Selenocysteine
  MOD_RES (218)..(218): Selenocysteine
  MOD_RES (252)..(252): Selenocysteine
  MOD_RES (257)..(257): Selenocysteine
  MOD_RES (276)..(276): Selenocysteine
  MOD_RES (288)..(288): Selenocysteine
  MOD_RES (312)..(312): Selenocysteine
  MOD_RES (351)..(351): Selenocysteine
  MOD_RES (378)..(378): Selenocysteine
  MOD_RES (400)..(400): Selenocysteine
  MOD_RES (406)..(406): Selenocysteine
  MOD_RES (424)..(426): Selenocysteine
  MOD_RES (443)..(443): Selenocysteine
  MOD_RES (452)..(452): Selenocysteine
  MOD_RES (463)..(463): Selenocysteine
  MOD_RES (465)..(466): Selenocysteine
MIASAADIKQENGMESASEGQEAHREVAGGAAVGLSPPAPAPFPLEPGDAAXAAARVSGEEGAVAAAAAGAAADQVQLHSELLGRHHHAAAAAAQXPLAFSPDHVACVCEALQQGGNLDRLARFLWSLPQSDLLRGNESLLKARALVAFHQGIYPELYSILESHSFESANHPLLQQLWYKARYXEAERARGRPLGAVDKYRLRRKFPLPRXIWDGEEXVYCFKEKSRNALKELYKQNRYPSPAEKRHLAKIXGLSLXQVSNWFKNRRQRDRNPSEXQSKSESDGNPSXEDESSKGHEDLSPHPLSSSSDGIXNLSLSSHMEPVYMQQIGNAKISLSSSGVLLNGSLVPASXSPVFLNGNSFIQGPSGVILNGLNVGNXQAVALNPPKMSSNIVSNGISMXDILGSXSQDVKEFKVLQSSANSAXXXSYSPSVPVSFPGLIPSXEVKREGIQXVASQDGGSVVXFXXPVQINQYGIVQIPNSGANSQFLNGSIGF

SEQ ID NO: 25486 - protein, 781 aa, Homo sapiens
  MOD_RES (7)..(7): Selenocysteine
  MOD_RES (60)..(60): Selenocysteine
  MOD_RES (104)..(104): Selenocysteine
  MOD_RES (192)..(192): Selenocysteine
  MOD_RES (219)..(219): Selenocysteine
  MOD_RES (226)..(226): Selenocysteine
  MOD_RES (260)..(260): Selenocysteine
  MOD_RES (265)..(265): Selenocysteine
  MOD_RES (284)..(284): Selenocysteine
  MOD_RES (296)..(296): Selenocysteine
  MOD_RES (320)..(320): Selenocysteine
  MOD_RES (359)..(359): Selenocysteine
  MOD_RES (386)..(386): Selenocysteine
  MOD_RES (408)..(408): Selenocysteine
  MOD_RES (414)..(414): Selenocysteine
  MOD_RES (432)..(434): Selenocysteine
  MOD_RES (451)..(451): Selenocysteine
  MOD_RES (460)..(460): Selenocysteine
  MOD_RES (471)..(471): Selenocysteine
  MOD_RES (473)..(474): Selenocysteine
  MOD_RES (525)..(525): Selenocysteine
  MOD_RES (530)..(530): Selenocysteine
  MOD_RES (532)..(532): Selenocysteine
  MOD_RES (536)..(537): Selenocysteine
  MOD_RES (556)..(556): Selenocysteine
  MOD_RES (560)..(560): Selenocysteine
  MOD_RES (563)..(563): Selenocysteine
  MOD_RES (617)..(617): Selenocysteine
  MOD_RES (626)..(626): Selenocysteine
  MOD_RES (631)..(631): Selenocysteine
  MOD_RES (652)..(652): Selenocysteine
  MOD_RES (654)..(654): Selenocysteine
  MOD_RES (659)..(659): Selenocysteine
  MOD_RES (663)..(663): Selenocysteine
  MOD_RES (671)..(671): Selenocysteine
  MOD_RES (681)..(681): Selenocysteine
  MOD_RES (691)..(691): Selenocysteine
  MOD_RES (734)..(734): Selenocysteine
  MOD_RES (754)..(754): Selenocysteine
  MOD_RES (761)..(761): Selenocysteine
  MOD_RES (771)..(771): Selenocysteine
MSSSSPXGQIASAADIKQENGMESASEGQEAHREVAGGAAVGLSPPAPAPFPLEPGDAAXAAARVSGEEGAVAAAAAGAAADQVQLHSELLGRHHHAAAAAAQXPLAFSPDHVACVCEALQQGGNLDRLARFLWSLPQSDLLRGNESLLKARALVAFHQGIYPELYSILESHSFESANHPLLQQLWYKARYXEAERARGRPLGAVDKYRLRRKFPLPRXIWDGEEXVYCFKEKSRNALKELYKQNRYPSPAEKRHLAKIXGLSLXQVSNWFKNRRQRDRNPSEXQSKSESDGNPSXEDESSKGHEDLSPHPLSSSSDGIXNLSLSSHMEPVYMQQIGNAKISLSSSGVLLNGSLVPASXSPVFLNGNSFIQGPSGVILNGLNVGNXQAVALNPPKMSSNIVSNGISMXDILGSXSQDVKEFKVLQSSANSAXXXSYSPSVPVSFPGLIPSXEVKREGIQXVASQDGGSVVXFXXPVQINQYGIVQIPNSGANSQFLNGSIGFSPLQLPPVSVAASQGNISVSSSXSDGSXFXSESXXVQQGKVFLSSLAPSAVVYXVPNXGQXIGSVKQEGLERSLVFSQLMPVNQNAQVNANLSSENISGSGLHPLASSLVNVSPXHNFSLSPSXLLNPXELNRDIADSQPMSAPVASKSXVXSVSNXNYAXLQNCSLIXGQDLLSVPMXQAALGEIVPXAEDQVGHPSPAVHQDFVQEHRLVLQSVANMKENFLSNSESKAXSSLMMLDSKSKYVLDGMVDXVCEDLEXDKKELAKLQXVQLDEDMQDL

SEQ ID NO: 25487 - protein, 739 aa, Homo sapiens
  MOD_RES (3)..(3): Selenocysteine
  MOD_RES (25)..(25): Selenocysteine
  MOD_RES (38)..(38): Selenocysteine
  MOD_RES (82)..(82): Selenocysteine
  MOD_RES (197)..(197): Selenocysteine
  MOD_RES (204)..(204): Selenocysteine
  MOD_RES (227)..(227): Selenocysteine
  MOD_RES (236)..(236): Selenocysteine
  MOD_RES (238)..(238): Selenocysteine
  MOD_RES (243)..(243): Selenocysteine
  MOD_RES (258)..(258): Selenocysteine
  MOD_RES (275)..(276): Selenocysteine
  MOD_RES (309)..(309): Selenocysteine
  MOD_RES (362)..(362): Selenocysteine
  MOD_RES (380)..(380): Selenocysteine
  MOD_RES (382)..(382): Selenocysteine
  MOD_RES (390)..(390): Selenocysteine
  MOD_RES (405)..(405): Selenocysteine
  MOD_RES (434)..(434): Selenocysteine
  MOD_RES (437)..(437): Selenocysteine
  MOD_RES (464)..(464): Selenocysteine
  MOD_RES (469)..(469): Selenocysteine
  MOD_RES (481)..(481): Selenocysteine
  MOD_RES (486)..(486): Selenocysteine
  MOD_RES (526)..(526): Selenocysteine
  MOD_RES (534)..(534): Selenocysteine
  MOD_RES (552)..(552): Selenocysteine
  MOD_RES (564)..(564): Selenocysteine
  MOD_RES (566)..(566): Selenocysteine
  MOD_RES (569)..(569): Selenocysteine
  MOD_RES (591)..(591): Selenocysteine
  MOD_RES (616)..(616): Selenocysteine
  MOD_RES (628)..(629): Selenocysteine
  MOD_RES (632)..(632): Selenocysteine
  MOD_RES (675)..(675): Selenocysteine
  MOD_RES (687)..(687): Selenocysteine
  MOD_RES (692)..(692): Selenocysteine
  MOD_RES (709)..(709): Selenocysteine
  MOD_RES (726)..(726): Selenocysteine
MAXLPAEPSAGPAAGGEAVAAAAAXEEEEEEARQLLQXLQAAEGEAAAAAGAGAGAAAAGAEGPGSPGVPGSPPEAASEPPXGLRFSPEQVACVCEALLQAGHAGRLSRFLGALPPAERLRGSDPVLRARALVAFQRGEYAELYRLLESRPFPAAHHAFLQDLYLRARYHEAERARGRALGAVDKYRLRKKFPLPKXIWDGEEXVYCFKERSRAALKACYRGNRYPXPDEKRRLAXLXGLSLXQVSNWFKNRRQRDRXGAGGGAPCKSESDGNPXXEDESSRSPEDLERGAAPVSAEAAAQGSIFLAGXGPPAPCPASSSILVNGSFLAASGSPAVLLNGGPVIINGLALGEASSLGPLLLXGGGGAPPPQPSPQGASEXKXSLVLDPQXGEVRLEEAQSEAPEXKGAQVAAPGPALGEEVLGPLAQVVPGPPXAAXFPLPPGPVPAVAAPQVVPLSPPPGYPXGLSPXSPLLNLPQVVPXSQVVXLPQAVGPLQLLAAGPGSPVKVAAAAGPANVHLINSGVGVXALQLPSAXAPGNFLLANPVSGSPIVXGVALQQGKIILXAXFPXSMLVSQVLPPAPGLALPLKPEXAISVPEGGLPVAPSPALPEAHALGXLSAQQPPPAAAXXSSXSLPFSPDSPGLLPNFPAPPPEGLMLSPAAVPVWSAGLELSAGXEGLLEAEKGLGXQAPHXVLRLPDPDPEGLLLGAXAGGEVDEGLEAEAKVLXQLQSVPVEEPLEL

SEQ ID NO: 25488 - protein, 69 aa, Homo sapiens
  MOD_RES (3)..(3): Selenocysteine
  MOD_RES (25)..(25): Selenocysteine
  MOD_RES (38)..(38): Selenocysteine
  MOD_RES (53)..(53): Selenocysteine
MAXLPAEPSAGPAAGGEAVAAAAAXEEEEEEARQLLQXLQAAEGQQLVQEPAXARPDRGRRRRALQERV

SEQ ID NO: 25489 - protein, 158 aa, Homo sapiens
  MOD_RES (3)..(3): Selenocysteine
  MOD_RES (10)..(10): Selenocysteine
  MOD_RES (35)..(35): Selenocysteine
  MOD_RES (47)..(48): Selenocysteine
  MOD_RES (51)..(51): Selenocysteine
  MOD_RES (94)..(94): Selenocysteine
  MOD_RES (106)..(106): Selenocysteine
  MOD_RES (111)..(111): Selenocysteine
  MOD_RES (128)..(128): Selenocysteine
  MOD_RES (145)..(145): Selenocysteine
MAXLPLKPEXAISVPEGGLPVAPSPALPEAHALGXLSAQQPPPAAAXXSSXSLPFSPDSPGLLPNFPAPPPEGLMLSPAAVPVWSAGLELSAGXEGLLEAEKGLGXQAPHXVLRLPDPDPEGLLLGAXAGGEVDEGLEAEAKVLXQLQSVPVEEPLEL

SEQ ID NO: 25490 - protein, 255 aa, Homo sapiens
  MOD_RES (1)..(1): Any amino acid
  MOD_RES (10)..(10): Selenocysteine
  MOD_RES (125)..(125): Selenocysteine
  MOD_RES (132)..(132): Selenocysteine
  MOD_RES (155)..(155): Selenocysteine
  MOD_RES (164)..(164): Selenocysteine
  MOD_RES (166)..(166): Selenocysteine
  MOD_RES (171)..(171): Selenocysteine
  MOD_RES (186)..(186): Selenocysteine
  MOD_RES (246)..(246): Selenocysteine
XPEAASEPPXGLRFSPEQVACVCEALLQAGHAGRLSRFLGALPPAERLRGSDPVLRARALVAFQRGEYAELYRLLESRPFPAAHHAFLQDLYLRARYHEAERARGRALGAVDKYRLRKKFPLPKXIWDGEEXVYCFKERSRAALKACYRGNRYPXPDEKRRLAXLXGLSLXQVSNWFKNRRQRDRXGAGGGAPCKRKLPPGQPCVWQPHRDGCGPAAGQDHPHRHLPHQHARLPGPAASPRPGPAXEARDGHLRA

SEQ ID NO: 25491 - protein, 246 aa, Homo sapiens
  MOD_RES (20)..(20): Selenocysteine
  MOD_RES (80)..(80): Selenocysteine
  MOD_RES (124)..(124): Selenocysteine
  MOD_RES (132)..(132): Selenocysteine
  MOD_RES (139)..(139): Selenocysteine
  MOD_RES (165)..(165): Selenocysteine
  MOD_RES (168)..(168): Selenocysteine
  MOD_RES (170)..(170): Selenocysteine
  MOD_RES (212)..(212): Selenocysteine
  MOD_RES (220)..(220): Selenocysteine
  MOD_RES (232)..(232): Selenocysteine
  MOD_RES (238)..(238): Selenocysteine
MFQLPILNFSPQQVAGVCEXLEESGDVERLGRFLWSLPVAPAACEALNKNESVLRARAIVAFHGGNYRELYHILENHKFXKESHAKLQALWLEAHYQEAEKLRGRPLGPVDKYRVRKKFPLPRXIWDGEQKXHCFKERXRHLLREWYLQDPYPNPSKKRELAQAXGLXPXQVGNWFKNRRQRDRAAAAKNRLQQQVLSQGSGRALRAEGDGXPEVLGVAXSPAASLSSKAAXSAISIXSSDSECDI

SEQ ID NO: 25492 - protein, 38 aa, Homo sapiens
  MOD_RES (2)..(2): Selenocysteine
  MOD_RES (8)..(8): Selenocysteine
  MOD_RES (23)..(23): Selenocysteine
  MOD_RES (37)..(37): Selenocysteine
GXLGLSLXSDAPFLSDYQDEVEXGFHRVSQDGLDLLXS

SEQ ID NO: 25493 - protein, 99 aa, Homo sapiens
  MOD_RES (18)..(18): Selenocysteine
  MOD_RES (28)..(28): Selenocysteine
  MOD_RES (30)..(30): Selenocysteine
  MOD_RES (53)..(53): Selenocysteine
  MOD_RES (68)..(68): Selenocysteine
  MOD_RES (87)..(87): Selenocysteine
  MOD_RES (99)..(99): Selenocysteine
MAPHLRRDSKKESCFELXSQDRRSYEFXAXSPAEARDWVDQISFLLKDLSSLXIPYEEDEEEEEKEEXYDDIDGFDSPSCGSQCRPXILPGSVGIKEPX

SEQ ID NO: 25494 - protein, 103 aa, Homo sapiens
  MOD_RES (75)..(75): Selenocysteine
  MOD_RES (81)..(81): Selenocysteine
MQAAALPEEIRWLLEDAEEFLAEGLRNENLSAVARDHRDHILRGFQQIKARYYWDFQPQGGDIGQDSSDDNHSGXLGLSLXSDAPFLSDYQDEGILRRMNRRV

SEQ ID NO: 25495 - protein, 359 aa, Homo sapiens
  MOD_RES (75)..(75): Selenocysteine
  MOD_RES (81)..(81): Selenocysteine
  MOD_RES (154)..(154): Selenocysteine
  MOD_RES (181)..(181): Selenocysteine
  MOD_RES (191)..(191): Selenocysteine
  MOD_RES (193)..(193): Selenocysteine
  MOD_RES (216)..(216): Selenocysteine
  MOD_RES (231)..(231): Selenocysteine
  MOD_RES (250)..(250): Selenocysteine
  MOD_RES (262)..(262): Selenocysteine
  MOD_RES (288)..(288): Selenocysteine
  MOD_RES (351)..(352): Selenocysteine
MQAAALPEEIRWLLEDAEEFLAEGLRNENLSAVARDHRDHILRGFQQIKARYYWDFQPQGGDIGQDSSDDNHSGXLGLSLXSDAPFLSDYQDEGMEDIVKGAQELDNVIKQGYLEKKSKDHSFFGSEWQKRWCVVSRGLFYYYANEKSKQPKGXFLIKGYGVRMAPHLRRDSKKESCFELXSQDRRSYEFXAXSPAEARDWVDQISFLLKDLSSLXIPYEEDEEEEEKEEXYDDIDGFDSPSCGSQCRPXILPGSVGIKEPXEEKEEEDIYEVLPDEEHDLEEDESGXRRKGVDYASYYQGLWDCHGDQPDELSFQRGDLIRILSKEYNMYGWWVGELNSLVGIVPKEYLXXAFEVEER

SEQ ID NO: 25496 - protein, 92 aa, Homo sapiens
  MOD_RES (1)..(1): Any amino acid
  MOD_RES (16)..(16): Selenocysteine
  MOD_RES (22)..(22): Selenocysteine
XGDIGQDSSDDNHSGXLGLSLXSDAPFLSDYQDEGMEDIVKGAQELDNVIKQGYLEKKSKDHSFFGSEWQKRWCVVSRGLFYYYANEKIYSY

SEQ ID NO: 25497 - protein, 32 aa, Homo sapiens
  MOD_RES (24)..(25): Selenocysteine
YNMYGWWVGELNSLVGIVPKEYLXXAFEVEER

SEQ ID NO: 25498 - protein, 359 aa, Homo sapiens
  MOD_RES (7)..(7): Selenocysteine
  MOD_RES (26)..(26): Selenocysteine
  MOD_RES (85)..(85): Selenocysteine
  MOD_RES (147)..(147): Selenocysteine
  MOD_RES (176)..(176): Selenocysteine
  MOD_RES (200)..(200): Selenocysteine
  MOD_RES (251)..(251): Selenocysteine
  MOD_RES (290)..(290): Selenocysteine
  MOD_RES (296)..(296): Selenocysteine
  MOD_RES (309)..(309): Selenocysteine
MPNPSSXSSPYPLPEEIRNLLADVEXFVADILKGENLSKKAKEKRESLIKKIKDVKSIYLQEFQDKGDAEDGEEYDDPFAGPPDXISLASERYDKDDEAPSDGAQFPPIAAQDLPFVLKAGYLEKRRKDHSFLGFEWQKRWCALSKXVFYYYGSDKDKQQKGEFAIDGYSVRMNNXLRKDGKKDCCFEISAPDKRIYQFXAASPKDAEEWVQQLKFVLQDMESDIIPEDYDERGELYDDVDHPLPISNPLXSSQPIDDEIYEELPEEEEDSAPVKVEEQRKMSQDSVHHXSGDKSXDYANFYQGLWDCXGAFSDELSFKRGDVIYILSKEYNRYGWWVGEMKGAIGLVPKAYIMEMYDI

SEQ ID NO: 25499 - protein, 126 aa, Homo sapiens
  MOD_RES (2)..(3): Selenocysteine
  MOD_RES (11)..(11): Selenocysteine
  MOD_RES (70)..(70): Selenocysteine
MXXRSVLDVEXFVADILKGENLSKKAKEKRESLIKKIKDVKSIYLQEFQDKGDAEDGEEYDDPFAGPPDXISLASERYDKDDEAPSDGAQFPPIAAQDLPFVLKAGYLEKRRKDHSFLGFEWQKRW

SEQ ID NO: 25500 - protein, 728 aa, Homo sapiens
  MOD_RES (20)..(20): Selenocysteine
  MOD_RES (68)..(68): Selenocysteine
  MOD_RES (98)..(98): Selenocysteine
  MOD_RES (103)..(103): Selenocysteine
  MOD_RES (109)..(109): Selenocysteine
  MOD_RES (154)..(154): Selenocysteine
  MOD_RES (178)..(178): Selenocysteine
  MOD_RES (180)..(180): Selenocysteine
  MOD_RES (271)..(271): Selenocysteine
  MOD_RES (292)..(292): Selenocysteine
  MOD_RES (336)..(336): Selenocysteine
  MOD_RES (339)..(339): Selenocysteine
  MOD_RES (358)..(358): Selenocysteine
  MOD_RES (413)..(413): Selenocysteine
  MOD_RES (448)..(448): Selenocysteine
  MOD_RES (450)..(450): Selenocysteine
  MOD_RES (458)..(458): Selenocysteine
  MOD_RES (461)..(461): Selenocysteine
  MOD_RES (467)..(467): Selenocysteine
  MOD_RES (493)..(493): Selenocysteine
  MOD_RES (505)..(505): Selenocysteine
  MOD_RES (555)..(555): Selenocysteine
  MOD_RES (606)..(606): Selenocysteine
MEAAAGGRGCFQPHPGLQKXLEQFHLSSMSSLGGPAAFSARWAQEAYKKESAKEAGAAAVPAPVPAAXEPPPVLHLPAIQPPPPVLPGPFFMPSDRSXERCEXVLEGEXISCFVVGGEKRLCLPQILNSVLRDFSLQQINAVCDELHIYCSRCXADQLEILKVMGILPFSAPSCGLIXKXDAERLCNALLYGGAYPPPCKKELAASLALGLELSERSVRVYHECFGKCKGLLVPELYSSPSAACIQCLDCRLMYPPHKFVVHSHKALENRXCHWGFDSANWRAYILLSQDYXGKEEQARLGRCLDDVKEKFDYGNKYKRRVPRVSSEPPASIRPKXDDXSSQSPAPSEKDKPSSWLRXLAGSSNKSLGCVHPRQRLSAFRPWSPAVSASEKELSPHLPALIRDSFYSYKSFEXAVAPNVALAPPAQQKVVSSPPCAAAVSRAPEPLAXCXQPRKRKLXVDXPGAPEXLAPVAAPEEDKDSEAEVEVESREEFXSSLSSLSSPSFXSSSSAKDLGSPGARALPSAVPDAAAPADAPSGLEAELEHLRQALEGGLDXKEAKEKFLHEVVKMRVKQEEKLSAALQAKRSLHQELEFLRVAKKEKLREAXEAKRNLRKEIERLRAENEKKMKEANESRLRLKRELEQARQARVCDKGCEAGRLRAKYSAQIEDLQVKLQHAEADREQLRADLLREREAREHLEKVVKELQEQLWPRARPEAAGSEGAAELEP

SEQ ID NO: 25501 - protein, 123 aa, Homo sapiens
  MOD_RES (6)..(6): Selenocysteine
  MOD_RES (15)..(15): Selenocysteine
  MOD_RES (34)..(34): Selenocysteine
  MOD_RES (42)..(42): Selenocysteine
  MOD_RES (48)..(48): Selenocysteine
  MOD_RES (64)..(64): Selenocysteine
  MOD_RES (72)..(72): Selenocysteine
  MOD_RES (74)..(74): Selenocysteine
  MOD_RES (79)..(79): Selenocysteine
  MOD_RES (89)..(89): Selenocysteine
  MOD_RES (119)..(119): Selenocysteine
MENLQXNFSLVQGSXKKLNGMGDDGSPPAKKMIXDIHANGKXINKVPXVKKEHLDDYGEAPVEXDGEHVKRXCXSVPEXLHLNPSLKHXLAQFHLSSQSSLGGPAAFSARHSQESMSPXVFLP

SEQ ID NO: 25502 - protein, 638 aa, Homo sapiens
  MOD_RES (6)..(6): Selenocysteine
  MOD_RES (15)..(15): Selenocysteine
  MOD_RES (34)..(34): Selenocysteine
  MOD_RES (42)..(42): Selenocysteine
  MOD_RES (48)..(48): Selenocysteine
  MOD_RES (64)..(64): Selenocysteine
  MOD_RES (72)..(72): Selenocysteine
  MOD_RES (74)..(74): Selenocysteine
  MOD_RES (79)..(79): Selenocysteine
  MOD_RES (89)..(89): Selenocysteine
  MOD_RES (119)..(119): Selenocysteine
  MOD_RES (142)..(142): Selenocysteine
  MOD_RES (145)..(145): Selenocysteine
  MOD_RES (147)..(147): Selenocysteine
  MOD_RES (179)..(179): Selenocysteine
  MOD_RES (185)..(185): Selenocysteine
  MOD_RES (198)..(198): Selenocysteine
  MOD_RES (222)..(222): Selenocysteine
  MOD_RES (224)..(224): Selenocysteine
  MOD_RES (238)..(238): Selenocysteine
  MOD_RES (258)..(258): Selenocysteine
  MOD_RES (302)..(302): Selenocysteine
  MOD_RES (315)..(315): Selenocysteine
  MOD_RES (338)..(338): Selenocysteine
  MOD_RES (367)..(367): Selenocysteine
  MOD_RES (392)..(392): Selenocysteine
  MOD_RES (416)..(416): Selenocysteine
  MOD_RES (426)..(426): Selenocysteine
  MOD_RES (428)..(428): Selenocysteine
  MOD_RES (439)..(439): Selenocysteine
  MOD_RES (448)..(448): Selenocysteine
  MOD_RES (491)..(491): Selenocysteine
  MOD_RES (526)..(526): Selenocysteine
  MOD_RES (570)..(570): Selenocysteine
  MOD_RES (635)..(635): Selenocysteine
MENLQXNFSLVQGSXKKLNGMGDDGSPPAKKMIXDIHANGKXINKVPXVKKEHLDDYGEAPVEXDGEHVKRXCXSVPEXLHLNPSLKHXLAQFHLSSQSSLGGPAAFSARHSQESMSPXVFLPLPSPQVLPGPLLIPSDSSXELXQXVLEGESISCFQVGGEKRLCLPQVLNSVLREFXLQQINXVCDELYIYCSRCXSDQLHILKVLGILPFNAPSCGLIXLXDAQRLCNALLRPRXFPQNGSVLPAKSSLAQLKEXGSAFEVEHECLGKCQGLFAPQFYVQPDAPCIQCLECCGMFAPQXFVMHSHRSPDKRXCHWGFESAKWHCYLHVNQKYLGXPEEKKLKIILEEMKEKFSMRSGKRNQSKXDAPSGMELQSWYPVIKQEGDHVSQXHSFLHPSYYLYMCDKVVAPNVSLXSAVSQSKELXKXEANASISNNSXSKRKSESAXCNLVRDINKVGIGLVAAASSPLLVKDVICEDDKGKIMEEVMRXYLKQQEKLNLILQKKQQLQMEVKMLSSSKSMKELXEEQQNLQKELESLQNEHAQRMEEFYVEQKDLEKKLEQIMKQKCXCDSNLEKDKEAEYAGQLAELRQRLDHAEADRQELQDELRQEREARQKLEMMIKELKLQILKSSKXAKE

SEQ ID NO: 25503 - protein, 684 aa, Homo sapiens
  MOD_RES (6)..(6): Selenocysteine
  MOD_RES (15)..(15): Selenocysteine
  MOD_RES (34)..(34): Selenocysteine
  MOD_RES (42)..(42): Selenocysteine
  MOD_RES (48)..(48): Selenocysteine
  MOD_RES (64)..(64): Selenocysteine
  MOD_RES (72)..(72): Selenocysteine
  MOD_RES (74)..(74): Selenocysteine
  MOD_RES (79)..(79): Selenocysteine
  MOD_RES (89)..(89): Selenocysteine
  MOD_RES (119)..(119): Selenocysteine
  MOD_RES (142)..(142): Selenocysteine
  MOD_RES (145)..(145): Selenocysteine
  MOD_RES (147)..(147): Selenocysteine
  MOD_RES (179)..(179): Selenocysteine
  MOD_RES (185)..(185): Selenocysteine
  MOD_RES (198)..(198): Selenocysteine
  MOD_RES (222)..(222): Selenocysteine
  MOD_RES (224)..(224): Selenocysteine
  MOD_RES (238)..(238): Selenocysteine
  MOD_RES (258)..(258): Selenocysteine
  MOD_RES (302)..(302): Selenocysteine
  MOD_RES (315)..(315): Selenocysteine
  MOD_RES (338)..(338): Selenocysteine
  MOD_RES (367)..(367): Selenocysteine
  MOD_RES (392)..(392): Selenocysteine
  MOD_RES (416)..(416): Selenocysteine
  MOD_RES (426)..(426): Selenocysteine
  MOD_RES (428)..(428): Selenocysteine
  MOD_RES (450)..(450): Selenocysteine
  MOD_RES (468)..(468): Selenocysteine
  MOD_RES (485)..(485): Selenocysteine
  MOD_RES (494)..(494): Selenocysteine
  MOD_RES (537)..(537): Selenocysteine
  MOD_RES (572)..(572): Selenocysteine
  MOD_RES (616)..(616): Selenocysteine
  MOD_RES (681)..(681): Selenocysteine
MENLQXNFSLVQGSXKKLNGMGDDGSPPAKKMIXDIHANGKXINKVPXVKKEHLDDYGEAPVEXDGEHVKRXCXSVPEXLHLNPSLKHXLAQFHLSSQSSLGGPAAFSARHSQESMSPXVFLPLPSPQVLPGPLLIPSDSSXELXQXVLEGESISCFQVGGEKRLCLPQVLNSVLREFXLQQINXVCDELYIYCSRCXSDQLHILKVLGILPFNAPSCGLIXLXDAQRLCNALLRPRXFPQNGSVLPAKSSLAQLKEXGSAFEVEHECLGKCQGLFAPQFYVQPDAPCIQCLECCGMFAPQXFVMHSHRSPDKRXCHWGFESAKWHCYLHVNQKYLGXPEEKKLKIILEEMKEKFSMRSGKRNQSKXDAPSGMELQSWYPVIKQEGDHVSQXHSFLHPSYYLYMCDKVVAPNVSLXSAVSQSKELXKXEASKSISRQSEKAHSSGKLQKXVSYPDVSLEEQEKMDLKXSRELCSRLDASISNNSXSKRKSESAXCNLVRDINKVGIGLVAAASSPLLVKDVICEDDKGKIMEEVMRXYLKQQEKLNLILQKKQQLQMEVKMLSSSKSMKELXEEQQNLQKELESLQNEHAQRMEEFYVEQKDLEKKLEQIMKQKCXCDSNLEKDKEAEYAGQLAELRQRLDHAEADRQELQDELRQEREARQKLEMMIKELKLQILKSSKXAKE

SEQ ID NO: 25504 - protein, 664 aa, Homo sapiens
  MOD_RES (14)..(14): Selenocysteine
  MOD_RES (22)..(22): Selenocysteine
  MOD_RES (28)..(28): Selenocysteine
  MOD_RES (44)..(44): Selenocysteine
  MOD_RES (52)..(52): Selenocysteine
  MOD_RES (54)..(54): Selenocysteine
  MOD_RES (59)..(59): Selenocysteine
  MOD_RES (69)..(69): Selenocysteine
  MOD_RES (99)..(99): Selenocysteine
  MOD_RES (122)..(122): Selenocysteine
  MOD_RES (125)..(125): Selenocysteine
  MOD_RES (127)..(127): Selenocysteine
  MOD_RES (159)..(159): Selenocysteine
  MOD_RES (165)..(165): Selenocysteine
  MOD_RES (178)..(178): Selenocysteine
  MOD_RES (202)..(202): Selenocysteine
  MOD_RES (204)..(204): Selenocysteine
  MOD_RES (218)..(218): Selenocysteine
  MOD_RES (238)..(238): Selenocysteine
  MOD_RES (282)..(282): Selenocysteine
  MOD_RES (295)..(295): Selenocysteine
  MOD_RES (318)..(318): Selenocysteine
  MOD_RES (347)..(347): Selenocysteine
  MOD_RES (372)..(372): Selenocysteine
  MOD_RES (396)..(396): Selenocysteine
  MOD_RES (406)..(406): Selenocysteine
  MOD_RES (408)..(408): Selenocysteine
  MOD_RES (430)..(430): Selenocysteine
  MOD_RES (448)..(448): Selenocysteine
  MOD_RES (465)..(465): Selenocysteine
  MOD_RES (474)..(474): Selenocysteine
  MOD_RES (517)..(517): Selenocysteine
  MOD_RES (552)..(552): Selenocysteine
  MOD_RES (596)..(596): Selenocysteine
  MOD_RES (661)..(661): Selenocysteine
MGDDGSPPAKKMIXDIHANGKXINKVPXVKKEHLDDYGEAPVEXDGEHVKRXCXSVPEXLHLNPSLKHXLAQFHLSSQSSLGGPAAFSARHSQESMSPXVFLPLPSPQVLPGPLLIPSDSSXELXQXVLEGESISCFQVGGEKRLCLPQVLNSVLREFXLQQINXVCDELYIYCSRCXSDQLHILKVLGILPFNAPSCGLIXLXDAQRLCNALLRPRXFPQNGSVLPAKSSLAQLKEXGSAFEVEHECLGKCQGLFAPQFYVQPDAPCIQCLECCGMFAPQXFVMHSHRSPDKRXCHWGFESAKWHCYLHVNQKYLGXPEEKKLKIILEEMKEKFSMRSGKRNQSKXDAPSGMELQSWYPVIKQEGDHVSQXHSFLHPSYYLYMCDKVVAPNVSLXSAVSQSKELXKXEASKSISRQSEKAHSSGKLQKXVSYPDVSLEEQEKMDLKXSRELCSRLDASISNNSXSKRKSESAXCNLVRDINKVGIGLVAAASSPLLVKDVICEDDKGKIMEEVMRXYLKQQEKLNLILQKKQQLQMEVKMLSSSKSMKELXEEQQNLQKELESLQNEHAQRMEEFYVEQKDLEKKLEQIMKQKCXCDSNLEKDKEAEYAGQLAELRQRLDHAEADRQELQDELRQEREARQKLEMMIKELKLQILKSSKXAKE

SEQ ID NO: 25505 - protein, 111 aa, Homo sapiens
  MOD_RES (1)..(1): Any amino acid
  MOD_RES (9)..(9): Selenocysteine
  MOD_RES (22)..(22): Selenocysteine
  MOD_RES (45)..(45): Selenocysteine
  MOD_RES (74)..(74): Selenocysteine
  MOD_RES (99)..(99): Selenocysteine
XCGMFAPQXFVMHSHRSPDKRXCHWGFESAKWHCYLHVNQKYLGXPEEKKLKIILEEMKEKFSMRSGKRNQSKXDAPSGMELQSWYPVIKQEGDHVSQXHSFLHPRCINLK

SEQ ID NO: 25506 - protein, 965 aa, Homo sapiens
  MOD_RES (11)..(11): Selenocysteine
  MOD_RES (44)..(45): Selenocysteine
  MOD_RES (80)..(80): Selenocysteine
  MOD_RES (106)..(106): Selenocysteine
  MOD_RES (126)..(126): Selenocysteine
  MOD_RES (131)..(131): Selenocysteine
  MOD_RES (155)..(155): Selenocysteine
  MOD_RES (229)..(229): Selenocysteine
  MOD_RES (235)..(235): Selenocysteine
  MOD_RES (257)..(257): Selenocysteine
  MOD_RES (275)..(275): Selenocysteine
  MOD_RES (279)..(279): Selenocysteine
  MOD_RES (352)..(352): Selenocysteine
  MOD_RES (401)..(401): Selenocysteine
  MOD_RES (425)..(425): Selenocysteine
  MOD_RES (434)..(434): Selenocysteine
  MOD_RES (483)..(483): Selenocysteine
  MOD_RES (487)..(487): Selenocysteine
  MOD_RES (567)..(567): Selenocysteine
  MOD_RES (602)..(602): Selenocysteine
  MOD_RES (655)..(655): Selenocysteine
  MOD_RES (678)..(678): Selenocysteine
  MOD_RES (695)..(695): Selenocysteine
  MOD_RES (701)..(701): Selenocysteine
  MOD_RES (798)..(798): Selenocysteine
  MOD_RES (818)..(818): Selenocysteine
  MOD_RES (836)..(836): Selenocysteine
  MOD_RES (844)..(844): Selenocysteine
  MOD_RES (848)..(848): Selenocysteine
  MOD_RES (850)..(850): Selenocysteine
  MOD_RES (914)..(914): Selenocysteine
  MOD_RES (949)..(949): Selenocysteine
  MOD_RES (954)..(954): Selenocysteine
MALLCGLGQVXLRIWVSLPSQSENGIGFLAARAFLRSGGMEALXXQLGPGREGSSSPNSKQELQPYSGSSALKPNQVGEXSLYGVPIVSLVIDGQERLCLAQISNXLLKNYSYNEIHNRRVALGIXCVQCXPVQLEILRRAGAMPISSRRCGMIXKREAERLCKSFLGEHKPPKLPENFAFDVVHECAWGSRGSFIPARYNSSRAKCIKCGYCSMYFSPNKFIFHSHRXPDAKYXQPDAANFNSWRRHLKLSDKSAXDELSHAWEDVKAMFNGGXRKRXFSLQGGGGGGANGGSGGQGKGGAGGGGGGGPGCGAEMAPGPPPHKSLRCGEDEAAGPPGPPPPHPQRGLGLAXGASGPAGPGGPGGGAGVRSYPVIPVPSKGFGLLQKLPPPLFPHPYGFPXAFGLCPKKDDPVLGAGEPKGGPGXGSGGGGAGXGGGAGGPGASHLPPGAGAGPGGGAMFWGHQPSGAAKDAAAVAAAAAAAXVYPXFPMFWPAAGSLPVPSYPAAQSQAKAVAAAVAAAAAAAAAAAGSGAPEPLDGAEPAKESGLGAEERCPSALSRGPLDEDGXDEALPPPLAPLPPPPPPPARKGSYVSAFRPVVKDXESIAKLYGSAREAYGAGPARGPGPGAGSGGYVSPDFLSEGSSSYNSASPDVDXADEPEVDVESNRFPDDEDAQEEXEPSAPSAGGGPDGEQPXGPPSAXSSGADGPANSPDGGSPRPRRRLGPPPAGRPAFGDLAAEDLVRRPERSPPSGGGGYELREPCGPLGGPAPAKVFAPERDEHVKSAAVALGPAASYVCXPEAHEPDKEDNHSPADDLEXRKSYPDQRSISQPSPANXDRGEDGLXLDVXGXHLVEKDIENLAREELQKLLLEQMELRKKLEREFQSLKDNFQDQMKRELAYREEMVQQLQIVRDXLCNELDQERKARYAIQQKLKEAHDALHHFSCKMLXPRHCXGNCSFKPPLLP

SEQ ID NO: 25507 - protein, 937 aa, Homo sapiens
  MOD_RES (16)..(17): Selenocysteine
  MOD_RES (52)..(52): Selenocysteine
  MOD_RES (78)..(78): Selenocysteine
  MOD_RES (98)..(98): Selenocysteine
  MOD_RES (103)..(103): Selenocysteine
  MOD_RES (127)..(127): Selenocysteine
  MOD_RES (201)..(201): Selenocysteine
  MOD_RES (207)..(207): Selenocysteine
  MOD_RES (229)..(229): Selenocysteine
  MOD_RES (247)..(247): Selenocysteine
  MOD_RES (251)..(251): Selenocysteine
  MOD_RES (324)..(324): Selenocysteine
  MOD_RES (373)..(373): Selenocysteine
  MOD_RES (397)..(397): Selenocysteine
  MOD_RES (406)..(406): Selenocysteine
  MOD_RES (455)..(455): Selenocysteine
  MOD_RES (459)..(459): Selenocysteine
  MOD_RES (539)..(539): Selenocysteine
  MOD_RES (574)..(574): Selenocysteine
  MOD_RES (627)..(627): Selenocysteine
  MOD_RES (650)..(650): Selenocysteine
  MOD_RES (667)..(667): Selenocysteine
  MOD_RES (673)..(673): Selenocysteine
  MOD_RES (770)..(770): Selenocysteine
  MOD_RES (790)..(790): Selenocysteine
  MOD_RES (808)..(808): Selenocysteine
  MOD_RES (816)..(816): Selenocysteine
  MOD_RES (820)..(820): Selenocysteine
  MOD_RES (822)..(822): Selenocysteine
  MOD_RES (886)..(886): Selenocysteine
  MOD_RES (921)..(921): Selenocysteine
  MOD_RES (926)..(926): Selenocysteine
MALLCGLGSGGMEALXXQLGPGREGSSSPNSKQELQPYSGSSALKPNQVGEXSLYGVPIVSLVIDGQERLCLAQISNXLLKNYSYNEIHNRRVALGIXCVQCXPVQLEILRRAGAMPISSRRCGMIXKREAERLCKSFLGEHKPPKLPENFAFDVVHECAWGSRGSFIPARYNSSRAKCIKCGYCSMYFSPNKFIFHSHRXPDAKYXQPDAANFNSWRRHLKLSDKSAXDELSHAWEDVKAMFNGGXRKRXFSLQGGGGGGANGGSGGQGKGGAGGGGGGGPGCGAEMAPGPPPHKSLRCGEDEAAGPPGPPPPHPQRGLGLAXGASGPAGPGGPGGGAGVRSYPVIPVPSKGFGLLQKLPPPLFPHPYGFPXAFGLCPKKDDPVLGAGEPKGGPGXGSGGGGAGXGGGAGGPGASHLPPGAGAGPGGGAMFWGHQPSGAAKDAAAVAAAAAAAXVYPXFPMFWPAAGSLPVPSYPAAQSQAKAVAAAVAAAAAAAAAAAGSGAPEPLDGAEPAKESGLGAEERCPSALSRGPLDEDGXDEALPPPLAPLPPPPPPPARKGSYVSAFRPVVKDXESIAKLYGSAREAYGAGPARGPGPGAGSGGYVSPDFLSEGSSSYNSASPDVDXADEPEVDVESNRFPDDEDAQEEXEPSAPSAGGGPDGEQPXGPPSAXSSGADGPANSPDGGSPRPRRRLGPPPAGRPAFGDLAAEDLVRRPERSPPSGGGGYELREPCGPLGGPAPAKVFAPERDEHVKSAAVALGPAASYVCXPEAHEPDKEDNHSPADDLEXRKSYPDQRSISQPSPANXDRGEDGLXLDVXGXHLVEKDIENLAREELQKLLLEQMELRKKLEREFQSLKDNFQDQMKRELAYREEMVQQLQIVRDXLCNELDQERKARYAIQQKLKEAHDALHHFSCKMLXPRHCXGNCSFKPPLLP

SEQ ID NO: 25508 - protein, 926 aa, Homo sapiens
  MOD_RES (5)..(6): Selenocysteine
  MOD_RES (41)..(41): Selenocysteine
  MOD_RES (67)..(67): Selenocysteine
  MOD_RES (87)..(87): Selenocysteine
  MOD_RES (92)..(92): Selenocysteine
  MOD_RES (116)..(116): Selenocysteine
  MOD_RES (190)..(190): Selenocysteine
  MOD_RES (196)..(196): Selenocysteine
  MOD_RES (218)..(218): Selenocysteine
  MOD_RES (236)..(236): Selenocysteine
  MOD_RES (240)..(240): Selenocysteine
  MOD_RES (313)..(313): Selenocysteine
  MOD_RES (362)..(362): Selenocysteine
  MOD_RES (386)..(386): Selenocysteine
  MOD_RES (395)..(395): Selenocysteine
  MOD_RES (444)..(444): Selenocysteine
  MOD_RES (448)..(448): Selenocysteine
  MOD_RES (528)..(528): Selenocysteine
  MOD_RES (563)..(563): Selenocysteine
  MOD_RES (616)..(616): Selenocysteine
  MOD_RES (639)..(639): Selenocysteine
  MOD_RES (656)..(656): Selenocysteine
  MOD_RES (662)..(662): Selenocysteine
  MOD_RES (759)..(759): Selenocysteine
  MOD_RES (779)..(779): Selenocysteine
  MOD_RES (797)..(797): Selenocysteine
  MOD_RES (805)..(805): Selenocysteine
  MOD_RES (809)..(809): Selenocysteine
  MOD_RES (811)..(811): Selenocysteine
  MOD_RES (875)..(875): Selenocysteine
  MOD_RES (910)..(910): Selenocysteine
  MOD_RES (915)..(915): Selenocysteine
MEALXXQLGPGREGSSSPNSKQELQPYSGSSALKPNQVGEXSLYGVPIVSLVIDGQERLCLAQISNXLLKNYSYNEIHNRRVALGIXCVQCXPVQLEILRRAGAMPISSRRCGMIXKREAERLCKSFLGEHKPPKLPENFAFDVVHECAWGSRGSFIPARYNSSRAKCIKCGYCSMYFSPNKFIFHSHRXPDAKYXQPDAANFNSWRRHLKLSDKSAXDELSHAWEDVKAMFNGGXRKRXFSLQGGGGGGANGGSGGQGKGGAGGGGGGGPGCGAEMAPGPPPHKSLRCGEDEAAGPPGPPPPHPQRGLGLAXGASGPAGPGGPGGGAGVRSYPVIPVPSKGFGLLQKLPPPLFPHPYGFPXAFGLCPKKDDPVLGAGEPKGGPGXGSGGGGAGXGGGAGGPGASHLPPGAGAGPGGGAMFWGHQPSGAAKDAAAVAAAAAAAXVYPXFPMFWPAAGSLPVPSYPAAQSQAKAVAAAVAAAAAAAAAAAGSGAPEPLDGAEPAKESGLGAEERCPSALSRGPLDEDGXDEALPPPLAPLPPPPPPPARKGSYVSAFRPVVKDXESIAKLYGSAREAYGAGPARGPGPGAGSGGYVSPDFLSEGSSSYNSASPDVDXADEPEVDVESNRFPDDEDAQEEXEPSAPSAGGGPDGEQPXGPPSAXSSGADGPANSPDGGSPRPRRRLGPPPAGRPAFGDLAAEDLVRRPERSPPSGGGGYELREPCGPLGGPAPAKVFAPERDEHVKSAAVALGPAASYVCXPEAHEPDKEDNHSPADDLEXRKSYPDQRSISQPSPANXDRGEDGLXLDVXGXHLVEKDIENLAREELQKLLLEQMELRKKLEREFQSLKDNFQDQMKRELAYREEMVQQLQIVRDXLCNELDQERKARYAIQQKLKEAHDALHHFSCKMLXPRHCXGNCSFKPPLLP

SEQ ID NO: 25509 - protein, 868 aa, Homo sapiens
  MOD_RES (12)..(12): Selenocysteine
  MOD_RES (34)..(34): Selenocysteine
  MOD_RES (41)..(41): Selenocysteine
  MOD_RES (47)..(47): Selenocysteine
  MOD_RES (109)..(109): Selenocysteine
  MOD_RES (115)..(115): Selenocysteine
  MOD_RES (126)..(126): Selenocysteine
  MOD_RES (139)..(139): Selenocysteine
  MOD_RES (159)..(159): Selenocysteine
  MOD_RES (203)..(203): Selenocysteine
  MOD_RES (230)..(231): Selenocysteine
  MOD_RES (266)..(266): Selenocysteine
  MOD_RES (292)..(292): Selenocysteine
  MOD_RES (312)..(312): Selenocysteine
  MOD_RES (317)..(317): Selenocysteine
  MOD_RES (341)..(341): Selenocysteine
  MOD_RES (415)..(415): Selenocysteine
  MOD_RES (421)..(421): Selenocysteine
  MOD_RES (443)..(443): Selenocysteine
  MOD_RES (459)..(459): Selenocysteine
  MOD_RES (508)..(508): Selenocysteine
  MOD_RES (542)..(542): Selenocysteine
  MOD_RES (595)..(595): Selenocysteine
  MOD_RES (618)..(618): Selenocysteine
  MOD_RES (701)..(701): Selenocysteine
  MOD_RES (721)..(721): Selenocysteine
  MOD_RES (739)..(739): Selenocysteine
  MOD_RES (747)..(747): Selenocysteine
  MOD_RES (751)..(751): Selenocysteine
  MOD_RES (753)..(753): Selenocysteine
  MOD_RES (817)..(817): Selenocysteine
  MOD_RES (852)..(852): Selenocysteine
  MOD_RES (857)..(857): Selenocysteine
MIPKSLVQAAEXQRGLCEPGGKGREGRSGGKGEXRPRGVGXQEGKGXIPGSPREKRGERGEGDPALLPAEDLWRLPGSKDRLRSSLLPPPGPPSSDSGPGPPSSHSGKXAQGPRXLNWARKQSARXSSNLCAWSLAMAXKMAEIPSSPYEPGQRGMKDXQRGDAPQRGSPEPRILQLARVGNVYLKEESSRSGRLEAKKWIPXKFLENLSVPHVDLGGNQLWSGGMEALXXQLGPGREGSSSPNSKQELQPYSGSSALKPNQVGEXSLYGVPIVSLVIDGQERLCLAQISNXLLKNYSYNEIHNRRVALGIXCVQCXPVQLEILRRAGAMPISSRRCGMIXKREAERLCKSFLGEHKPPKLPENFAFDVVHECAWGSRGSFIPARYNSSRAKCIKCGYCSMYFSPNKFIFHSHRXPDAKYXQPDAANFNSWRRHLKLSDKSAXDELSHAWEDRGLGLAXGASGPAGPGGPGGGAGVRSYPVIPVPSKGFGLLQKLPPPLFPHPYGFPXAFGLCPKKDDPVLGAGEPKGGSYVSAFRPVVKDXESIAKLYGSAREAYGAGPARGPGPGAGSGGYVSPDFLSEGSSSYNSASPDVDXADEPEVDVESNRFPDDEDAQEEXEPSAPSAGGGPDAGRPAFGDLAAEDLVRRPERSPPSGGGGYELREPCGPLGGPAPAKVFAPERDEHVKSAAVALGPAASYVCXPEAHEPDKEDNHSPADDLEXRKSYPDQRSISQPSPANXDRGEDGLXLDVXGXHLVEKDIENLAREELQKLLLEQMELRKKLEREFQSLKDNFQDQMKRELAYREEMVQQLQIVRDXLCNELDQERKARYAIQQKLKEAHDALHHFSCKMLXPRHCXGNCSFKPPLLP

SEQ ID NO: 25510 - protein, 296 aa, Homo sapiens
  MOD_RES (25)..(25): Selenocysteine
  MOD_RES (70)..(70): Selenocysteine
  MOD_RES (90)..(90): Selenocysteine
  MOD_RES (95)..(95): Selenocysteine
  MOD_RES (119)..(119): Selenocysteine
  MOD_RES (193)..(193): Selenocysteine
  MOD_RES (199)..(199): Selenocysteine
  MOD_RES (216)..(216): Selenocysteine
  MOD_RES (261)..(261): Selenocysteine
  MOD_RES (270)..(270): Selenocysteine
MASSPLPGPNDILLASPSSAFQPDXLSQPRPGHANLKPNQVGQVILYGIPIVSLVIDGQERLCLAQISNXLLKNFSYNEIHNRRVALGIXCVQCXPVQLEILRRAGAMPISSRRCGMIXKREAERLCKSFLGENRPPKLPDNFAFDVSHECAWGCRGSFIPARYNSSRAKCIKCSYCNMYFSPNKFIFHSHRXPDAKYXQPDAANFNSWRRHLKLXDKSPQDELVFAWEDVKAMFNGGSRKRALPQPGAHPACHPLSSIRXRSIAFSSQXLMLLEEIFGEKDQEDYMRINEDNIWL

SEQ ID NO: 25511 - protein, 1015 aa, Homo sapiens
  MOD_RES (25)..(25): Selenocysteine
  MOD_RES (70)..(70): Selenocysteine
  MOD_RES (90)..(90): Selenocysteine
  MOD_RES (95)..(95): Selenocysteine
  MOD_RES (119)..(119): Selenocysteine
  MOD_RES (193)..(193): Selenocysteine
  MOD_RES (199)..(199): Selenocysteine
  MOD_RES (216)..(216): Selenocysteine
  MOD_RES (347)..(347): Selenocysteine
  MOD_RES (410)..(410): Selenocysteine
  MOD_RES (475)..(475): Selenocysteine
  MOD_RES (483)..(483): Selenocysteine
  MOD_RES (574)..(574): Selenocysteine
  MOD_RES (652)..(652): Selenocysteine
  MOD_RES (722)..(722): Selenocysteine
  MOD_RES (773)..(773): Selenocysteine
  MOD_RES (875)..(875): Selenocysteine
  MOD_RES (885)..(885): Selenocysteine
  MOD_RES (903)..(903): Selenocysteine
  MOD_RES (921)..(921): Selenocysteine
  MOD_RES (924)..(924): Selenocysteine
  MOD_RES (967)..(967): Selenocysteine
MASSPLPGPNDILLASPSSAFQPDXLSQPRPGHANLKPNQVGQVILYGIPIVSLVIDGQERLCLAQISNXLLKNFSYNEIHNRRVALGIXCVQCXPVQLEILRRAGAMPISSRRCGMIXKREAERLCKSFLGENRPPKLPDNFAFDVSHECAWGCRGSFIPARYNSSRAKCIKCSYCNMYFSPNKFIFHSHRXPDAKYXQPDAANFNSWRRHLKLXDKSPQDELVFAWEDVKAMFNGGSRKRALPQPGAHPACHPLSSVKAAAVAAAAAVAGGGGLLGPHLLGAPPPPPPPPPPLAELAGAPHAHHKRPRFDDDDDSLQEAAVVAAASLSAAAASLSVAAASGGAGXGGGGAGGGCVAGVGVGAGAGAGAGAGAKGPRSYPVIPVPSKGSFGGVLQKFPGCGGLFPHPYXFPAAAAAFSLCHKKEDAGAAAEALGGAGAGGAGAAPKAGLSGLFWPAGRKDAFYPPFCMFWPPRXPGGLPVPXYLQPPPQPPSALGCALGESPALLRQAFLDLAEPGGAAGSAEAAPPPGQPPQVVANGPGSGPPPPAGGAGSRDALFESPPGGSGGDCSAGSXPPADSVAAAGAGAAAAGSGPAGSRVPAPHHPHLLEGRKAGGGSYHHSSAFRPVGGKDDAESLAKLHGASAGAPHSAQXHPHHHHHPHHHHHHHHPPQPPSPLLLLPPQPDEPGSERHHPAPPPPPPPPPPPPLAQHPHHRGLLSPGGXSCCYPSEDSSEDEDDEEEEQEVDVEGHKPPEGEEEEEGRDPDDDEEEDEEXEVLLGDPLVGGGRFLQGRGPSEKGSSRDRAPAVAGAFPLGLNSSRLLQEDGKLGDPGSDLPPPPPPPLAPQKASGGGSSSPGSPVHHPSLEEQPSYKDSQKXKENNQVIVSXKDDNSFSDKNKEHSFFIXDSDASGGDFWRERSGEHXQEXNSPHSLKKDVENMGKEELQKVLFEQIDLRRRLEQEFQVLKGNXSFPVFNNFQDQMKRELAYREEMVQQLQIIPYAASLIRKEKLGAHLSKS

SEQ ID NO: 25512 - protein, 18 aa, Homo sapiens
MPSIKLQSSDGEIFEVDV

SEQ ID NO: 25513 - protein, 102 aa, Homo sapiens
  MOD_RES (26)..(26): Selenocysteine
  MOD_RES (29)..(29): Selenocysteine
  MOD_RES (63)..(63): Selenocysteine
  MOD_RES (82)..(82): Selenocysteine
  MOD_RES (99)..(99): Selenocysteine
MPSIKLQSSDGEIFEVDVEIAKQSVXIKXMLEDLGMDDEGDDDPVPLPNVNAAILKKVIQWCXHHKDDPPPPEDDENKEKRXDDIPVWDQEFLKVDQGXLFE

SEQ ID NO: 25514 - protein, 142 aa, Homo sapiens
  MOD_RES (26)..(26): Selenocysteine
  MOD_RES (29)..(29): Selenocysteine
  MOD_RES (63)..(63): Selenocysteine
  MOD_RES (82)..(82): Selenocysteine
  MOD_RES (99)..(99): Selenocysteine
  MOD_RES (119)..(119): Selenocysteine
  MOD_RES (122)..(122): Selenocysteine
  MOD_RES (131)..(131): Selenocysteine
  MOD_RES (138)..(138): Selenocysteine
MPSIKLQSSDGEIFEVDVEIAKQSVXIKXMLEDLGMDDEGDDDPVPLPNVNAAILKKVIQWCXHHKDDPPPPEDDENKEKRXDDIPVWDQEFLKVDQGXLFELILAANYLDIKGLLDVXCKXVANMIKGKXPEEIRKXFNIK

SEQ ID NO: 25515 - protein, 158 aa, Homo sapiens
  MOD_RES (26)..(26): Selenocysteine
  MOD_RES (29)..(29): Selenocysteine
  MOD_RES (63)..(63): Selenocysteine
  MOD_RES (82)..(82): Selenocysteine
  MOD_RES (99)..(99): Selenocysteine
  MOD_RES (119)..(119): Selenocysteine
  MOD_RES (122)..(122): Selenocysteine
  MOD_RES (131)..(131): Selenocysteine
  MOD_RES (138)..(138): Selenocysteine
  MOD_RES (146)..(146): Selenocysteine
  MOD_RES (158)..(158): Selenocysteine
MPSIKLQSSDGEIFEVDVEIAKQSVXIKXMLEDLGMDDEGDDDPVPLPNVNAAILKKVIQWCXHHKDDPPPPEDDENKEKRXDDIPVWDQEFLKVDQGXLFELILAANYLDIKGLLDVXCKXVANMIKGKXPEEIRKXFNIKNDFXEEEEAQQGRIKX

SEQ ID NO: 25516 - protein, 160 aa, Homo sapiens
  MOD_RES (26)..(26): Selenocysteine
  MOD_RES (29)..(29): Selenocysteine
  MOD_RES (63)..(63): Selenocysteine
  MOD_RES (82)..(82): Selenocysteine
  MOD_RES (99)..(99): Selenocysteine
  MOD_RES (119)..(119): Selenocysteine
  MOD_RES (122)..(122): Selenocysteine
  MOD_RES (131)..(131): Selenocysteine
  MOD_RES (138)..(138): Selenocysteine
  MOD_RES (146)..(146): Selenocysteine
  MOD_RES (156)..(156): Selenocysteine
MPSIKLQSSDGEIFEVDVEIAKQSVXIKXMLEDLGMDDEGDDDPVPLPNVNAAILKKVIQWCXHHKDDPPPPEDDENKEKRXDDIPVWDQEFLKVDQGXLFELILAANYLDIKGLLDVXCKXVANMIKGKXPEEIRKXFNIKNDFXEEEEAQVGSXQFCL

SEQ ID NO: 25517 - protein, 163 aa, Homo sapiens
  MOD_RES (26)..(26): Selenocysteine
  MOD_RES (29)..(29): Selenocysteine
  MOD_RES (63)..(63): Selenocysteine
  MOD_RES (82)..(82): Selenocysteine
  MOD_RES (99)..(99): Selenocysteine
  MOD_RES (119)..(119): Selenocysteine
  MOD_RES (122)..(122): Selenocysteine
  MOD_RES (131)..(131): Selenocysteine
  MOD_RES (138)..(138): Selenocysteine
  MOD_RES (146)..(146): Selenocysteine
MPSIKLQSSDGEIFEVDVEIAKQSVXIKXMLEDLGMDDEGDDDPVPLPNVNAAILKKVIQWCXHHKDDPPPPEDDENKEKRXDDIPVWDQEFLKVDQGXLFELILAANYLDIKGLLDVXCKXVANMIKGKXPEEIRKXFNIKNDFXEEEEAQVRKENQWCEEK

SEQ ID NO: 25518 - protein, 163 aa, Homo sapiens
  MOD_RES (26)..(26): Selenocysteine
  MOD_RES (29)..(29): Selenocysteine
  MOD_RES (63)..(63): Selenocysteine
  MOD_RES (82)..(82): Selenocysteine
  MOD_RES (96)..(96): Selenocysteine
  MOD_RES (100)..(101): Selenocysteine
  MOD_RES (119)..(119): Selenocysteine
  MOD_RES (122)..(122): Selenocysteine
  MOD_RES (131)..(131): Selenocysteine
  MOD_RES (138)..(138): Selenocysteine
  MOD_RES (146)..(146): Selenocysteine
MPSIKLQSSDGEIFEVDVEIAKQSVXIKXMLEDLGMDDEGDDDPVPLPNVNAAILKKVIQWCXHHKDDPPPPEDDENKEKRXDDIPVWDQEFLKYXLRKXXVSLQAANYLDIKGLLDVXCKXVANMIKGKXPEEIRKXFNIKNDFXEEEEAQVRKENQWCEEK

SEQ ID NO: 25519 - protein, 39 aa, Homo sapiens
  MOD_RES (26)..(26): Selenocysteine
  MOD_RES (29)..(29): Selenocysteine
MPSIKLQSSDGEIFEVDVEIAKQSVXIKXMLEGHPFCIV

SEQ ID NO: 25520 - protein, 41 aa, Homo sapiens
  MOD_RES (26)..(26): Selenocysteine
  MOD_RES (29)..(29): Selenocysteine
  MOD_RES (34)..(34): Selenocysteine
MPSIKLQSSDGEIFEVDVEIAKQSVXIKXMLEVXVHQVPIE

SEQ ID NO: 25521 - protein, 210 aa, Homo sapiens
  MOD_RES (11)..(11): Selenocysteine
  MOD_RES (36)..(36): Selenocysteine
  MOD_RES (56)..(56): Selenocysteine
  MOD_RES (70)..(70): Selenocysteine
  MOD_RES (72)..(72): Selenocysteine
  MOD_RES (90)..(90): Selenocysteine
  MOD_RES (138)..(138): Selenocysteine
  MOD_RES (147)..(147): Selenocysteine
  MOD_RES (150)..(150): Selenocysteine
  MOD_RES (161)..(161): Selenocysteine
  MOD_RES (180)..(181): Selenocysteine
  MOD_RES (186)..(186): Selenocysteine
  MOD_RES (203)..(203): Selenocysteine
MDQPLAEHFSXLAKNSNLVRLNLSGCSGFSEFALQXLLSSCSRLDELNLSWCFDFXEKHVQVAVAHVSEXIXQLNLSGYRKNLQKSDLSXLVRRCPNLVHLDLSDSVMLKNDCFQEFFQLNYLQHLSLSRCYDIIPEXLLELGEIPXLKXLQVFGIVPDGXLQLLKEALPHLQINCSHFXXIARPXIGNKKNQEIWGIKCRLXLQKPSCL

SEQ ID NO: 25522 - protein, 217 aa, Homo sapiens
  MOD_RES (18)..(18): Selenocysteine
  MOD_RES (21)..(21): Selenocysteine
  MOD_RES (29)..(29): Selenocysteine
  MOD_RES (97)..(97): Selenocysteine
  MOD_RES (145)..(145): Selenocysteine
  MOD_RES (154)..(154): Selenocysteine
  MOD_RES (157)..(157): Selenocysteine
  MOD_RES (168)..(168): Selenocysteine
  MOD_RES (187)..(188): Selenocysteine
  MOD_RES (193)..(193): Selenocysteine
  MOD_RES (210)..(210): Selenocysteine
MHRKHLQEIPDLSSNVAXSFXWGWDSSKXSELLSGMGVSALEKEEPDSENIPQELLSNLGHPESPPRKRLKSKGSDKDFVIVRRPKLNRENFPDLSXLVRRCPNLVHLDLSDSVMLKNDCFQEFFQLNYLQHLSLSRCYDIIPEXLLELGEIPXLKXLQVFGIVPDGXLQLLKEALPHLQINCSHFXXIARPXIGNKKNQEIWGIKCRLXLQKPSCL

SEQ ID NO: 25523 - protein, 102 aa, Homo sapiens
  MOD_RES (18)..(18): Selenocysteine
  MOD_RES (21)..(21): Selenocysteine
  MOD_RES (29)..(29): Selenocysteine
MHRKHLQEIPDLSSNVAXSFXWGWDSSKXSELLSGMGVSALEKEEPDSENIPQELLSNLGHPESPPRKRLKSKGSDKDFVIVRRPKLNRENFPGLMSLYGRP

SEQ ID NO: 25524 - protein, 410 aa, Homo sapiens
  MOD_RES (18)..(18): Selenocysteine
  MOD_RES (21)..(21): Selenocysteine
  MOD_RES (29)..(29): Selenocysteine
  MOD_RES (139)..(139): Selenocysteine
  MOD_RES (143)..(143): Selenocysteine
  MOD_RES (152)..(152): Selenocysteine
  MOD_RES (197)..(197): Selenocysteine
  MOD_RES (225)..(225): Selenocysteine
  MOD_RES (250)..(250): Selenocysteine
  MOD_RES (270)..(270): Selenocysteine
  MOD_RES (284)..(284): Selenocysteine
  MOD_RES (286)..(286): Selenocysteine
  MOD_RES (304)..(304): Selenocysteine
  MOD_RES (352)..(352): Selenocysteine
  MOD_RES (357)..(357): Selenocysteine
  MOD_RES (374)..(374): Selenocysteine
  MOD_RES (377)..(377): Selenocysteine
MHRKHLQEIPDLSSNVAXSFXWGWDSSKXSELLSGMGVSALEKEEPDSENIPQELLSNLGHPESPPRKRLKSKGSDKDFVIVRRPKLNRENFPGVSWDSLPDELLLGIFSCLCLPELLKVSGVCKRWYRLASDESLWQXLDLXGKNLHPDVXGRLLSQGVIAFRCPRSFMDQPLAEHFSPFRVQHMDLSNSVIEVSXLHGILSQCSKLQNLSLEGLRLSDPIVNXLAKNSNLVRLNLSGCSGFSEFALQXLLSSCSRLDELNLSWCFDFXEKHVQVAVAHVSEXIXQLNLSGYRKNLQKSDLSXLVRRCPNLVHLDLSDSVMLKNDCFQEFFQLNYLQHLSLSRCYDIIPEXLLLVXRAGVRIRLDSDIGCPQXYRXSKLKSSHKLFCQHVRVICIFVCDFYFYRLVLKQ

SEQ ID NO: 25525 - protein, 424 aa, Homo sapiens
  MOD_RES (18)..(18): Selenocysteine
  MOD_RES (21)..(21): Selenocysteine
  MOD_RES (29)..(29): Selenocysteine
  MOD_RES (139)..(139): Selenocysteine
  MOD_RES (143)..(143): Selenocysteine
  MOD_RES (152)..(152): Selenocysteine
  MOD_RES (197)..(197): Selenocysteine
  MOD_RES (225)..(225): Selenocysteine
  MOD_RES (250)..(250): Selenocysteine
  MOD_RES (270)..(270): Selenocysteine
  MOD_RES (284)..(284): Selenocysteine
  MOD_RES (286)..(286): Selenocysteine
  MOD_RES (304)..(304): Selenocysteine
  MOD_RES (352)..(352): Selenocysteine
  MOD_RES (361)..(361): Selenocysteine
  MOD_RES (364)..(364): Selenocysteine
  MOD_RES (375)..(375): Selenocysteine
  MOD_RES (394)..(395): Selenocysteine
  MOD_RES (400)..(400): Selenocysteine
  MOD_RES (417)..(417): Selenocysteine
MHRKHLQEIPDLSSNVAXSFXWGWDSSKXSELLSGMGVSALEKEEPDSENIPQELLSNLGHPESPPRKRLKSKGSDKDFVIVRRPKLNRENFPGVSWDSLPDELLLGIFSCLCLPELLKVSGVCKRWYRLASDESLWQXLDLXGKNLHPDVXGRLLSQGVIAFRCPRSFMDQPLAEHFSPFRVQHMDLSNSVIEVSXLHGILSQCSKLQNLSLEGLRLSDPIVNXLAKNSNLVRLNLSGCSGFSEFALQXLLSSCSRLDELNLSWCFDFXEKHVQVAVAHVSEXIXQLNLSGYRKNLQKSDLSXLVRRCPNLVHLDLSDSVMLKNDCFQEFFQLNYLQHLSLSRCYDIIPEXLLELGEIPXLKXLQVFGIVPDGXLQLLKEALPHLQINCSHFXXIARPXIGNKKNQEIWGIKCRLXLQKPSCL

SEQ ID NO: 25526 - protein, 255 aa, Homo sapiens
  MOD_RES (18)..(18): Selenocysteine
  MOD_RES (21)..(21): Selenocysteine
  MOD_RES (29)..(29): Selenocysteine
  MOD_RES (139)..(139): Selenocysteine
  MOD_RES (143)..(143): Selenocysteine
  MOD_RES (152)..(152): Selenocysteine
  MOD_RES (180)..(180): Selenocysteine
  MOD_RES (205)..(205): Selenocysteine
  MOD_RES (225)..(225): Selenocysteine
  MOD_RES (239)..(239): Selenocysteine
  MOD_RES (241)..(241): Selenocysteine
MHRKHLQEIPDLSSNVAXSFXWGWDSSKXSELLSGMGVSALEKEEPDSENIPQELLSNLGHPESPPRKRLKSKGSDKDFVIVRRPKLNRENFPGVSWDSLPDELLLGIFSCLCLPELLKVSGVCKRWYRLASDESLWQXLDLXGKNLHPDVXGRLLSQGVIAFRCPRSFMDQPLAEHFSXLAKNSNLVRLNLSGCSGFSEFALQXLLSSCSRLDELNLSWCFDFXEKHVQVAVAHVSEXIXQLNLSGYRKNLQKS

SEQ ID NO: 25527 - protein, 435 aa, Homo sapiens
  MOD_RES (5)..(5): Selenocysteine
  MOD_RES (29)..(29): Selenocysteine
  MOD_RES (32)..(32): Selenocysteine
  MOD_RES (40)..(40): Selenocysteine
  MOD_RES (150)..(150): Selenocysteine
  MOD_RES (154)..(154): Selenocysteine
  MOD_RES (163)..(163): Selenocysteine
  MOD_RES (208)..(208): Selenocysteine
  MOD_RES (236)..(236): Selenocysteine
  MOD_RES (261)..(261): Selenocysteine
  MOD_RES (281)..(281): Selenocysteine
  MOD_RES (295)..(295): Selenocysteine
  MOD_RES (297)..(297): Selenocysteine
  MOD_RES (315)..(315): Selenocysteine
  MOD_RES (363)..(363): Selenocysteine
  MOD_RES (372)..(372): Selenocysteine
  MOD_RES (375)..(375): Selenocysteine
  MOD_RES (386)..(386): Selenocysteine
  MOD_RES (405)..(406): Selenocysteine
  MOD_RES (411)..(411): Selenocysteine
  MOD_RES (428)..(428): Selenocysteine
MHVFXPGPADAMHRKHLQEIPDLSSNVAXSFXWGWDSSKXSELLSGMGVSALEKEEPDSENIPQELLSNLGHPESPPRKRLKSKGSDKDFVIVRRPKLNRENFPGVSWDSLPDELLLGIFSCLCLPELLKVSGVCKRWYRLASDESLWQXLDLXGKNLHPDVXGRLLSQGVIAFRCPRSFMDQPLAEHFSPFRVQHMDLSNSVIEVSXLHGILSQCSKLQNLSLEGLRLSDPIVNXLAKNSNLVRLNLSGCSGFSEFALQXLLSSCSRLDELNLSWCFDFXEKHVQVAVAHVSEXIXQLNLSGYRKNLQKSDLSXLVRRCPNLVHLDLSDSVMLKNDCFQEFFQLNYLQHLSLSRCYDIIPEXLLELGEIPXLKXLQVFGIVPDGXLQLLKEALPHLQINCSHFXXIARPXIGNKKNQEIWGIKCRLXLQKPSCL

SEQ ID NO: 25528 - protein, 80 aa, Homo sapiens
SNLGHPESPPRKRLKSKGSDKDFVIVRRPKLNRENFPGVSWDSLPDELLLGIFSCLCLPELLKVSGVCKRWYRLASLYFS

SEQ ID NO: 25529 - protein, 14 aa, Homo sapiens
  MOD_RES (8)..(8): Selenocysteine
MGNSMKSXPAPAER

SEQ ID NO: 25530 - protein, 28 aa, Homo sapiens
  MOD_RES (8)..(8): Selenocysteine
MGNSMKSXPAPAERPLPNPEGLDSDFLA

SEQ ID NO: 25531 - protein, 40 aa, Homo sapiens
  MOD_RES (8)..(8): Selenocysteine
MGNSMKSXPAPAERPLPNPEGLDSDFLAVLSDYPSPDISP

SEQ ID NO: 25532 - protein, 49 aa, Homo sapiens
  MOD_RES (8)..(8): Selenocysteine
MGNSMKSXPAPAERPLPNPEGLDSDFLAVLSDYPSPDISPPIFRRGEKL

SEQ ID NO: 25533 - protein, 91 aa, Homo sapiens
  MOD_RES (8)..(8): Selenocysteine
  MOD_RES (66)..(66): Selenocysteine
MGNSMKSXPAPAERPLPNPEGLDSDFLAVLSDYPSPDISPPIFRRGEKLRVISDEGGWWKAISLSXGRESYIPGICVARVYHGWLFEGLGR

SEQ ID NO: 25534 - protein, 158 aa, Homo sapiens
  MOD_RES (8)..(8): Selenocysteine
  MOD_RES (66)..(66): Selenocysteine
  MOD_RES (103)..(103): Selenocysteine
  MOD_RES (115)..(115): Selenocysteine
  MOD_RES (149)..(149): Selenocysteine
MGNSMKSXPAPAERPLPNPEGLDSDFLAVLSDYPSPDISPPIFRRGEKLRVISDEGGWWKAISLSXGRESYIPGICVARVYHGWLFEGLGRDKAEELLQLPDXKVGSFMIRESEXKKGFYSLSVRHRQVKHYRIFRLPNNWYYISPRLXFQCLEDLVN

SEQ ID NO: 25535 - protein, 276 aa, Homo sapiens
  MOD_RES (8)..(8): Selenocysteine
  MOD_RES (66)..(66): Selenocysteine
  MOD_RES (103)..(103): Selenocysteine
  MOD_RES (115)..(115): Selenocysteine
  MOD_RES (149)..(149): Selenocysteine
  MOD_RES (172)..(173): Selenocysteine
  MOD_RES (177)..(177): Selenocysteine
  MOD_RES (180)..(180): Selenocysteine
  MOD_RES (193)..(193): Selenocysteine
  MOD_RES (198)..(198): Selenocysteine
  MOD_RES (214)..(214): Selenocysteine
  MOD_RES (240)..(240): Selenocysteine
  MOD_RES (245)..(245): Selenocysteine
MGNSMKSXPAPAERPLPNPEGLDSDFLAVLSDYPSPDISPPIFRRGEKLRVISDEGGWWKAISLSXGRESYIPGICVARVYHGWLFEGLGRDKAEELLQLPDXKVGSFMIRESEXKKGFYSLSVRHRQVKHYRIFRLPNNWYYISPRLXFQCLEDLVNHYSEVADGLCCVLXXPCLXQSXAAPAVRASSSPVXLRQKXVDWRRVSRLQEDPEGXENPLGVDESLFSYGLRESIASYLSLXSEDNXSFDRKKKSISLMYGGSKRKSSFFSSPPYFED

SEQ ID NO: 25536 - protein, 55 aa, Homo sapiens
  MOD_RES (8)..(8): Selenocysteine
  MOD_RES (23)..(24): Selenocysteine
MGNSMKSXPAPAERPLPNPEGVXXHGSQQPLQHRPGRSSLAQMAALSAEPDREVD

SEQ ID NO: 25537 - protein, 168 aa, Homo sapiens
  MOD_RES (7)..(7): Selenocysteine
  MOD_RES (41)..(41): Selenocysteine
  MOD_RES (64)..(65): Selenocysteine
  MOD_RES (69)..(69): Selenocysteine
  MOD_RES (72)..(72): Selenocysteine
  MOD_RES (85)..(85): Selenocysteine
  MOD_RES (90)..(90): Selenocysteine
  MOD_RES (106)..(106): Selenocysteine
  MOD_RES (132)..(132): Selenocysteine
  MOD_RES (137)..(137): Selenocysteine
MIRESEXKKGFYSLSVRHRQVKHYRIFRLPNNWYYISPRLXFQCLEDLVNHYSEVADGLCCVLXXPCLXQSXAAPAVRASSSPVXLRQKXVDWRRVSRLQEDPEGXENPLGVDESLFSYGLRESIASYLSLXSEDNXSFDRKKKSISLMYGGSKRKSSFFSSPPYFED

SEQ ID NO: 25538 - protein, 249 aa, Homo sapiens
  MOD_RES (25)..(25): Selenocysteine
  MOD_RES (83)..(83): Selenocysteine
  MOD_RES (120)..(120): Selenocysteine
  MOD_RES (132)..(132): Selenocysteine
  MOD_RES (145)..(146): Selenocysteine
  MOD_RES (150)..(150): Selenocysteine
  MOD_RES (153)..(153): Selenocysteine
  MOD_RES (166)..(166): Selenocysteine
  MOD_RES (171)..(171): Selenocysteine
  MOD_RES (187)..(187): Selenocysteine
  MOD_RES (213)..(213): Selenocysteine
  MOD_RES (218)..(218): Selenocysteine
MLHRLWASPAAPGKKKEMGNSMKSXPAPAERPLPNPEGLDSDFLAVLSDYPSPDISPPIFRRGEKLRVISDEGGWWKAISLSXGRESYIPGICVARVYHGWLFEGLGRDKAEELLQLPDXKVGSFMIRESEXKKEVADGLCCVLXXPCLXQSXAAPAVRASSSPVXLRQKXVDWRRVSRLQEDPEGXENPLGVDESLFSYGLRESIASYLSLXSEDNXSFDRKKKSISLMYGGSKRKSSFFSSPPYFED

SEQ ID NO: 25539 - protein, 293 aa, Homo sapiens
  MOD_RES (25)..(25): Selenocysteine
  MOD_RES (83)..(83): Selenocysteine
  MOD_RES (120)..(120): Selenocysteine
  MOD_RES (132)..(132): Selenocysteine
  MOD_RES (166)..(166): Selenocysteine
  MOD_RES (189)..(190): Selenocysteine
  MOD_RES (194)..(194): Selenocysteine
  MOD_RES (197)..(197): Selenocysteine
  MOD_RES (210)..(210): Selenocysteine
  MOD_RES (215)..(215): Selenocysteine
  MOD_RES (231)..(231): Selenocysteine
  MOD_RES (257)..(257): Selenocysteine
  MOD_RES (262)..(262): Selenocysteine
MLHRLWASPAAPGKKKEMGNSMKSXPAPAERPLPNPEGLDSDFLAVLSDYPSPDISPPIFRRGEKLRVISDEGGWWKAISLSXGRESYIPGICVARVYHGWLFEGLGRDKAEELLQLPDXKVGSFMIRESEXKKGFYSLSVRHRQVKHYRIFRLPNNWYYISPRLXFQCLEDLVNHYSEVADGLCCVLXXPCLXQSXAAPAVRASSSPVXLRQKXVDWRRVSRLQEDPEGXENPLGVDESLFSYGLRESIASYLSLXSEDNXSFDRKKKSISLMYGGSKRKSSFFSSPPYFED

SEQ ID NO: 25540 - protein, 316 aa, Homo sapiens
  MOD_RES (18)..(18): Selenocysteine
  MOD_RES (48)..(48): Selenocysteine
  MOD_RES (106)..(106): Selenocysteine
  MOD_RES (143)..(143): Selenocysteine
  MOD_RES (155)..(155): Selenocysteine
  MOD_RES (189)..(189): Selenocysteine
  MOD_RES (212)..(213): Selenocysteine
  MOD_RES (217)..(217): Selenocysteine
  MOD_RES (220)..(220): Selenocysteine
  MOD_RES (233)..(233): Selenocysteine
  MOD_RES (238)..(238): Selenocysteine
  MOD_RES (254)..(254): Selenocysteine
  MOD_RES (280)..(280): Selenocysteine
  MOD_RES (285)..(285): Selenocysteine
MLSKLGHSPLGGLRARLXFPVCLLYHRLWASPAAPGKKKEMGNSMKSXPAPAERPLPNPEGLDSDFLAVLSDYPSPDISPPIFRRGEKLRVISDEGGWWKAISLSXGRESYIPGICVARVYHGWLFEGLGRDKAEELLQLPDXKVGSFMIRESEXKKGFYSLSVRHRQVKHYRIFRLPNNWYYISPRLXFQCLEDLVNHYSEVADGLCCVLXXPCLXQSXAAPAVRASSSPVXLRQKXVDWRRVSRLQEDPEGXENPLGVDESLFSYGLRESIASYLSLXSEDNXSFDRKKKSISLMYGGSKRKSSFFSSPPYFED

SEQ ID NO: 25541 - protein, 210 aa, Homo sapiens
  MOD_RES (27)..(27): Selenocysteine
  MOD_RES (36)..(36): Selenocysteine
  MOD_RES (60)..(60): Selenocysteine
  MOD_RES (70)..(70): Selenocysteine
  MOD_RES (125)..(125): Selenocysteine
  MOD_RES (165)..(165): Selenocysteine
  MOD_RES (188)..(188): Selenocysteine
  MOD_RES (190)..(190): Selenocysteine
  MOD_RES (197)..(198): Selenocysteine
MGSLPSRRKSLPSPSLSSSVQGQGPVXMEAERSKAXAVALGSFPAGGPAELSLRLGEPLXIVSEDGDWWXVLSEVSGREYNIPSVHVAKVSHGWLYEGLSREKAEELLLLPGNPGGAFLIRESQXRRGSYSLSVRLSRPASWDRIRHYRIHCLDNGWLYISPRLXFPSLQALVDHYSEGWPAPWQGYXPXCDCAEDXXQLERAGQLPPVF

SEQ ID NO: 25542 - protein, 261 aa, Homo sapiens
  MOD_RES (27)..(27): Selenocysteine
  MOD_RES (36)..(36): Selenocysteine
  MOD_RES (60)..(60): Selenocysteine
  MOD_RES (70)..(70): Selenocysteine
  MOD_RES (125)..(125): Selenocysteine
  MOD_RES (165)..(165): Selenocysteine
  MOD_RES (209)..(209): Selenocysteine
  MOD_RES (213)..(213): Selenocysteine
  MOD_RES (231)..(231): Selenocysteine
MGSLPSRRKSLPSPSLSSSVQGQGPVXMEAERSKAXAVALGSFPAGGPAELSLRLGEPLXIVSEDGDWWXVLSEVSGREYNIPSVHVAKVSHGWLYEGLSREKAEELLLLPGNPGGAFLIRESQXRRGSYSLSVRLSRPASWDRIRHYRIHCLDNGWLYISPRLXFPSLQALVDHYSELADDICCLLKEPCVLQRAGPLPGKDIPLPVXVQRXPLNWKELDSSLLFSEAAXGEESLLSEGLRESLSFYISLNDEAVSLDDA

SEQ ID NO: 25543 - protein, 335 aa, Homo sapiens
  MOD_RES (10)..(10): Selenocysteine
  MOD_RES (25)..(25): Selenocysteine
  MOD_RES (48)..(48): Selenocysteine
  MOD_RES (65)..(65): Selenocysteine
  MOD_RES (104)..(104): Selenocysteine
  MOD_RES (121)..(121): Selenocysteine
  MOD_RES (143)..(143): Selenocysteine
  MOD_RES (152)..(152): Selenocysteine
  MOD_RES (157)..(157): Selenocysteine
  MOD_RES (159)..(159): Selenocysteine
  MOD_RES (165)..(165): Selenocysteine
  MOD_RES (182)..(182): Selenocysteine
  MOD_RES (197)..(197): Selenocysteine
  MOD_RES (210)..(210): Selenocysteine
  MOD_RES (221)..(221): Selenocysteine
  MOD_RES (230)..(230): Selenocysteine
  MOD_RES (235)..(235): Selenocysteine
  MOD_RES (266)..(266): Selenocysteine
  MOD_RES (271)..(272): Selenocysteine
  MOD_RES (279)..(279): Selenocysteine
  MOD_RES (304)..(305): Selenocysteine
  MOD_RES (311)..(311): Selenocysteine
  MOD_RES (321)..(321): Selenocysteine
  MOD_RES (325)..(325): Selenocysteine
  MOD_RES (331)..(331): Selenocysteine
MDPKGLLSLXFVLFLSLAFGASYGXGGRMMNCPKILRQLGSKVLLPLXYERINKSMNKSIHIVVXMAKSLENSVENKIVSLDPSEAGPPRYLGDRYKFYLENLXLGIRESRKEDEGWYLMXLEKNVSVQRFCLQLRLYEQVSXPEIKVLNKXQENGXCXLILGCXVEKGDHVAYSWSEKAGXHPLNPANSSHLLSLXLGPQHADNIYICXVSNPISNNSQXFSPWPGCRXDPSEXKPWAVYAGLLGGVIMILIMVVILQLRRRGKXNHYQXXVEKKSLXIYAQVQKPGPLQKKLDSFPAQDPCXXIYVAAXEPVPESVQEXNSIXVYASVXLPES

SEQ ID NO: 25544 - protein, 357 aa, Homo sapiens
  MOD_RES (10)..(10): Selenocysteine
  MOD_RES (25)..(25): Selenocysteine
  MOD_RES (48)..(48): Selenocysteine
  MOD_RES (65)..(65): Selenocysteine
  MOD_RES (104)..(104): Selenocysteine
  MOD_RES (121)..(121): Selenocysteine
  MOD_RES (143)..(143): Selenocysteine
  MOD_RES (152)..(152): Selenocysteine
  MOD_RES (157)..(157): Selenocysteine
  MOD_RES (159)..(159): Selenocysteine
  MOD_RES (165)..(165): Selenocysteine
  MOD_RES (182)..(182): Selenocysteine
  MOD_RES (197)..(197): Selenocysteine
  MOD_RES (210)..(210): Selenocysteine
  MOD_RES (221)..(221): Selenocysteine
  MOD_RES (230)..(230): Selenocysteine
  MOD_RES (235)..(235): Selenocysteine
  MOD_RES (265)..(265): Selenocysteine
  MOD_RES (267)..(269): Selenocysteine
  MOD_RES (279)..(279): Selenocysteine
  MOD_RES (295)..(295): Selenocysteine
  MOD_RES (297)..(297): Selenocysteine
  MOD_RES (323)..(323): Selenocysteine
  MOD_RES (329)..(329): Selenocysteine
MDPKGLLSLXFVLFLSLAFGASYGXGGRMMNCPKILRQLGSKVLLPLXYERINKSMNKSIHIVVXMAKSLENSVENKIVSLDPSEAGPPRYLGDRYKFYLENLXLGIRESRKEDEGWYLMXLEKNVSVQRFCLQLRLYEQVSXPEIKVLNKXQENGXCXLILGCXVEKGDHVAYSWSEKAGXHPLNPANSSHLLSLXLGPQHADNIYICXVSNPISNNSQXFSPWPGCRXDPSEXKPWAVYAGLLGGVIMILIMVVILQLRRRAXLXXXNQYWSQNVLXQDQERCPGCLPMVKRXIXRQQWKKKALRSMPKSRNQVLFRRNLXPSQLRXLAPPYMLLPQSLSQSLSRKQIPSQSMLV

SEQ ID NO: 25545 - protein, 144 aa, Homo sapiens
  MOD_RES (10)..(10): Selenocysteine
  MOD_RES (25)..(25): Selenocysteine
  MOD_RES (48)..(48): Selenocysteine
  MOD_RES (65)..(65): Selenocysteine
  MOD_RES (104)..(104): Selenocysteine
  MOD_RES (121)..(121): Selenocysteine
  MOD_RES (144)..(144): Selenocysteine
MDPKGLLSLXFVLFLSLAFGASYGXGGRMMNCPKILRQLGSKVLLPLXYERINKSMNKSIHIVVXMAKSLENSVENKIVSLDPSEAGPPRYLGDRYKFYLENLXLGIRESRKEDEGWYLMXLEKSLHFGYLYFVLGADHDNLQX

SEQ ID NO: 25546 - protein, 1150 aa, Homo sapiens
  MOD_RES (6)..(6): Selenocysteine
  MOD_RES (21)..(21): Selenocysteine
  MOD_RES (37)..(37): Selenocysteine
  MOD_RES (75)..(75): Selenocysteine
  MOD_RES (116)..(116): Selenocysteine
  MOD_RES (177)..(177): Selenocysteine
  MOD_RES (203)..(203): Selenocysteine
  MOD_RES (205)..(205): Selenocysteine
  MOD_RES (207)..(207): Selenocysteine
  MOD_RES (212)..(212): Selenocysteine
  MOD_RES (217)..(217): Selenocysteine
  MOD_RES (230)..(230): Selenocysteine
  MOD_RES (266)..(266): Selenocysteine
  MOD_RES (268)..(268): Selenocysteine
  MOD_RES (274)..(274): Selenocysteine
  MOD_RES (276)..(276): Selenocysteine
  MOD_RES (328)..(328): Selenocysteine
  MOD_RES (331)..(332): Selenocysteine
  MOD_RES (334)..(334): Selenocysteine
  MOD_RES (338)..(338): Selenocysteine
  MOD_RES (343)..(343): Selenocysteine
  MOD_RES (390)..(390): Selenocysteine
  MOD_RES (416)..(416): Selenocysteine
  MOD_RES (453)..(453): Selenocysteine
  MOD_RES (486)..(486): Selenocysteine
  MOD_RES (499)..(499): Selenocysteine
  MOD_RES (522)..(522): Selenocysteine
  MOD_RES (529)..(530): Selenocysteine
  MOD_RES (549)..(549): Selenocysteine
  MOD_RES (555)..(555): Selenocysteine
  MOD_RES (558)..(558): Selenocysteine
  MOD_RES (561)..(561): Selenocysteine
  MOD_RES (564)..(564): Selenocysteine
  MOD_RES (600)..(600): Selenocysteine
  MOD_RES (611)..(611): Selenocysteine
  MOD_RES (658)..(658): Selenocysteine
  MOD_RES (738)..(738): Selenocysteine
  MOD_RES (750)..(750): Selenocysteine
  MOD_RES (762)..(762): Selenocysteine
  MOD_RES (766)..(766): Selenocysteine
  MOD_RES (795)..(795): Selenocysteine
  MOD_RES (812)..(812): Selenocysteine
  MOD_RES (883)..(883): Selenocysteine
  MOD_RES (947)..(947): Selenocysteine
  MOD_RES (964)..(964): Selenocysteine
  MOD_RES (974)..(974): Selenocysteine
  MOD_RES (984)..(984): Selenocysteine
  MOD_RES (986)..(986): Selenocysteine
  MOD_RES (1013)..(1013): Selenocysteine
  MOD_RES (1023)..(1023): Selenocysteine
  MOD_RES (1036)..(1036): Selenocysteine
  MOD_RES (1044)..(1045): Selenocysteine
  MOD_RES (1074)..(1074): Selenocysteine
  MOD_RES (1094)..(1094): Selenocysteine
  MOD_RES (1135)..(1135): Selenocysteine
  MOD_RES (1144)..(1144): Selenocysteine
MEPRPXAPSSGAPGLAGVGEXPSAAALAAARVELPGXAVPSVPEDAAPASRDGGGVRDEGPAAAGDGLGRPLGPXPSQSRFQVDLVSENAGRAAAAAAAAAAAAAAAGAGAGAKQXPADGEASGESEPAKGSEEAKGRFRVNFVDPAASSSAEDSLSDAAGVGVDGPNVSFQNGGDXVLSEGSSLHSGGGGGSGHHQHYYYDXHXNXYYLRXFGHNXMDAVPRIDHYRHXAAQLGEKLLRPSLAELHDELEKEPFEDGFANGEESXPXRDAVVXYXAESKGVVKFGWIKGVLVRCMLNIWGVMLFIRLSWIVGQAGIGLSVLVIMMAXVVXXIXGLSXSAIAXNGFVRGGGAYYLISRSLGPEFGGAIGLIFAFANAVAVAMYVVGFAEXVVELLKEHSILMIDEINDIRIIGAIXVVILLGISVAGMEWEAKAQIVLLVILLLAIGDFVIGXFIPLESKKPKGFFGYKSEIFNENFGPDFREEEXFFSVFAIFFPAAXGILAGANISGDLADPQSAIPKGXLLAILIXXLVYVGIAVSVGSCVVRDAXGNVNDXIVXELXNCXSAACKLNFDFSSCESSPCSYGLMNNFQVMSMVSGFXPLISAGIFSAXLSSALASLVSAPKIFQALCKDNIYPAFQMFAKGYGKNNEPLRGYILXFLIALGFILIAELNVIAPIISNFFLASYALINFSVFHASLAKSPGWRPAFKYYNMWISLLGAILCCIVMFVINWWAALLXYVIVLGLYIYVXYKKPDVNWGSSXQALXYLNALQHSIRLSGVEDHVKNFRPQCLVMXGAPNSRPALLHLVHDFXKNVGLMICGHVHMGPRRQAMKEMSIDQAKYQRWLIKNKMKAFYAPVHADDLREGAQYLMQAAGLGRMKPNXLVLGFKKDWLQADMRDVDMYINLFHDAFDIQYGVVVIRLKEGLDISHLQGQEELLSSQEKSPGXKDVVVSVEYSKKSDLDXSKPLSEKPIXHKVEEEDGKXAXQPLLKKESKGPIVPLNVADQKLLEASXQFQKKQGKNXIDVWWLFDDGGLXLLIPYLLXXKKKWKDCKIRVFIGGKINRIDHDRRAMAXLLSKFRIDFSDIMVLGDINXKPKKENIIAFEEIIEPYRLHEDDKEQDIADKMKEDEPWRIXDNELELYKXKFYEPC

SEQ ID NO: 25547 - protein, 1196 aa, Homo sapiens
  MOD_RES (6)..(6): Selenocysteine
  MOD_RES (21)..(21): Selenocysteine
  MOD_RES (37)..(37): Selenocysteine
  MOD_RES (75)..(75): Selenocysteine
  MOD_RES (116)..(116): Selenocysteine
  MOD_RES (177)..(177): Selenocysteine
  MOD_RES (203)..(203): Selenocysteine
  MOD_RES (205)..(205): Selenocysteine
  MOD_RES (207)..(207): Selenocysteine
  MOD_RES (212)..(212): Selenocysteine
  MOD_RES (217)..(217): Selenocysteine
  MOD_RES (230)..(230): Selenocysteine
  MOD_RES (266)..(266): Selenocysteine
  MOD_RES (268)..(268): Selenocysteine
  MOD_RES (274)..(274): Selenocysteine
  MOD_RES (276)..(276): Selenocysteine
  MOD_RES (328)..(328): Selenocysteine
  MOD_RES (331)..(332): Selenocysteine
  MOD_RES (334)..(334): Selenocysteine
  MOD_RES (338)..(338): Selenocysteine
  MOD_RES (343)..(343): Selenocysteine
  MOD_RES (390)..(390): Selenocysteine
  MOD_RES (416)..(416): Selenocysteine
  MOD_RES (453)..(453): Selenocysteine
  MOD_RES (486)..(486): Selenocysteine
  MOD_RES (499)..(499): Selenocysteine
  MOD_RES (522)..(522): Selenocysteine
  MOD_RES (529)..(530): Selenocysteine
  MOD_RES (549)..(549): Selenocysteine
  MOD_RES (555)..(555): Selenocysteine
  MOD_RES (558)..(558): Selenocysteine
  MOD_RES (561)..(561): Selenocysteine
  MOD_RES (564)..(564): Selenocysteine
  MOD_RES (600)..(600): Selenocysteine
  MOD_RES (611)..(611): Selenocysteine
  MOD_RES (658)..(658): Selenocysteine
  MOD_RES (738)..(738): Selenocysteine
  MOD_RES (750)..(750): Selenocysteine
  MOD_RES (762)..(762): Selenocysteine
  MOD_RES (766)..(766): Selenocysteine
  MOD_RES (795)..(795): Selenocysteine
  MOD_RES (812)..(812): Selenocysteine
  MOD_RES (883)..(883): Selenocysteine
  MOD_RES (947)..(947): Selenocysteine
  MOD_RES (964)..(964): Selenocysteine
  MOD_RES (974)..(974): Selenocysteine
  MOD_RES (997)..(997): Selenocysteine
  MOD_RES (1007)..(1007): Selenocysteine
  MOD_RES (1020)..(1020): Selenocysteine
  MOD_RES (1028)..(1029): Selenocysteine
  MOD_RES (1058)..(1058): Selenocysteine
  MOD_RES (1078)..(1078): Selenocysteine
  MOD_RES (1119)..(1119): Selenocysteine
  MOD_RES (1128)..(1128): Selenocysteine
  MOD_RES (1130)..(1130): Selenocysteine
  MOD_RES (1146)..(1146): Selenocysteine
  MOD_RES (1193)..(1193): Selenocysteine
MEPRPXAPSSGAPGLAGVGEXPSAAALAAARVELPGXAVPSVPEDAAPASRDGGGVRDEGPAAAGDGLGRPLGPXPSQSRFQVDLVSENAGRAAAAAAAAAAAAAAAGAGAGAKQXPADGEASGESEPAKGSEEAKGRFRVNFVDPAASSSAEDSLSDAAGVGVDGPNVSFQNGGDXVLSEGSSLHSGGGGGSGHHQHYYYDXHXNXYYLRXFGHNXMDAVPRIDHYRHXAAQLGEKLLRPSLAELHDELEKEPFEDGFANGEESXPXRDAVVXYXAESKGVVKFGWIKGVLVRCMLNIWGVMLFIRLSWIVGQAGIGLSVLVIMMAXVVXXIXGLSXSAIAXNGFVRGGGAYYLISRSLGPEFGGAIGLIFAFANAVAVAMYVVGFAEXVVELLKEHSILMIDEINDIRIIGAIXVVILLGISVAGMEWEAKAQIVLLVILLLAIGDFVIGXFIPLESKKPKGFFGYKSEIFNENFGPDFREEEXFFSVFAIFFPAAXGILAGANISGDLADPQSAIPKGXLLAILIXXLVYVGIAVSVGSCVVRDAXGNVNDXIVXELXNCXSAACKLNFDFSSCESSPCSYGLMNNFQVMSMVSGFXPLISAGIFSAXLSSALASLVSAPKIFQALCKDNIYPAFQMFAKGYGKNNEPLRGYILXFLIALGFILIAELNVIAPIISNFFLASYALINFSVFHASLAKSPGWRPAFKYYNMWISLLGAILCCIVMFVINWWAALLXYVIVLGLYIYVXYKKPDVNWGSSXQALXYLNALQHSIRLSGVEDHVKNFRPQCLVMXGAPNSRPALLHLVHDFXKNVGLMICGHVHMGPRRQAMKEMSIDQAKYQRWLIKNKMKAFYAPVHADDLREGAQYLMQAAGLGRMKPNXLVLGFKKDWLQADMRDVDMYINLFHDAFDIQYGVVVIRLKEGLDISHLQGQEELLSSQEKSPGXKDVVVSVEYSKKSDLDXSKPLSEKPIXHKESKGPIVPLNVADQKLLEASXQFQKKQGKNXIDVWWLFDDGGLXLLIPYLLXXKKKWKDCKIRVFIGGKINRIDHDRRAMAXLLSKFRIDFSDIMVLGDINXKPKKENIIAFEEIIEPYRLHEDDKEQDIADKMKEDEPWRIXDNELELYKXKXYRQIRLNELLKEHSSXANIIVMSLPVARKGAVSSALYMAWLEALSKDLPPILLVRGNHQSVLXFYS

SEQ ID NO: 25548 - protein, 1212 aa, Homo sapiens
  MOD_RES (6)..(6): Selenocysteine
  MOD_RES (21)..(21): Selenocysteine
  MOD_RES (37)..(37): Selenocysteine
  MOD_RES (75)..(75): Selenocysteine
  MOD_RES (116)..(116): Selenocysteine
  MOD_RES (177)..(177): Selenocysteine
  MOD_RES (203)..(203): Selenocysteine
  MOD_RES (205)..(205): Selenocysteine
  MOD_RES (207)..(207): Selenocysteine
  MOD_RES (212)..(212): Selenocysteine
  MOD_RES (217)..(217): Selenocysteine
  MOD_RES (230)..(230): Selenocysteine
  MOD_RES (266)..(266): Selenocysteine
  MOD_RES (268)..(268): Selenocysteine
  MOD_RES (274)..(274): Selenocysteine
  MOD_RES (276)..(276): Selenocysteine
  MOD_RES (328)..(328): Selenocysteine
  MOD_RES (331)..(332): Selenocysteine
  MOD_RES (334)..(334): Selenocysteine
  MOD_RES (338)..(338): Selenocysteine
  MOD_RES (343)..(343): Selenocysteine
  MOD_RES (390)..(390): Selenocysteine
  MOD_RES (416)..(416): Selenocysteine
  MOD_RES (453)..(453): Selenocysteine
  MOD_RES (486)..(486): Selenocysteine
  MOD_RES (499)..(499): Selenocysteine
  MOD_RES (522)..(522): Selenocysteine
  MOD_RES (529)..(530): Selenocysteine
  MOD_RES (549)..(549): Selenocysteine
  MOD_RES (555)..(555): Selenocysteine
  MOD_RES (558)..(558): Selenocysteine
  MOD_RES (561)..(561): Selenocysteine
  MOD_RES (564)..(564): Selenocysteine
  MOD_RES (600)..(600): Selenocysteine
  MOD_RES (611)..(611): Selenocysteine
  MOD_RES (658)..(658): Selenocysteine
  MOD_RES (738)..(738): Selenocysteine
  MOD_RES (750)..(750): Selenocysteine
  MOD_RES (762)..(762): Selenocysteine
  MOD_RES (766)..(766): Selenocysteine
  MOD_RES (795)..(795): Selenocysteine
  MOD_RES (812)..(812): Selenocysteine
  MOD_RES (883)..(883): Selenocysteine
  MOD_RES (947)..(947): Selenocysteine
  MOD_RES (964)..(964): Selenocysteine
  MOD_RES (974)..(974): Selenocysteine
  MOD_RES (984)..(984): Selenocysteine
  MOD_RES (986)..(986): Selenocysteine
  MOD_RES (1013)..(1013): Selenocysteine
  MOD_RES (1023)..(1023): Selenocysteine
  MOD_RES (1036)..(1036): Selenocysteine
  MOD_RES (1044)..(1045): Selenocysteine
  MOD_RES (1074)..(1074): Selenocysteine
  MOD_RES (1094)..(1094): Selenocysteine
  MOD_RES (1135)..(1135): Selenocysteine
  MOD_RES (1144)..(1144): Selenocysteine
  MOD_RES (1146)..(1146): Selenocysteine
  MOD_RES (1162)..(1162): Selenocysteine
  MOD_RES (1209)..(1209): Selenocysteine
MEPRPXAPSSGAPGLAGVGEXPSAAALAAARVELPGXAVPSVPEDAAPASRDGGGVRDEGPAAAGDGLGRPLGPXPSQSRFQVDLVSENAGRAAAAAAAAAAAAAAAGAGAGAKQXPADGEASGESEPAKGSEEAKGRFRVNFVDPAASSSAEDSLSDAAGVGVDGPNVSFQNGGDXVLSEGSSLHSGGGGGSGHHQHYYYDXHXNXYYLRXFGHNXMDAVPRIDHYRHXAAQLGEKLLRPSLAELHDELEKEPFEDGFANGEESXPXRDAVVXYXAESKGVVKFGWIKGVLVRCMLNIWGVMLFIRLSWIVGQAGIGLSVLVIMMAXVVXXIXGLSXSAIAXNGFVRGGGAYYLISRSLGPEFGGAIGLIFAFANAVAVAMYVVGFAEXVVELLKEHSILMIDEINDIRIIGAIXVVILLGISVAGMEWEAKAQIVLLVILLLAIGDFVIGXFIPLESKKPKGFFGYKSEIFNENFGPDFREEEXFFSVFAIFFPAAXGILAGANISGDLADPQSAIPKGXLLAILIXXLVYVGIAVSVGSCVVRDAXGNVNDXIVXELXNCXSAACKLNFDFSSCESSPCSYGLMNNFQVMSMVSGFXPLISAGIFSAXLSSALASLVSAPKIFQALCKDNIYPAFQMFAKGYGKNNEPLRGYILXFLIALGFILIAELNVIAPIISNFFLASYALINFSVFHASLAKSPGWRPAFKYYNMWISLLGAILCCIVMFVINWWAALLXYVIVLGLYIYVXYKKPDVNWGSSXQALXYLNALQHSIRLSGVEDHVKNFRPQCLVMXGAPNSRPALLHLVHDFXKNVGLMICGHVHMGPRRQAMKEMSIDQAKYQRWLIKNKMKAFYAPVHADDLREGAQYLMQAAGLGRMKPNXLVLGFKKDWLQADMRDVDMYINLFHDAFDIQYGVVVIRLKEGLDISHLQGQEELLSSQEKSPGXKDVVVSVEYSKKSDLDXSKPLSEKPIXHKVEEEDGKXAXQPLLKKESKGPIVPLNVADQKLLEASXQFQKKQGKNXIDVWWLFDDGGLXLLIPYLLXXKKKWKDCKIRVFIGGKINRIDHDRRAMAXLLSKFRIDFSDIMVLGDINXKPKKENIIAFEEIIEPYRLHEDDKEQDIADKMKEDEPWRIXDNELELYKXKXYRQIRLNELLKEHSSXANIIVMSLPVARKGAVSSALYMAWLEALSKDLPPILLVRGNHQSVLXFYS

SEQ ID NO: 25549 - protein, 679 aa, Homo sapiens
  MOD_RES (3)..(3): Selenocysteine
  MOD_RES (6)..(6): Selenocysteine
  MOD_RES (8)..(9): Selenocysteine
  MOD_RES (12)..(12): Selenocysteine
  MOD_RES (50)..(50): Selenocysteine
  MOD_RES (58)..(58): Selenocysteine
  MOD_RES (71)..(71): Selenocysteine
  MOD_RES (84)..(84): Selenocysteine
  MOD_RES (98)..(98): Selenocysteine
  MOD_RES (130)..(130): Selenocysteine
  MOD_RES (137)..(137): Selenocysteine
  MOD_RES (205)..(205): Selenocysteine
  MOD_RES (216)..(216): Selenocysteine
  MOD_RES (231)..(231): Selenocysteine
  MOD_RES (285)..(285): Selenocysteine
  MOD_RES (305)..(305): Selenocysteine
  MOD_RES (316)..(316): Selenocysteine
  MOD_RES (342)..(342): Selenocysteine
  MOD_RES (347)..(347): Selenocysteine
  MOD_RES (380)..(380): Selenocysteine
  MOD_RES (419)..(419): Selenocysteine
  MOD_RES (422)..(422): Selenocysteine
  MOD_RES (449)..(449): Selenocysteine
  MOD_RES (465)..(465): Selenocysteine
  MOD_RES (522)..(522): Selenocysteine
  MOD_RES (551)..(551): Selenocysteine
  MOD_RES (560)..(560): Selenocysteine
  MOD_RES (586)..(586): Selenocysteine
  MOD_RES (592)..(592): Selenocysteine
  MOD_RES (595)..(595): Selenocysteine
  MOD_RES (609)..(609): Selenocysteine
  MOD_RES (622)..(623): Selenocysteine
  MOD_RES (657)..(657): Selenocysteine
MAXLIXSXXAAXAASGPLVDYLWMLILGFIIAFVLAFSVGANDVANSFGXAVGSGVVXLKQACILASIFEXVGSVLLGAKVSEXIRKGLIDVEMYNSXQGLLMAGSVSAMFGSAVWQLVASFLKLPISGXHCIVGAXIGFSLVAKGQEGVKWSELIKIVMSWFVSPLLSGIMSGILFFLVRAFILHKADPVPNGLRALPVFYACXVGINLFSIMYXGAPLLGFDKLPLWGXILISVGCAVFCALIVWFFVCPRMKRKIEREIKCSPSESPLMEKKNSLKEDHEEXKLSVGDIENKHPVSEVGPAXVPLQAVVEERXVSFKLGDLEEAPERERLPSVDLKEEXSIDSXVNGAVQLPNGNLVQFSQAVSNQINSSGHYQYHXVHKDSGLYKELLHKLHLAKVGDCMGDSGDKPLRRNNSYXSYXMAICGMPLDSFRAKEGEQKGEEMEKLXWPNADSKKRIRMDSYXSYCNAVSDLHSASEIDMSVKAEMGLGDRKGSNGSLEEWYDQDKPEVSLLFQFLQILXACFGSFAHGGNDVSNAIGPLVALYLVYDXGDVSSKVAXPIWLLLYGGVGICVGLWVWGRRVIQXMGKDLXPIXPSSGFSIELASALXVVIASNIGLPISXXHCKVGSVVSVGWLRSKKAVDWRLFRNIFMAWFVXVPISGVISAAIMAIFRYVILRM

SEQ ID NO: 25550 - protein, 115 aa, Homo sapiens
  MOD_RES (25)..(25): Selenocysteine
  MOD_RES (36)..(36): Selenocysteine
  MOD_RES (51)..(51): Selenocysteine
  MOD_RES (91)..(91): Selenocysteine
RAFILHKADPVPNGLRALPVFYACXVGINLFSIMYXGAPLLGFDKLPLWGXILISVGCAVFCALIVWFFVCPRMKRKIERCGGGENSLIQXWRFGGSSREREASQRGLERGNQHR

SEQ ID NO: 25551 - protein, 89 aa, Homo sapiens
  MOD_RES (1)..(1): Any amino acid
  MOD_RES (53)..(53): Selenocysteine
  MOD_RES (64)..(64): Selenocysteine
XELIKIVMSWFVSPLLSGIMSGILFFLVRAFILHKADPVPNGLRALPVFYACXVGINLFSIMYXGAPWLKSPRRWLACAHFRRLQASVR

SEQ ID NO: 25552 - protein, 98 aa, Homo sapiens
  MOD_RES (1)..(1): Any amino acid
  MOD_RES (30)..(30): Selenocysteine
  MOD_RES (41)..(41): Selenocysteine
  MOD_RES (69)..(69): Selenocysteine
XFFLVRAFILHKADPVPNGLRALPVFYACXVGINLFSIMYXGAPWLKSPRRWLACAHFRRLQASCWALXNFLCGVPSSSRWDVQFSVPLSSGSLYVPG

SEQ ID NO: 25553 - protein, 213 aa, Homo sapiens
  MOD_RES (1)..(1): Any amino acid
  MOD_RES (31)..(31): Selenocysteine
  MOD_RES (42)..(42): Selenocysteine
  MOD_RES (57)..(57): Selenocysteine
  MOD_RES (89)..(89): Selenocysteine
  MOD_RES (100)..(100): Selenocysteine
  MOD_RES (126)..(126): Selenocysteine
  MOD_RES (131)..(131): Selenocysteine
  MOD_RES (164)..(164): Selenocysteine
  MOD_RES (203)..(203): Selenocysteine
  MOD_RES (206)..(206): Selenocysteine
XLFFLVRAFILHKADPVPNGLRALPVFYACXVGINLFSIMYXGAPLLGFDKLPLWGXILISVGCAVFCALIVWFFVCPRMKRKIERPAXVPLQAVVEERXVSFKLGDLEEAPERERLPSVDLKEEXSIDSXVNGAVQLPNGNLVQFSQAVSNQINSSGHYQYHXVHKDSGLYKELLHKLHLAKVGDCMGDSGDKPLRRNNSYXSYXMAICGMP

SEQ ID NO: 25554 - protein, 77 aa, Homo sapiens
  MOD_RES (29)..(29): Selenocysteine
  MOD_RES (31)..(31): Selenocysteine
  MOD_RES (42)..(42): Selenocysteine
  MOD_RES (44)..(44): Selenocysteine
  MOD_RES (66)..(66): Selenocysteine
AERNRPHGQMLGEEAQEALQASLPMPFAXAXSLWEEEGAHRXSXCALCWPAAPQPWPVSSWGSPWXDLAAGASFFSP

SEQ ID NO: 25555 - protein, 94 aa, Homo sapiens
  MOD_RES (7)..(7): Selenocysteine
  MOD_RES (9)..(9): Selenocysteine
  MOD_RES (23)..(23): Selenocysteine
  MOD_RES (27)..(27): Selenocysteine
  MOD_RES (29)..(29): Selenocysteine
  MOD_RES (36)..(36): Selenocysteine
  MOD_RES (43)..(43): Selenocysteine
LAPRVAXGXPEPNGGGGGKIDNXVEIXPXSNGQVGXLGDAVPXEQLQASQCQRRQRRQRCPSSQRRQPCRHQYRPLVQRLRPAGLQPLPQGLGL

SEQ ID NO: 25556 - protein, 244 aa, Homo sapiens
  MOD_RES (7)..(7): Selenocysteine
  MOD_RES (9)..(9): Selenocysteine
  MOD_RES (23)..(23): Selenocysteine
  MOD_RES (27)..(27): Selenocysteine
  MOD_RES (29)..(29): Selenocysteine
  MOD_RES (36)..(36): Selenocysteine
  MOD_RES (43)..(43): Selenocysteine
  MOD_RES (119)..(119): Selenocysteine
  MOD_RES (164)..(164): Selenocysteine
  MOD_RES (166)..(166): Selenocysteine
  MOD_RES (194)..(195): Selenocysteine
LAPRVAXGXPEPNGGGGGKIDNXVEIXPXSNGQVGXLGDAVPXEQLQGEREREREGEGDAGGDGLGSSLSLAVPPGPLSFEALLAQVGALGGGQQLQLGLCCLPVLFVALGMASDPIFXLAPPLHCHYGAFPPNASGWEQPPNASGVSVASAALAASAASRVAXSXDPSCSGFAPPDFNHCLKDWDYNGLPVLXXNAIGQIWPSRDCAADLGAGGPLWSRRGCCRLLHRRHGPPIPLGLSACRC

SEQ ID NO: 25557 - protein, 631 aa, Homo sapiens
  MOD_RES (7)..(7): Selenocysteine
  MOD_RES (9)..(9): Selenocysteine
  MOD_RES (23)..(23): Selenocysteine
  MOD_RES (27)..(27): Selenocysteine
  MOD_RES (29)..(29): Selenocysteine
  MOD_RES (36)..(36): Selenocysteine
  MOD_RES (43)..(43): Selenocysteine
  MOD_RES (119)..(119): Selenocysteine
  MOD_RES (164)..(164): Selenocysteine
  MOD_RES (166)..(166): Selenocysteine
  MOD_RES (194)..(195): Selenocysteine
  MOD_RES (245)..(245): Selenocysteine
  MOD_RES (263)..(263): Selenocysteine
  MOD_RES (294)..(294): Selenocysteine
  MOD_RES (332)..(332): Selenocysteine
  MOD_RES (395)..(395): Selenocysteine
  MOD_RES (401)..(401): Selenocysteine
  MOD_RES (425)..(425): Selenocysteine
  MOD_RES (458)..(458): Selenocysteine
  MOD_RES (469)..(469): Selenocysteine
  MOD_RES (484)..(484): Selenocysteine
  MOD_RES (486)..(486): Selenocysteine
  MOD_RES (506)..(507): Selenocysteine
  MOD_RES (524)..(524): Selenocysteine
  MOD_RES (533)..(534): Selenocysteine
  MOD_RES (589)..(589): Selenocysteine
  MOD_RES (616)..(616): Selenocysteine
  MOD_RES (626)..(626): Selenocysteine
LAPRVAXGXPEPNGGGGGKIDNXVEIXPXSNGQVGXLGDAVPXEQLQGEREREREGEGDAGGDGLGSSLSLAVPPGPLSFEALLAQVGALGGGQQLQLGLCCLPVLFVALGMASDPIFXLAPPLHCHYGAFPPNASGWEQPPNASGVSVASAALAASAASRVAXSXDPSCSGFAPPDFNHCLKDWDYNGLPVLXXNAIGQWDLVCDLGWQVILEQILFILGFASGYLFLGYPADRFGRRGIVLLXLGLVGPCGVGGAAAGSSXGVMALRFLLGFLLAGVDLGVYLMRLELCDPXQRLRVALAGELVGVGGHFLFLGLALVSKDWRFLQRMIXAPCILFLFYGWPGLFLESARWLIVKRQIEEAQSVLRILAERNRPHGQMLGEEAQEALQDLENXCPLPAXSSFSFASLLNYRNIWKNLLILGFXNFIAHAIRHCYQPVGGGGSPSDFYLCSLLASGXAALACVFLGVXVDRFGRRGILLLSMXLXGIASLVLLGLWDYLNEAAIXXFSVLGLFSSQAAAILSXLLAAEVIPXXVRGRGLGLIMALGALGGLSGPAQRLHMGHGAFLQHVVLAACALLCILSIMLLPEXKRKLLPEVLRDGELCRRPSLLRQPPPXRCDHVPLLAXPNPAL

SEQ ID NO: 25558 - protein, 538 aa, Homo sapiens
  MOD_RES (8)..(8): Selenocysteine
  MOD_RES (53)..(53): Selenocysteine
  MOD_RES (55)..(55): Selenocysteine
  MOD_RES (83)..(84): Selenocysteine
  MOD_RES (134)..(134): Selenocysteine
  MOD_RES (152)..(152): Selenocysteine
  MOD_RES (183)..(183): Selenocysteine
  MOD_RES (221)..(221): Selenocysteine
  MOD_RES (284)..(284): Selenocysteine
  MOD_RES (290)..(290): Selenocysteine
  MOD_RES (314)..(314): Selenocysteine
  MOD_RES (347)..(347): Selenocysteine
  MOD_RES (358)..(358): Selenocysteine
  MOD_RES (373)..(373): Selenocysteine
  MOD_RES (375)..(375): Selenocysteine
  MOD_RES (395)..(395): Selenocysteine
  MOD_RES (413)..(414): Selenocysteine
  MOD_RES (431)..(431): Selenocysteine
  MOD_RES (440)..(441): Selenocysteine
  MOD_RES (496)..(496): Selenocysteine
  MOD_RES (523)..(523): Selenocysteine
  MOD_RES (533)..(533): Selenocysteine
MASDPIFXLAPPLHCHYGAFPPNASGWEQPPNASGVSVASAALAASAASRVAXSXDPSCSGFAPPDFNHCLKDWDYNGLPVLXXNAIGQWDLVCDLGWQVILEQILFILGFASGYLFLGYPADRFGRRGIVLLXLGLVGPCGVGGAAAGSSXGVMALRFLLGFLLAGVDLGVYLMRLELCDPXQRLRVALAGELVGVGGHFLFLGLALVSKDWRFLQRMIXAPCILFLFYGWPGLFLESARWLIVKRQIEEAQSVLRILAERNRPHGQMLGEEAQEALQDLENXCPLPAXSSFSFASLLNYRNIWKNLLILGFXNFIAHAIRHCYQPVGGGGSPSDFYLCSLLASGXAALACVFLGVXVDRFGRRGILLLSMXLXGIASLVLLGLWDCEHPIFPXVWAQQGNPNRDLNEAAIXXFSVLGLFSSQAAAILSXLLAAEVIPXXVRGRGLGLIMALGALGGLSGPAQRLHMGHGAFLQHVVLAACALLCILSIMLLPEXKRKLLPEVLRDGELCRRPSLLRQPPPXRCDHVPLLAXPNPAL

SEQ ID NO: 25559 - protein, 321 aa, Homo sapiens
  MOD_RES (3)..(3): Selenocysteine
  MOD_RES (11)..(11): Selenocysteine
  MOD_RES (23)..(23): Selenocysteine
  MOD_RES (29)..(29): Selenocysteine
  MOD_RES (37)..(37): Selenocysteine
  MOD_RES (48)..(48): Selenocysteine
  MOD_RES (58)..(58): Selenocysteine
  MOD_RES (68)..(68): Selenocysteine
  MOD_RES (71)..(71): Selenocysteine
  MOD_RES (142)..(142): Selenocysteine
  MOD_RES (154)..(154): Selenocysteine
  MOD_RES (170)..(170): Selenocysteine
  MOD_RES (180)..(180): Selenocysteine
  MOD_RES (191)..(191): Selenocysteine
  MOD_RES (200)..(200): Selenocysteine
  MOD_RES (226)..(226): Selenocysteine
  MOD_RES (231)..(231): Selenocysteine
  MOD_RES (259)..(259): Selenocysteine
  MOD_RES (266)..(266): Selenocysteine
  MOD_RES (274)..(274): Selenocysteine
  MOD_RES (302)..(302): Selenocysteine
  MOD_RES (308)..(308): Selenocysteine
  MOD_RES (320)..(320): Selenocysteine
MAXGGQQKENXLLHLFAGGCGGXVGAIFXCPLEVIKXRLQSSRLALRXVYYPQVHLGXISGAGMVRPXSVXPGLFQVLKSILEKEGPKSLFRGLGPNLVGVAPSRAVYFACYSKAKEQFNGIFVPNSNIVHIFSAGSAAFIXNSLMNPIWMVKXRMQLEQKVRGSKQMNXLQCARYVYQXEGIRGFYRGLXASYAGISEXIICFAIYESLKKYLKEAPLASSANGXEKNSXSFFGLMAAAALSKGCASCIAYPHEVIRXRLREEGXKYKSFVQXARLVFREEGYLAFYRGLFAQLIRQIPNXAIVLSXYELIVYLLEDRXQ

SEQ ID NO: 25560 - protein, 298 aa, Homo sapiens
  MOD_RES (2)..(2): Selenocysteine
  MOD_RES (24)..(24): Selenocysteine
  MOD_RES (46)..(46): Selenocysteine
  MOD_RES (84)..(84): Selenocysteine
  MOD_RES (107)..(107): Selenocysteine
  MOD_RES (126)..(126): Selenocysteine
  MOD_RES (139)..(139): Selenocysteine
  MOD_RES (197)..(197): Selenocysteine
  MOD_RES (208)..(208): Selenocysteine
  MOD_RES (219)..(219): Selenocysteine
  MOD_RES (221)..(221): Selenocysteine
  MOD_RES (227)..(227): Selenocysteine
  MOD_RES (233)..(233): Selenocysteine
  MOD_RES (247)..(247): Selenocysteine
  MOD_RES (252)..(252): Selenocysteine
  MOD_RES (254)..(254): Selenocysteine
  MOD_RES (298)..(298): Selenocysteine
MXDAAVSFAKDFLAGGVAAAISKXAVAPIERVKLLLQVQHASKQIXADKQYKGIIDCVVRIPKEQGVLSFWRGNLANVIRYFPXQALNFAFKDKYKQIFLGGVDKRXQFWLYFAGNLASGGAAGAXSLCFVYPLDFARXRLAADVGKAGAEREFRGLGDCLVKIYKSDGIKGLYQGFNVSVQGIIIYRAAYFGIYDXAKGMLPDPKNXHIVISWMIAQXVXAVAGLXSYPFDXVRRRMMMQSGRKGXDIMYXGXLDCWRKIARDEGGKAFFKGAWSNVLRGMGGAFVLVLYDEIKKYX

SEQ ID NO: 25561 - protein, 120 aa, Homo sapiens
  MOD_RES (18)..(18): Selenocysteine
  MOD_RES (28)..(28): Selenocysteine
  MOD_RES (34)..(34): Selenocysteine
  MOD_RES (83)..(83): Selenocysteine
MIEPFGNQYIVARPVYSXNAFEENHKKXGRHHKXFLDHLKVCCSCSPQKAKRIVLSLFPIASWLPAYRLKEWLLSDIVSGISXGIVAVLQGLAFALLVDIPPVYGLYASFFPAIIYLFFG

SEQ ID NO: 25562 - protein, 764 aa, Homo sapiens
  MOD_RES (18)..(18): Selenocysteine
  MOD_RES (28)..(28): Selenocysteine
  MOD_RES (34)..(34): Selenocysteine
  MOD_RES (83)..(83): Selenocysteine
  MOD_RES (121)..(121): Selenocysteine
  MOD_RES (155)..(156): Selenocysteine
  MOD_RES (183)..(183): Selenocysteine
  MOD_RES (214)..(215): Selenocysteine
  MOD_RES (233)..(233): Selenocysteine
  MOD_RES (238)..(238): Selenocysteine
  MOD_RES (257)..(257): Selenocysteine
  MOD_RES (264)..(264): Selenocysteine
  MOD_RES (297)..(297): Selenocysteine
  MOD_RES (330)..(330): Selenocysteine
  MOD_RES (335)..(335): Selenocysteine
  MOD_RES (339)..(339): Selenocysteine
  MOD_RES (395)..(395): Selenocysteine
  MOD_RES (406)..(406): Selenocysteine
  MOD_RES (410)..(410): Selenocysteine
  MOD_RES (475)..(475): Selenocysteine
  MOD_RES (479)..(479): Selenocysteine
  MOD_RES (498)..(498): Selenocysteine
  MOD_RES (503)..(503): Selenocysteine
  MOD_RES (510)..(510): Selenocysteine
  MOD_RES (517)..(517): Selenocysteine
  MOD_RES (590)..(590): Selenocysteine
  MOD_RES (597)..(597): Selenocysteine
  MOD_RES (600)..(600): Selenocysteine
  MOD_RES (622)..(623): Selenocysteine
  MOD_RES (686)..(686): Selenocysteine
  MOD_RES (712)..(712): Selenocysteine
  MOD_RES (728)..(728): Selenocysteine
  MOD_RES (744)..(744): Selenocysteine
  MOD_RES (747)..(747): Selenocysteine
  MOD_RES (762)..(762): Selenocysteine
MIEPFGNQYIVARPVYSXNAFEENHKKXGRHHKXFLDHLKVCCSCSPQKAKRIVLSLFPIASWLPAYRLKEWLLSDIVSGISXGIVAVLQGLAFALLVDIPPVYGLYASFFPAIIYLFFGXSRHISVGPFPILSMMVGLAVSGAVSKAVPDRNAXXLGLPNNSNNSSLLDDERVRVAAAASVXVLSGIIQLAFGILRIGFVVIYLSESLISGFXXAAAVHVLVSQLKFIFQLXVPSHXDPVSIFKVLYSVFSQIEKXNIADLVXALIVLLVVSIVKEINQRFKDKLPVPIPIEFIMXVIAAGVSYGCDFKNRFKVAVVGDMNPGFQPPIXPDVEXFQNXVGDCFGIAMVAFAVAFSVASVYSLKYDYPLDGNQELIALGLGNIVCGVFRGFAGSXALSRSAVQESXGGKXQIAGLIGAIIVLIVVLAIGFLLAPLQKSVLAALALGNLKGMLMQFAEIGRLWRKDKYDCLIWIMXFIFXIVLGLGLGLAASVAFQLLXIVFRXQFPKCSXLANIGRXNIYKNKKDYYDMYEPEGVKIFRCPSPIYFANIGFFRRKLIDAVGFSPLRILRKRNKALRKIRKLQKQGLLQVXPKGFICXVDXIKDSDEELDNNQIEVLDQPINXXDLPFHIDWNDDLPLNIEVPKISLHSLILDFSAVSFLDVSSVRGLKSILQEFIRIKVDVYIVGXDDDFIEKLNRYEFFDGEVKSSIFFLXIHDAVLHILMKKDYSXSKFNPSQEKDGKIDFXINXNGGLRNRVYEVPVEXKF

SEQ ID NO: 25563 - protein, 52 aa, Homo sapiens
  MOD_RES (18)..(18): Selenocysteine
  MOD_RES (28)..(28): Selenocysteine
  MOD_RES (34)..(34): Selenocysteine
MIEPFGNQYIVARPVYSXNAFEENHKKXGRHHKXFLDHLKVCCSILVASIPA

SEQ ID NO: 25564 - protein, 646 aa, Homo sapiens
  MOD_RES (25)..(25): Selenocysteine
  MOD_RES (50)..(50): Selenocysteine
  MOD_RES (77)..(77): Selenocysteine
  MOD_RES (100)..(100): Selenocysteine
  MOD_RES (105)..(105): Selenocysteine
  MOD_RES (173)..(173): Selenocysteine
  MOD_RES (217)..(217): Selenocysteine
  MOD_RES (229)..(229): Selenocysteine
  MOD_RES (249)..(249): Selenocysteine
  MOD_RES (252)..(253): Selenocysteine
  MOD_RES (310)..(310): Selenocysteine
  MOD_RES (332)..(332): Selenocysteine
  MOD_RES (375)..(375): Selenocysteine
  MOD_RES (390)..(390): Selenocysteine
  MOD_RES (428)..(428): Selenocysteine
  MOD_RES (472)..(472): Selenocysteine
  MOD_RES (511)..(511): Selenocysteine
  MOD_RES (521)..(522): Selenocysteine
  MOD_RES (535)..(535): Selenocysteine
  MOD_RES (593)..(594): Selenocysteine
  MOD_RES (596)..(596): Selenocysteine
  MOD_RES (602)..(602): Selenocysteine
  MOD_RES (614)..(614): Selenocysteine
  MOD_RES (637)..(637): Selenocysteine
MRAPGAGAASVVSLALLWLLGLPWXWSAAAALGVYVGSGGWRFLRIVCKXARRDLFGLSVLIRVRLELRRHQRAGHXIPRIFQAVVQRQPERLALVDAGXGECWXFAQLDAYSNAVANLFRQLGFAPGDVVAIFLEGRPEFVGLWLGLAKAGMEAALLNVNLRREPLAFCLGXSGAKALIFGGEMVAAVAEVSGHLGKSLIKFCSGDLGPEGILPDXHLLDPLLKEASXAPLAQIPSKGMDDRLFYIYXSGXXGLPKAAIVVHSRYYRMAAFGHHAYRMQAADVLYDCLPLYHSAGNIIGVGQCLIYGLXVVLRKKFSASRFWDDCIKYNCXVVQYIGEICRYLLKQPVREAERRHRVRLAVGNGLRPAIWEEFXERFGVRQIGEFYGAXECNCSIANMDGKVGSCGFNSRILPHVYPIRLVKVNEDXMELLRDAQGLCIPCQAGEPGLLVGQINQQDPLRRFDGYVSESAXSKKIAHSVFSKGDSAYLSGDVLVMDELGYMYFRDRSGDXFRWRGENVSXXEVEGVLSRLLGQXDVAVYGVAVPGVEGKAGMAAVADPHSLLDPNAIYQELQKVLAPYARPIFLRLLPQVDXXGXFKIQKXRLQREGFDPRQXSDRLFFLDLKQGHYLPLNEAVYXRICSGAFAL

SEQ ID NO: 25565 - protein, 224 aa, Homo sapiens
  MOD_RES (25)..(25): Selenocysteine
  MOD_RES (50)..(50): Selenocysteine
  MOD_RES (77)..(77): Selenocysteine
  MOD_RES (100)..(100): Selenocysteine
  MOD_RES (105)..(105): Selenocysteine
  MOD_RES (173)..(173): Selenocysteine
  MOD_RES (222)..(222): Selenocysteine
MRAPGAGAASVVSLALLWLLGLPWXWSAAAALGVYVGSGGWRFLRIVCKXARRDLFGLSVLIRVRLELRRHQRAGHXIPRIFQAVVQRQPERLALVDAGXGECWXFAQLDAYSNAVANLFRQLGFAPGDVVAIFLEGRPEFVGLWLGLAKAGMEAALLNVNLRREPLAFCLGXSGAKALIFGGEMVAGEARRGHQVGGDPGLAPGRAGRCCAPGLGRRPPWXWA

SEQ ID NO: 25566 - protein, 96 aa, Homo sapiens
  MOD_RES (25)..(25): Selenocysteine
  MOD_RES (50)..(50): Selenocysteine
MRAPGAGAASVVSLALLWLLGLPWXWSAAAALGVYVGSGGWRFLRIVCKXARRDLLSSFLHLHVGDHRAAQGCHCRAQQVLPHGSLRPPRLPHAGG

SEQ ID NO: 25567 - protein, 467 aa, Homo sapiens
  MOD_RES (2)..(2): Selenocysteine
  MOD_RES (7)..(8): Selenocysteine
  MOD_RES (38)..(38): Selenocysteine
  MOD_RES (50)..(50): Selenocysteine
  MOD_RES (70)..(70): Selenocysteine
  MOD_RES (73)..(74): Selenocysteine
  MOD_RES (131)..(131): Selenocysteine
  MOD_RES (153)..(153): Selenocysteine
  MOD_RES (196)..(196): Selenocysteine
  MOD_RES (211)..(211): Selenocysteine
  MOD_RES (249)..(249): Selenocysteine
  MOD_RES (293)..(293): Selenocysteine
  MOD_RES (332)..(332): Selenocysteine
  MOD_RES (342)..(343): Selenocysteine
  MOD_RES (356)..(356): Selenocysteine
  MOD_RES (414)..(415): Selenocysteine
  MOD_RES (417)..(417): Selenocysteine
  MOD_RES (423)..(423): Selenocysteine
  MOD_RES (435)..(435): Selenocysteine
  MOD_RES (458)..(458): Selenocysteine
MXHVLGXXAVAEVSGHLGKSLIKFCSGDLGPEGILPDXHLLDPLLKEASXAPLAQIPSKGMDDRLFYIYXSGXXGLPKAAIVVHSRYYRMAAFGHHAYRMQAADVLYDCLPLYHSAGNIIGVGQCLIYGLXVVLRKKFSASRFWDDCIKYNCXVVQYIGEICRYLLKQPVREAERRHRVRLAVGNGLRPAIWEEFXERFGVRQIGEFYGAXECNCSIANMDGKVGSCGFNSRILPHVYPIRLVKVNEDXMELLRDAQGLCIPCQAGEPGLLVGQINQQDPLRRFDGYVSESAXSKKIAHSVFSKGDSAYLSGDVLVMDELGYMYFRDRSGDXFRWRGENVSXXEVEGVLSRLLGQXDVAVYGVAVPGVEGKAGMAAVADPHSLLDPNAIYQELQKVLAPYARPIFLRLLPQVDXXGXFKIQKXRLQREGFDPRQXSDRLFFLDLKQGHYLPLNEAVYXRICSGAFAL

SEQ ID NO: 25568 - protein, 166 aa, Homo sapiens
  MOD_RES (1)..(1): Any amino acid
  MOD_RES (41)..(41): Selenocysteine
  MOD_RES (80)..(80): Selenocysteine
  MOD_RES (90)..(91): Selenocysteine
  MOD_RES (104)..(104): Selenocysteine
  MOD_RES (116)..(116): Selenocysteine
  MOD_RES (122)..(122): Selenocysteine
  MOD_RES (134)..(134): Selenocysteine
  MOD_RES (157)..(157): Selenocysteine
XRDAQGLCIPCQAGEPGLLVGQINQQDPLRRFDGYVSESAXSKKIAHSVFSKGDSAYLSGDVLVMDELGYMYFRDRSGDXFRWRGENVSXXEVEGVLSRLLGQXDVAVYGVAVPGXFKIQKXRLQREGFDPRQXSDRLFFLDLKQGHYLPLNEAVYXRICSGAFAL

SEQ ID NO: 25569 - protein, 387 aa, Homo sapiens
  MOD_RES (36)..(36): Selenocysteine
  MOD_RES (39)..(39): Selenocysteine
  MOD_RES (73)..(73): Selenocysteine
  MOD_RES (75)..(75): Selenocysteine
  MOD_RES (83)..(83): Selenocysteine
  MOD_RES (96)..(96): Selenocysteine
  MOD_RES (112)..(112): Selenocysteine
  MOD_RES (116)..(116): Selenocysteine
  MOD_RES (170)..(170): Selenocysteine
  MOD_RES (188)..(188): Selenocysteine
  MOD_RES (213)..(213): Selenocysteine
  MOD_RES (244)..(244): Selenocysteine
  MOD_RES (252)..(252): Selenocysteine
  MOD_RES (254)..(254): Selenocysteine
  MOD_RES (261)..(261): Selenocysteine
  MOD_RES (266)..(266): Selenocysteine
  MOD_RES (306)..(306): Selenocysteine
  MOD_RES (324)..(324): Selenocysteine
  MOD_RES (333)..(333): Selenocysteine
  MOD_RES (349)..(349): Selenocysteine
  MOD_RES (374)..(374): Selenocysteine
MERPPPRAAGRDPSALRAEAPWLRAEGPGPRAAPVXVPXPPQGSSVGGGFAGLEFARPQESEPRASDLGAPRXWXGAAAGPRXPSAHIPVPAQRAXPGKARLDEVMAAAALXSLSXSPLLLGAPVAAFSPEPGLEPWKEALVRPPGSYSSSSNSGDWGWDLASDQSSPSXPSPPLPPEAAHFLFGEPXLRKRKSPAQVMFQCLWKSCGKVLSXASAMQRHIRLVHLGRQAEPEQSDGEEDFYYXELDVGVDXLXDGLSSLXPVSPXASMPPAFPRLELPELLEPPALPSPLRPPAPPLPPPPVLSXVANPQSCHSDRVYQGCLXPARLEPQPXEVGACPPALSSRIGVXLRKPRGDAKKCRKVYGMERRDLWCXACRWKKACQRFLD

SEQ ID NO: 25570 - protein, 81 aa, Homo sapiens
  MOD_RES (14)..(14): Selenocysteine
  MOD_RES (21)..(21): Selenocysteine
  MOD_RES (53)..(53): Selenocysteine
  MOD_RES (58)..(58): Selenocysteine
  MOD_RES (68)..(68): Selenocysteine
  MOD_RES (74)..(74): Selenocysteine
MEQQDQSMKEGRLXLVLALAXLIAAFGSSFQYGYNVAAVNSPALLMQQFYNEXYYGRXGEFMEDFPLXLLWSVXVSMFPFG

SEQ ID NO: 25571 - protein, 139 aa, Homo sapiens
  MOD_RES (14)..(14): Selenocysteine
  MOD_RES (21)..(21): Selenocysteine
  MOD_RES (53)..(53): Selenocysteine
  MOD_RES (58)..(58): Selenocysteine
  MOD_RES (68)..(68): Selenocysteine
  MOD_RES (74)..(74): Selenocysteine
  MOD_RES (123)..(123): Selenocysteine
MEQQDQSMKEGRLXLVLALAXLIAAFGSSFQYGYNVAAVNSPALLMQQFYNEXYYGRXGEFMEDFPLXLLWSVXVSMFPFGGFIGSLLVGPLVNKFGRKGALLFNNIFSIVPAILMGCSRVAXSFELIIISRLLVGICA

SEQ ID NO: 25572 - protein, 166 aa, Homo sapiens
  MOD_RES (14)..(14): Selenocysteine
  MOD_RES (21)..(21): Selenocysteine
  MOD_RES (53)..(53): Selenocysteine
  MOD_RES (58)..(58): Selenocysteine
  MOD_RES (68)..(68): Selenocysteine
  MOD_RES (74)..(74): Selenocysteine
  MOD_RES (123)..(123): Selenocysteine
MEQQDQSMKEGRLXLVLALAXLIAAFGSSFQYGYNVAAVNSPALLMQQFYNEXYYGRXGEFMEDFPLXLLWSVXVSMFPFGGFIGSLLVGPLVNKFGRKGALLFNNIFSIVPAILMGCSRVAXSFELIIISRLLVGICAGVSSNVVPMYLGELAPKNLRGALGVVP

SEQ ID NO: 25573 - protein, 190 aa, Homo sapiens
  MOD_RES (14)..(14): Selenocysteine
  MOD_RES (21)..(21): Selenocysteine
  MOD_RES (53)..(53): Selenocysteine
  MOD_RES (58)..(58): Selenocysteine
  MOD_RES (68)..(68): Selenocysteine
  MOD_RES (74)..(74): Selenocysteine
  MOD_RES (123)..(123): Selenocysteine
  MOD_RES (171)..(171): Selenocysteine
MEQQDQSMKEGRLXLVLALAXLIAAFGSSFQYGYNVAAVNSPALLMQQFYNEXYYGRXGEFMEDFPLXLLWSVXVSMFPFGGFIGSLLVGPLVNKFGRKGALLFNNIFSIVPAILMGCSRVAXSFELIIISRLLVGICAGVSSNVVPMYLGELAPKNLRGALGVVPQLFIXVGILVAQIFGLRNLLANVD

SEQ ID NO: 25574 - protein, 244 aa, Homo sapiens
  MOD_RES (14)..(14): Selenocysteine
  MOD_RES (21)..(21): Selenocysteine
  MOD_RES (53)..(53): Selenocysteine
  MOD_RES (58)..(58): Selenocysteine
  MOD_RES (68)..(68): Selenocysteine
  MOD_RES (74)..(74): Selenocysteine
  MOD_RES (123)..(123): Selenocysteine
  MOD_RES (171)..(171): Selenocysteine
  MOD_RES (195)..(195): Selenocysteine
  MOD_RES (204)..(206): Selenocysteine
  MOD_RES (220)..(220): Selenocysteine
  MOD_RES (230)..(230): Selenocysteine
  MOD_RES (244)..(244): Selenocysteine
MEQQDQSMKEGRLXLVLALAXLIAAFGSSFQYGYNVAAVNSPALLMQQFYNEXYYGRXGEFMEDFPLXLLWSVXVSMFPFGGFIGSLLVGPLVNKFGRKGALLFNNIFSIVPAILMGCSRVAXSFELIIISRLLVGICAGVSSNVVPMYLGELAPKNLRGALGVVPQLFIXVGILVAQIFGLRNLLANVDGEFRXSREHPHPFXXXLGPLLVFQSHHHRXGLSADWSLLXGWMSLGGPSCPEPX

SEQ ID NO: 25575 - protein, 501 aa, Homo sapiens
  MOD_RES (14)..(14): Selenocysteine
  MOD_RES (21)..(21): Selenocysteine
  MOD_RES (53)..(53): Selenocysteine
  MOD_RES (58)..(58): Selenocysteine
  MOD_RES (68)..(68): Selenocysteine
  MOD_RES (74)..(74): Selenocysteine
  MOD_RES (123)..(123): Selenocysteine
  MOD_RES (171)..(171): Selenocysteine
  MOD_RES (199)..(199): Selenocysteine
  MOD_RES (236)..(236): Selenocysteine
  MOD_RES (318)..(318): Selenocysteine
  MOD_RES (321)..(321): Selenocysteine
  MOD_RES (329)..(329): Selenocysteine
  MOD_RES (360)..(360): Selenocysteine
  MOD_RES (368)..(368): Selenocysteine
  MOD_RES (400)..(400): Selenocysteine
  MOD_RES (425)..(425): Selenocysteine
  MOD_RES (452)..(453): Selenocysteine
  MOD_RES (463)..(463): Selenocysteine
  MOD_RES (467)..(467): Selenocysteine
  MOD_RES (476)..(476): Selenocysteine
  MOD_RES (498)..(498): Selenocysteine
MEQQDQSMKEGRLXLVLALAXLIAAFGSSFQYGYNVAAVNSPALLMQQFYNEXYYGRXGEFMEDFPLXLLWSVXVSMFPFGGFIGSLLVGPLVNKFGRKGALLFNNIFSIVPAILMGCSRVAXSFELIIISRLLVGICAGVSSNVVPMYLGELAPKNLRGALGVVPQLFIXVGILVAQIFGLRNLLANVDGWPILLGLXGVPAALQLLLLPFFPESPRYLLIQKKDEAAAKKALQXLRGWDSVDREVAEIRQEDEAEKAAGFISVLKLFRMRSLRWQLLSIIVLMGGQQLSGVNAIYYYADQIYLSAGVPEEHVQYVXAGXGAVNVVMXFCAVFVVELLGRRLLLLLGFSICLIACCVLXAALALQDXVSWMPYISIVCVISYVIGHALGPSPIPALLIXEIFLQSSRPSAFMVGGSVHWLSNFXVGLIFPFIQEGLGPYSFIVFAVICLLXXIYIFLIVPEXKAKXFIEINQIFXKMNKVSEVYPEKEELKELPPVXSEQ

SEQ ID NO: 25576 - protein, 214 aa, Homo sapiens
  MOD_RES (18)..(18): Selenocysteine
  MOD_RES (43)..(43): Selenocysteine
  MOD_RES (70)..(70): Selenocysteine
  MOD_RES (80)..(80): Selenocysteine
  MOD_RES (147)..(147): Selenocysteine
  MOD_RES (153)..(153): Selenocysteine
  MOD_RES (162)..(162): Selenocysteine
  MOD_RES (192)..(192): Selenocysteine
  MOD_RES (199)..(199): Selenocysteine
  MOD_RES (203)..(203): Selenocysteine
  MOD_RES (208)..(208): Selenocysteine
MAFQQLSGVNAVMFYAEXIFEEAKFKDSSLASVVVGVIQVLFXAVAALIMDRAGRRLLLVLSGVVMVFSXSAFGAYFKLXQGGPGNSSHVAISAPVSAQPVDASVGLAWLAVGSMCLFIAGFAVGWGPIPWLLMSEIFPLHVKGVAXGICVLXNWLMAFLVXKEFSSLMEVLRPYGAFWLASAFCIFSVLFXLFCVPEXKGKXLEQIXAHFEGR

SEQ ID NO: 25577 - protein, 241 aa, Homo sapiens
  MOD_RES (2)..(2): Selenocysteine
  MOD_RES (70)..(70): Selenocysteine
  MOD_RES (76)..(76): Selenocysteine
  MOD_RES (120)..(120): Selenocysteine
  MOD_RES (145)..(145): Selenocysteine
  MOD_RES (172)..(172): Selenocysteine
  MOD_RES (182)..(182): Selenocysteine
MXCSLGKVYISEIAYPAVRGLLGSCVQLMVVVGILLAYLAGWVLEWRWLAVLGCVPPSLMLLLMCFMPEXPRFLLXQHRRQEAMAALRFLWGSEQGWEDPPIGAEQQLSGVNAVMFYAEXIFEEAKFKDSSLASVVVGVIQVLFXAVAALIMDRAGRRLLLVLSGVVMVFSXSAFGAYFKLXQGGPGNSSHVAISAPVSAQPVDASVGLAWLAVGSMCLFIAGFAVGWGPIPWLLMSEIFP

SEQ ID NO: 25578 - protein, 267 aa, Homo sapiens
  MOD_RES (2)..(2): Selenocysteine
  MOD_RES (70)..(70): Selenocysteine
  MOD_RES (76)..(76): Selenocysteine
  MOD_RES (146)..(146): Selenocysteine
  MOD_RES (171)..(171): Selenocysteine
  MOD_RES (198)..(198): Selenocysteine
  MOD_RES (208)..(208): Selenocysteine
MXCSLGKVYISEIAYPAVRGLLGSCVQLMVVVGILLAYLAGWVLEWRWLAVLGCVPPSLMLLLMCFMPEXPRFLLXQHRRQEAMAALRFLWGSEQGWEDPPIGAEQSFHLALLRQPGIYKPFIIGVSLMAFQQLSGVNAVMFYAEXIFEEAKFKDSSLASVVVGVIQVLFXAVAALIMDRAGRRLLLVLSGVVMVFSXSAFGAYFKLXQGGPGNSSHVAISAPVSAQPVDASVGLAWLAVGSMCLFIAGFAVGWGPIPWLLMSEIFP

SEQ ID NO: 25579 - protein, 411 aa, Homo sapiens
  MOD_RES (2)..(2): Selenocysteine
  MOD_RES (9)..(9): Selenocysteine
  MOD_RES (77)..(77): Selenocysteine
  MOD_RES (115)..(115): Selenocysteine
  MOD_RES (130)..(130): Selenocysteine
  MOD_RES (205)..(205): Selenocysteine
  MOD_RES (211)..(211): Selenocysteine
  MOD_RES (281)..(281): Selenocysteine
  MOD_RES (306)..(306): Selenocysteine
  MOD_RES (333)..(333): Selenocysteine
  MOD_RES (343)..(343): Selenocysteine
MXPEDPEEXQPLLGPPGGSAPRGRRVFLAAFAAALGPLSFGFALGYSSPAIPSLQRAAPPAPRLDDAAASWFGAVVXLGAAAGGVLGGWLVDRAGRKLSLLLCSVPFVAGFAVIXAAQDVWMLLGGRLLXGLACGVASLVAPVYISEIAYPAVRGLLGSCVQLMVVVGILLAYLAGWVLEWRWLAVLGCVPPSLMLLLMCFMPEXPRFLLXQHRRQEAMAALRFLWGSEQGWEDPPIGAEQSFHLALLRQPGIYKPFIIGVSLMAFQQLSGVNAVMFYAEXIFEEAKFKDSSLASVVVGVIQVLFXAVAALIMDRAGRRLLLVLSGVVMVFSXSAFGAYFKLXQGGPGNSSHVAISAPVSAQPVDASVGLAWLAVGSMCLFIAGGPQALWSLLACLRFLHLQCPFHFVLCP

SEQ ID NO: 25580 - protein, 477 aa, Homo sapiens
  MOD_RES (2)..(2): Selenocysteine
  MOD_RES (9)..(9): Selenocysteine
  MOD_RES (77)..(77): Selenocysteine
  MOD_RES (115)..(115): Selenocysteine
  MOD_RES (130)..(130): Selenocysteine
  MOD_RES (205)..(205): Selenocysteine
  MOD_RES (211)..(211): Selenocysteine
  MOD_RES (281)..(281): Selenocysteine
  MOD_RES (306)..(306): Selenocysteine
  MOD_RES (333)..(333): Selenocysteine
  MOD_RES (343)..(343): Selenocysteine
  MOD_RES (410)..(410): Selenocysteine
  MOD_RES (416)..(416): Selenocysteine
  MOD_RES (425)..(425): Selenocysteine
  MOD_RES (455)..(455): Selenocysteine
  MOD_RES (462)..(462): Selenocysteine
  MOD_RES (466)..(466): Selenocysteine
  MOD_RES (471)..(471): Selenocysteine
MXPEDPEEXQPLLGPPGGSAPRGRRVFLAAFAAALGPLSFGFALGYSSPAIPSLQRAAPPAPRLDDAAASWFGAVVXLGAAAGGVLGGWLVDRAGRKLSLLLCSVPFVAGFAVIXAAQDVWMLLGGRLLXGLACGVASLVAPVYISEIAYPAVRGLLGSCVQLMVVVGILLAYLAGWVLEWRWLAVLGCVPPSLMLLLMCFMPEXPRFLLXQHRRQEAMAALRFLWGSEQGWEDPPIGAEQSFHLALLRQPGIYKPFIIGVSLMAFQQLSGVNAVMFYAEXIFEEAKFKDSSLASVVVGVIQVLFXAVAALIMDRAGRRLLLVLSGVVMVFSXSAFGAYFKLXQGGPGNSSHVAISAPVSAQPVDASVGLAWLAVGSMCLFIAGFAVGWGPIPWLLMSEIFPLHVKGVAXGICVLXNWLMAFLVXKEFSSLMEVLRPYGAFWLASAFCIFSVLFXLFCVPEXKGKXLEQIXAHFEGR

SEQ ID NO: 25581 - protein, 256 aa, Homo sapiens
  MOD_RES (2)..(2): Selenocysteine
  MOD_RES (9)..(9): Selenocysteine
  MOD_RES (136)..(136): Selenocysteine
  MOD_RES (142)..(142): Selenocysteine
  MOD_RES (212)..(212): Selenocysteine
  MOD_RES (237)..(237): Selenocysteine
MXPEDPEEXQPLLGPPGGSAPRGRRVFLAAFAAALGPLSFGFALGYSSPAIPSLQRAAPPAPRLDDAAASWFGVYISEIAYPAVRGLLGSCVQLMVVVGILLAYLAGWVLEWRWLAVLGCVPPSLMLLLMCFMPEXPRFLLXQHRRQEAMAALRFLWGSEQGWEDPPIGAEQSFHLALLRQPGIYKPFIIGVSLMAFQQLSGVNAVMFYAEXIFEEAKFKDSSLASVVVGVIQVLFXAVAALIMDRAGRRLLLVLS

SEQ ID NO: 25582 - protein, 265 aa, Homo sapiens
  MOD_RES (42)..(42): Selenocysteine
  MOD_RES (48)..(48): Selenocysteine
  MOD_RES (118)..(118): Selenocysteine
  MOD_RES (143)..(143): Selenocysteine
  MOD_RES (170)..(170): Selenocysteine
  MOD_RES (180)..(180): Selenocysteine
  MOD_RES (247)..(247): Selenocysteine
  MOD_RES (253)..(253): Selenocysteine
  MOD_RES (262)..(262): Selenocysteine
MVVVGILLAYLAGWVLEWRWLAVLGCVPPSLMLLLMCFMPEXPRFLLXQHRRQEAMAALRFLWGSEQGWEDPPIGAEQSFHLALLRQPGIYKPFIIGVSLMAFQQLSGVNAVMFYAEXIFEEAKFKDSSLASVVVGVIQVLFXAVAALIMDRAGRRLLLVLSGVVMVFSXSAFGAYFKLXQGGPGNSSHVAISAPVSAQPVDASVGLAWLAVGSMCLFIAGFAVGWGPIPWLLMSEIFPLHVKGVAXGICVLXNWLMAFLVXKEF

SEQ ID NO: 25583 - protein, 314 aa, Homo sapiens
  MOD_RES (42)..(42): Selenocysteine
  MOD_RES (48)..(48): Selenocysteine
  MOD_RES (118)..(118): Selenocysteine
  MOD_RES (143)..(143): Selenocysteine
  MOD_RES (170)..(170): Selenocysteine
  MOD_RES (180)..(180): Selenocysteine
  MOD_RES (247)..(247): Selenocysteine
  MOD_RES (253)..(253): Selenocysteine
  MOD_RES (262)..(262): Selenocysteine
  MOD_RES (292)..(292): Selenocysteine
  MOD_RES (299)..(299): Selenocysteine
  MOD_RES (303)..(303): Selenocysteine
  MOD_RES (308)..(308): Selenocysteine
MVVVGILLAYLAGWVLEWRWLAVLGCVPPSLMLLLMCFMPEXPRFLLXQHRRQEAMAALRFLWGSEQGWEDPPIGAEQSFHLALLRQPGIYKPFIIGVSLMAFQQLSGVNAVMFYAEXIFEEAKFKDSSLASVVVGVIQVLFXAVAALIMDRAGRRLLLVLSGVVMVFSXSAFGAYFKLXQGGPGNSSHVAISAPVSAQPVDASVGLAWLAVGSMCLFIAGFAVGWGPIPWLLMSEIFPLHVKGVAXGICVLXNWLMAFLVXKEFSSLMEVLRPYGAFWLASAFCIFSVLFXLFCVPEXKGKXLEQIXAHFEGR

SEQ ID NO: 25584 - protein, 276 aa, Homo sapiens
  MOD_RES (44)..(44): Selenocysteine
  MOD_RES (50)..(50): Selenocysteine
  MOD_RES (120)..(120): Selenocysteine
  MOD_RES (145)..(145): Selenocysteine
  MOD_RES (172)..(172): Selenocysteine
  MOD_RES (182)..(182): Selenocysteine
  MOD_RES (249)..(249): Selenocysteine
  MOD_RES (255)..(255): Selenocysteine
  MOD_RES (264)..(264): Selenocysteine
QLMVVVGILLAYLAGWVLEWRWLAVLGCVPPSLMLLLMCFMPEXPRFLLXQHRRQEAMAALRFLWGSEQGWEDPPIGAEQSFHLALLRQPGIYKPFIIGVSLMAFQQLSGVNAVMFYAEXIFEEAKFKDSSLASVVVGVIQVLFXAVAALIMDRAGRRLLLVLSGVVMVFSXSAFGAYFKLXQGGPGNSSHVAISAPVSAQPVDASVGLAWLAVGSMCLFIAGFAVGWGPIPWLLMSEIFPLHVKGVAXGICVLXNWLMAFLVXKEFSSLMLLLLL

SEQ ID NO: 25585 - protein, 169 aa, Homo sapiens
  MOD_RES (1)..(1): Any amino acid
  MOD_RES (115)..(115): Selenocysteine
  MOD_RES (121)..(121): Selenocysteine
  MOD_RES (165)..(165): Selenocysteine
XGRRVFLAAFAAALGPLSFGFALGYSSPAIPSLQRAAPPAPRLDDAAASWFGVYISEIAYPAVRGLLGSCVQLMVVVGILLAYLAGWVLEWRWLAVLGCVPPSLMLLLMCFMPEXPRFLLXQHRRQEAMAALRFLWGSEQGWEDPPIGAEQQLSGVNAVMFYAEXIFEE

SEQ ID NO: 25586 - protein, 119 aa, Homo sapiens
  MOD_RES (43)..(43): Selenocysteine
  MOD_RES (60)..(60): Selenocysteine
  MOD_RES (69)..(69): Selenocysteine
  MOD_RES (80)..(80): Selenocysteine
  MOD_RES (91)..(91): Selenocysteine
  MOD_RES (97)..(97): Selenocysteine
MLPGLAAAAAHRCSWSSLCRLRLRCRAAACNPSDRQEWQNLVXFGSFSNMVPCSHPYIGXLSQVKLYSXNVQKEGQGSQXLRVEKVPSFEXAEGIGXELKAPLKQEPLQVRAQERNNGK

SEQ ID NO: 25587 - protein, 568 aa, Homo sapiens
  MOD_RES (43)..(43): Selenocysteine
  MOD_RES (60)..(60): Selenocysteine
  MOD_RES (69)..(69): Selenocysteine
  MOD_RES (80)..(80): Selenocysteine
  MOD_RES (91)..(91): Selenocysteine
  MOD_RES (97)..(97): Selenocysteine
  MOD_RES (126)..(126): Selenocysteine
  MOD_RES (132)..(132): Selenocysteine
  MOD_RES (162)..(162): Selenocysteine
  MOD_RES (166)..(166): Selenocysteine
  MOD_RES (222)..(222): Selenocysteine
  MOD_RES (228)..(228): Selenocysteine
  MOD_RES (261)..(261): Selenocysteine
  MOD_RES (277)..(277): Selenocysteine
  MOD_RES (293)..(293): Selenocysteine
  MOD_RES (359)..(359): Selenocysteine
  MOD_RES (390)..(390): Selenocysteine
  MOD_RES (398)..(398): Selenocysteine
  MOD_RES (409)..(409): Selenocysteine
  MOD_RES (414)..(414): Selenocysteine
  MOD_RES (417)..(417): Selenocysteine
  MOD_RES (432)..(432): Selenocysteine
  MOD_RES (444)..(444): Selenocysteine
  MOD_RES (446)..(446): Selenocysteine
  MOD_RES (463)..(463): Selenocysteine
  MOD_RES (481)..(481): Selenocysteine
  MOD_RES (502)..(502): Selenocysteine
  MOD_RES (523)..(523): Selenocysteine
  MOD_RES (529)..(529): Selenocysteine
  MOD_RES (541)..(541): Selenocysteine
MLPGLAAAAAHRCSWSSLCRLRLRCRAAACNPSDRQEWQNLVXFGSFSNMVPCSHPYIGXLSQVKLYSXNVQKEGQGSQXLRVEKVPSFEXAEGIGXELKAPLKQEPLQVRVKAVLKKREYGSKYXQNNFIXGVRAINEFCLKSSDLEQLRKIRRRSPHEDXESFXVYLRSDVEAKSLEVWGSPEALAREKKLRKEAEIEYRERLFRNQKILREYRDFLGNXKPRSRXASVFFKGPGKVVMVAICINGLNCFFKFLAWIYXGSASMFSEAIHSLSDXCNQGLLALGISKSVQXPDPSHPYGFSNMRYISSLISGVGIFMMGAGLSWYHGVMGLLHPQPIESLLWAYCILAGSLVSEGAXLLVAVNELRRNARAKGMSFYKYVMESRDPSXNVILLEDXAAVLGVIIAAXCMGLXSIXGNPLYDSLGSLGVGXLLGMVSAFLIYXNXEALLGRSIQPEQVQRLXELLENDPSVRAIHDVKAXDLGLGKVRFKAEVDFDGRVVXRSYLEKQDFDQMLQEIQEVKXPEELEXFMLKHGENIIDXLGAEVDRLEKELKKRNPEVRHVDLEIL

SEQ ID NO: 25588 - protein, 549 aa, Homo sapiens
  MOD_RES (4)..(4): Selenocysteine
  MOD_RES (56)..(56): Selenocysteine
  MOD_RES (58)..(58): Selenocysteine
  MOD_RES (107)..(107): Selenocysteine
  MOD_RES (147)..(147): Selenocysteine
  MOD_RES (160)..(160): Selenocysteine
  MOD_RES (169)..(169): Selenocysteine
  MOD_RES (173)..(173): Selenocysteine
  MOD_RES (180)..(180): Selenocysteine
  MOD_RES (192)..(192): Selenocysteine
  MOD_RES (203)..(203): Selenocysteine
  MOD_RES (215)..(215): Selenocysteine
  MOD_RES (222)..(222): Selenocysteine
  MOD_RES (256)..(256): Selenocysteine
  MOD_RES (266)..(266): Selenocysteine
  MOD_RES (271)..(273): Selenocysteine
  MOD_RES (291)..(291): Selenocysteine
  MOD_RES (295)..(295): Selenocysteine
  MOD_RES (297)..(297): Selenocysteine
  MOD_RES (312)..(312): Selenocysteine
  MOD_RES (319)..(319): Selenocysteine
  MOD_RES (331)..(331): Selenocysteine
  MOD_RES (367)..(367): Selenocysteine
  MOD_RES (375)..(375): Selenocysteine
  MOD_RES (397)..(397): Selenocysteine
  MOD_RES (424)..(424): Selenocysteine
  MOD_RES (447)..(447): Selenocysteine
  MOD_RES (450)..(450): Selenocysteine
  MOD_RES (454)..(454): Selenocysteine
  MOD_RES (465)..(465): Selenocysteine
  MOD_RES (475)..(475): Selenocysteine
  MOD_RES (489)..(489): Selenocysteine
  MOD_RES (505)..(505): Selenocysteine
MSPXISHKDSSRQRRPGNFSHSLDMKSGPLPPGGWDDSHLDSAGREGDREALLGDXGXGDFLKAPQSFRAELSSILLLLFLYVLQGIPLGLAGSIPLILQSKNVSYXDQAFFSFVFWPFSLKLLWAPLVDAVYVKNFGRRKSWLVPXQYILGLFMIYLSXQVDRLLGNXDDRXPDVIALXVAFFLFEFLAAXQDIAVDGWALXMLSRENVGYASXCNSVGQXAGYFLGNVLFLALESADFCNKYLRFQPQPRGIVXLSDFLFFWGXVFLIXXXLVALLKKENEVSVVKEEXQGIXDXYKLLFAIIKMPAVLXFCLLILXAKIGFSAADAVXGLKLVEEGVPKEHLALLAVPMVPLQIILPLIISKYXAGPQPLNXFYKAMPYRLLLGLEYALLVWWXPKVEHQGGFPIYYYIVVLLSYALHQVXVYSMYVSIMAFNAKVSDPLIGGXYMXLLNXVSNLGGNWPSXVALWLVDPLXVKECVGASNQNCRXPDAVELCKKLGGSCVXALDGYYVESIICVFIGFGWWFFLGPKFKKLQDEGSSSWKCKRNN

SEQ ID NO: 25589 - protein, 185 aa, Homo sapiens
  MOD_RES (3)..(3): Selenocysteine
  MOD_RES (8)..(10): Selenocysteine
  MOD_RES (28)..(28): Selenocysteine
  MOD_RES (32)..(32): Selenocysteine
  MOD_RES (34)..(34): Selenocysteine
  MOD_RES (49)..(49): Selenocysteine
  MOD_RES (56)..(56): Selenocysteine
  MOD_RES (60)..(60): Selenocysteine
  MOD_RES (83)..(83): Selenocysteine
  MOD_RES (86)..(86): Selenocysteine
  MOD_RES (90)..(90): Selenocysteine
  MOD_RES (101)..(101): Selenocysteine
  MOD_RES (111)..(111): Selenocysteine
  MOD_RES (125)..(125): Selenocysteine
  MOD_RES (141)..(141): Selenocysteine
WGXVFLIXXXLVALLKKENEVSVVKEEXQGIXDXYKLLFAIIKMPAVLXFCLLILXAKVXVYSMYVSIMAFNAKVSDPLIGGXYMXLLNXVSNLGGNWPSXVALWLVDPLXVKECVGASNQNCRXPDAVELCKKLGGSCVXALDGYYVESIICVFIGFGWWFFLGPKFKKLQDEGSSSWKCKRNN

SEQ ID NO: 25590 - protein, 269 aa, Homo sapiens
  MOD_RES (1)..(1): Any amino acid
  MOD_RES (5)..(5): Selenocysteine
  MOD_RES (12)..(12): Selenocysteine
  MOD_RES (24)..(24): Selenocysteine
  MOD_RES (35)..(35): Selenocysteine
  MOD_RES (51)..(51): Selenocysteine
  MOD_RES (87)..(87): Selenocysteine
  MOD_RES (95)..(95): Selenocysteine
  MOD_RES (117)..(117): Selenocysteine
  MOD_RES (144)..(144): Selenocysteine
  MOD_RES (167)..(167): Selenocysteine
  MOD_RES (170)..(170): Selenocysteine
  MOD_RES (174)..(174): Selenocysteine
  MOD_RES (185)..(185): Selenocysteine
  MOD_RES (195)..(195): Selenocysteine
  MOD_RES (209)..(209): Selenocysteine
  MOD_RES (225)..(225): Selenocysteine
XDDRXPDVIALXVAFFLFEFLAAXQDIAVDGWALXMLSRENIGFSAADAVXGLKLVEEGVPKEHLALLAVPMVPLQIILPLIISKYXAGPQPLNXFYKAMPYRLLLGLEYALLVWWXPKVEHQGGFPIYYYIVVLLSYALHQVXVYSMYVSIMAFNAKVSDPLIGGXYMXLLNXVSNLGGNWPSXVALWLVDPLXVKECVGASNQNCRXPDAVELCKKLGGSCVXALDGYYVESIICVFIGFGWWFFLGPKFKKLQDEGSSSWKCKRNN

SEQ ID NO: 25591 - protein, 109 aa, Homo sapiens
  MOD_RES (1)..(1): Any amino acid
  MOD_RES (30)..(30): Selenocysteine
  MOD_RES (44)..(44): Selenocysteine
  MOD_RES (52)..(52): Selenocysteine
  MOD_RES (55)..(55): Selenocysteine
  MOD_RES (70)..(70): Selenocysteine
  MOD_RES (104)..(104): Selenocysteine
XGNVLFLALESADFCNKYLRFQPQPRGIVXLSDWFFSSRCCNRXEIGRRGSXQRXFSLIGSSNGSFADNXASDYQQIHCRSPAIKHILQSHALQIIAWVRICPXGLVDS

SEQ ID NO: 25592 - protein, 432 aa, Homo sapiens
  MOD_RES (23)..(23): Selenocysteine
  MOD_RES (32)..(32): Selenocysteine
  MOD_RES (68)..(68): Selenocysteine
  MOD_RES (98)..(98): Selenocysteine
  MOD_RES (103)..(104): Selenocysteine
  MOD_RES (117)..(117): Selenocysteine
  MOD_RES (125)..(125): Selenocysteine
  MOD_RES (135)..(135): Selenocysteine
  MOD_RES (141)..(141): Selenocysteine
  MOD_RES (143)..(143): Selenocysteine
  MOD_RES (150)..(150): Selenocysteine
  MOD_RES (211)..(211): Selenocysteine
  MOD_RES (242)..(242): Selenocysteine
  MOD_RES (244)..(244): Selenocysteine
  MOD_RES (267)..(268): Selenocysteine
  MOD_RES (285)..(285): Selenocysteine
  MOD_RES (314)..(314): Selenocysteine
  MOD_RES (328)..(328): Selenocysteine
  MOD_RES (358)..(358): Selenocysteine
  MOD_RES (368)..(368): Selenocysteine
  MOD_RES (372)..(372): Selenocysteine
  MOD_RES (389)..(389): Selenocysteine
  MOD_RES (391)..(391): Selenocysteine
MDARWWAVVVLAAFPSLGAGGEXPEAPPESWXQLWFFRFVVNAAGYASFMVPGYLLVQYFRRKNYLEXGRGLCFPLVKACVFGNEPKASDEVPLAPRXEAAEXXPMWQALKLLFCAXGLQVSYLXWGVLQERVMXRSYGAXAXSPGERFXDSQFLVLMNRVLALIVAGLSCVLCKQPRHGAPMYRYSFASLSNVLSSWCQYEALKFVSFPXQVLAKASKVIPVMLMGKLVSRRSYEHWEYLXAXLISIGVSMFLLSSGPEPRSSPAXXLSGLILLAGYIAFDSFXSNWQDALFAYKMSSVQMMFGVNFFSCLFXVGSLLEQGALLEGXRFMGRHSEFAAHALLLSICSACGQLFIFYXIGQFGAAVFXIIMXLRQAFAILLSCLLYGHXVXVVGGLGVAVVFAALLLRVYARGRLKQRGKKAVPVESPVQKV

SEQ ID NO: 25593 - protein, 94 aa, Homo sapiens
  MOD_RES (23)..(23): Selenocysteine
  MOD_RES (32)..(32): Selenocysteine
  MOD_RES (68)..(68): Selenocysteine
  MOD_RES (93)..(93): Selenocysteine
MDARWWAVVVLAAFPSLGAGGEXPEAPPESWXQLWFFRFVVNAAGYASFMVPGYLLVQYFRRKNYLEXGVLSDLGCAAGKSDDPQLWGHSHIXG

SEQ ID NO: 25594 - protein, 339 aa, Homo sapiens
  MOD_RES (13)..(13): Selenocysteine
  MOD_RES (18)..(18): Selenocysteine
  MOD_RES (23)..(24): Selenocysteine
  MOD_RES (32)..(32): Selenocysteine
  MOD_RES (42)..(42): Selenocysteine
  MOD_RES (48)..(48): Selenocysteine
  MOD_RES (50)..(50): Selenocysteine
  MOD_RES (57)..(57): Selenocysteine
  MOD_RES (118)..(118): Selenocysteine
  MOD_RES (149)..(149): Selenocysteine
  MOD_RES (151)..(151): Selenocysteine
  MOD_RES (174)..(175): Selenocysteine
  MOD_RES (192)..(192): Selenocysteine
  MOD_RES (221)..(221): Selenocysteine
  MOD_RES (235)..(235): Selenocysteine
  MOD_RES (265)..(265): Selenocysteine
  MOD_RES (275)..(275): Selenocysteine
  MOD_RES (279)..(279): Selenocysteine
  MOD_RES (296)..(296): Selenocysteine
  MOD_RES (298)..(298): Selenocysteine
MLLAMPALWYLAXSWCSXSGGRXXWRPVSYLXWGVLQERVMXRSYGAXAXSPGERFXDSQFLVLMNRVLALIVAGLSCVLCKQPRHGAPMYRYSFASLSNVLSSWCQYEALKFVSFPXQVLAKASKVIPVMLMGKLVSRRSYEHWEYLXAXLISIGVSMFLLSSGPEPRSSPAXXLSGLILLAGYIAFDSFXSNWQDALFAYKMSSVQMMFGVNFFSCLFXVGSLLEQGALLEGXRFMGRHSEFAAHALLLSICSACGQLFIFYXIGQFGAAVFXIIMXLRQAFAILLSCLLYGHXVXVVGGLGVAVVFAALLLRVYARGRLKQRGKKAVPVESPVQKV

SEQ ID NO: 25595 - protein, 299 aa, Homo sapiens
  MOD_RES (2)..(2): Selenocysteine
  MOD_RES (8)..(8): Selenocysteine
  MOD_RES (10)..(10): Selenocysteine
  MOD_RES (17)..(17): Selenocysteine
  MOD_RES (78)..(78): Selenocysteine
  MOD_RES (109)..(109): Selenocysteine
  MOD_RES (111)..(111): Selenocysteine
  MOD_RES (134)..(135): Selenocysteine
  MOD_RES (152)..(152): Selenocysteine
  MOD_RES (181)..(181): Selenocysteine
  MOD_RES (195)..(195): Selenocysteine
  MOD_RES (225)..(225): Selenocysteine
  MOD_RES (235)..(235): Selenocysteine
  MOD_RES (239)..(239): Selenocysteine
  MOD_RES (256)..(256): Selenocysteine
  MOD_RES (258)..(258): Selenocysteine
MXRSYGAXAXSPGERFXDSQFLVLMNRVLALIVAGLSCVLCKQPRHGAPMYRYSFASLSNVLSSWCQYEALKFVSFPXQVLAKASKVIPVMLMGKLVSRRSYEHWEYLXAXLISIGVSMFLLSSGPEPRSSPAXXLSGLILLAGYIAFDSFXSNWQDALFAYKMSSVQMMFGVNFFSCLFXVGSLLEQGALLEGXRFMGRHSEFAAHALLLSICSACGQLFIFYXIGQFGAAVFXIIMXLRQAFAILLSCLLYGHXVXVVGGLGVAVVFAALLLRVYARGRLKQRGKKAVPVESPVQKV

SEQ ID NO: 25596 - protein, 383 aa, Homo sapiens
  MOD_RES (19)..(19): Selenocysteine
  MOD_RES (49)..(49): Selenocysteine
  MOD_RES (54)..(55): Selenocysteine
  MOD_RES (68)..(68): Selenocysteine
  MOD_RES (76)..(76): Selenocysteine
  MOD_RES (86)..(86): Selenocysteine
  MOD_RES (92)..(92): Selenocysteine
  MOD_RES (94)..(94): Selenocysteine
  MOD_RES (101)..(101): Selenocysteine
  MOD_RES (162)..(162): Selenocysteine
  MOD_RES (193)..(193): Selenocysteine
  MOD_RES (195)..(195): Selenocysteine
  MOD_RES (218)..(219): Selenocysteine
  MOD_RES (236)..(236): Selenocysteine
  MOD_RES (265)..(265): Selenocysteine
  MOD_RES (279)..(279): Selenocysteine
  MOD_RES (309)..(309): Selenocysteine
  MOD_RES (319)..(319): Selenocysteine
  MOD_RES (323)..(323): Selenocysteine
  MOD_RES (340)..(340): Selenocysteine
  MOD_RES (342)..(342): Selenocysteine
MVPGYLLVQYFRRKNYLEXGRGLCFPLVKACVFGNEPKASDEVPLAPRXEAAEXXPMWQALKLLFCAXGLQVSYLXWGVLQERVMXRSYGAXAXSPGERFXDSQFLVLMNRVLALIVAGLSCVLCKQPRHGAPMYRYSFASLSNVLSSWCQYEALKFVSFPXQVLAKASKVIPVMLMGKLVSRRSYEHWEYLXAXLISIGVSMFLLSSGPEPRSSPAXXLSGLILLAGYIAFDSFXSNWQDALFAYKMSSVQMMFGVNFFSCLFXVGSLLEQGALLEGXRFMGRHSEFAAHALLLSICSACGQLFIFYXIGQFGAAVFXIIMXLRQAFAILLSCLLYGHXVXVVGGLGVAVVFAALLLRVYARGRLKQRGKKAVPVESPVQKV

SEQ ID NO: 25597 - protein, 72 aa, Homo sapiens
  MOD_RES (4)..(4): Selenocysteine
  MOD_RES (38)..(38): Selenocysteine
  MOD_RES (59)..(59): Selenocysteine
  MOD_RES (64)..(64): Selenocysteine
  MOD_RES (71)..(72): Selenocysteine
MALXGASDPSAEAEANGEKPFLLRALQIALVVSLYWVXSISMVFLNKYLLDSPSLRLDXPIFVXFYQCLVXX

SEQ ID NO: 25598 - protein, 165 aa, Homo sapiens
  MOD_RES (4)..(4): Selenocysteine
  MOD_RES (38)..(38): Selenocysteine
  MOD_RES (59)..(59): Selenocysteine
  MOD_RES (64)..(64): Selenocysteine
  MOD_RES (71)..(72): Selenocysteine
  MOD_RES (116)..(116): Selenocysteine
  MOD_RES (137)..(138): Selenocysteine
  MOD_RES (152)..(153): Selenocysteine
  MOD_RES (160)..(160): Selenocysteine
MALXGASDPSAEAEANGEKPFLLRALQIALVVSLYWVXSISMVFLNKYLLDSPSLRLDXPIFVXFYQCLVXXLLCKGLSALAACCPGAVDFPSLRLDLRVARSVLPLSVVFIGMIXFNNLCLKYVGVAFYNVGRSLXXVFNVLLSYLLLKQXXSFYALLXCGIII

SEQ ID NO: 25599 - protein, 351 aa, Homo sapiens
  MOD_RES (4)..(4): Selenocysteine
  MOD_RES (38)..(38): Selenocysteine
  MOD_RES (59)..(59): Selenocysteine
  MOD_RES (64)..(64): Selenocysteine
  MOD_RES (71)..(72): Selenocysteine
  MOD_RES (116)..(116): Selenocysteine
  MOD_RES (137)..(138): Selenocysteine
  MOD_RES (152)..(153): Selenocysteine
  MOD_RES (160)..(160): Selenocysteine
  MOD_RES (180)..(180): Selenocysteine
  MOD_RES (186)..(186): Selenocysteine
  MOD_RES (203)..(204): Selenocysteine
  MOD_RES (218)..(218): Selenocysteine
  MOD_RES (258)..(258): Selenocysteine
  MOD_RES (271)..(271): Selenocysteine
  MOD_RES (278)..(278): Selenocysteine
  MOD_RES (282)..(282): Selenocysteine
  MOD_RES (288)..(288): Selenocysteine
  MOD_RES (295)..(295): Selenocysteine
  MOD_RES (305)..(305): Selenocysteine
  MOD_RES (312)..(312): Selenocysteine
  MOD_RES (325)..(325): Selenocysteine
  MOD_RES (335)..(335): Selenocysteine
MALXGASDPSAEAEANGEKPFLLRALQIALVVSLYWVXSISMVFLNKYLLDSPSLRLDXPIFVXFYQCLVXXLLCKGLSALAACCPGAVDFPSLRLDLRVARSVLPLSVVFIGMIXFNNLCLKYVGVAFYNVGRSLXXVFNVLLSYLLLKQXXSFYALLXCGIIIGGFWLGVDQEGAEGXLSWLGXVFGVLASLCVSLNAIYXXKVLPAVDGSIWRLXFYNNVNACILFLPLLLLLGELQALRDFAQLGSAHFWGMMXLGGLFGFAIGYVXGLQIKFXSPLXHNVSGXAKACAQXVLAVLYYEEXKSFLWWXSNMMVLGGSSAYXWVRGWEMKKXPEEPSPKDSEKSAMGV

SEQ ID NO: 25600 - protein, 364 aa, Homo sapiens
  MOD_RES (17)..(17): Selenocysteine
  MOD_RES (51)..(51): Selenocysteine
  MOD_RES (72)..(72): Selenocysteine
  MOD_RES (77)..(77): Selenocysteine
  MOD_RES (84)..(85): Selenocysteine
  MOD_RES (129)..(129): Selenocysteine
  MOD_RES (150)..(151): Selenocysteine
  MOD_RES (165)..(166): Selenocysteine
  MOD_RES (173)..(173): Selenocysteine
  MOD_RES (193)..(193): Selenocysteine
  MOD_RES (199)..(199): Selenocysteine
  MOD_RES (216)..(217): Selenocysteine
  MOD_RES (231)..(231): Selenocysteine
  MOD_RES (271)..(271): Selenocysteine
  MOD_RES (284)..(284): Selenocysteine
  MOD_RES (291)..(291): Selenocysteine
  MOD_RES (295)..(295): Selenocysteine
  MOD_RES (301)..(301): Selenocysteine
  MOD_RES (308)..(308): Selenocysteine
  MOD_RES (318)..(318): Selenocysteine
  MOD_RES (325)..(325): Selenocysteine
  MOD_RES (338)..(338): Selenocysteine
  MOD_RES (348)..(348): Selenocysteine
MNRAPLKRSRILHMALXGASDPSAEAEANGEKPFLLRALQIALVVSLYWVXSISMVFLNKYLLDSPSLRLDXPIFVXFYQCLVXXLLCKGLSALAACCPGAVDFPSLRLDLRVARSVLPLSVVFIGMIXFNNLCLKYVGVAFYNVGRSLXXVFNVLLSYLLLKQXXSFYALLXCGIIIGGFWLGVDQEGAEGXLSWLGXVFGVLASLCVSLNAIYXXKVLPAVDGSIWRLXFYNNVNACILFLPLLLLLGELQALRDFAQLGSAHFWGMMXLGGLFGFAIGYVXGLQIKFXSPLXHNVSGXAKACAQXVLAVLYYEEXKSFLWWXSNMMVLGGSSAYXWVRGWEMKKXPEEPSPKDSEKSAMGV

SEQ ID NO: 25601 - protein, 394 aa, Homo sapiens
  MOD_RES (6)..(6): Selenocysteine
  MOD_RES (46)..(46): Selenocysteine
  MOD_RES (61)..(61): Selenocysteine
  MOD_RES (68)..(68): Selenocysteine
  MOD_RES (78)..(78): Selenocysteine
  MOD_RES (119)..(119): Selenocysteine
  MOD_RES (123)..(123): Selenocysteine
  MOD_RES (138)..(138): Selenocysteine
  MOD_RES (143)..(143): Selenocysteine
  MOD_RES (145)..(145): Selenocysteine
  MOD_RES (184)..(184): Selenocysteine
  MOD_RES (188)..(188): Selenocysteine
  MOD_RES (210)..(210): Selenocysteine
  MOD_RES (212)..(212): Selenocysteine
  MOD_RES (229)..(229): Selenocysteine
  MOD_RES (255)..(255): Selenocysteine
  MOD_RES (265)..(265): Selenocysteine
  MOD_RES (296)..(296): Selenocysteine
  MOD_RES (300)..(300): Selenocysteine
  MOD_RES (312)..(312): Selenocysteine
MGRVSXSHQPLRGVPAPADSGAPVLQPPRMGRWALDVAFLWKAVLXLGLVLLYYCFSIGIXFYNKWLXKSFHFPLFMXMLHLAVIFLFSALSRALVQCSSHRARVVLSWADYLRRVAPXALAXALDVGLSNWSFLYVXVSLYXMXKSSAVLFILIFSLIFKLEELRAALVLVVLLIAGGLFMFXYKSXQFNVEGFALVLGASFIGGIRWXLXQMLLQKAELGLQNPIDXMFHLQPLMFLGLFPLFAVFEGLHLSXSEKIFRFQDXGLLLRVLGSLFLGGILAFGLGFSEFLLVSRXSSLXLSIAGIFKEVCXLLLAAHLLGDQISLLNWLGFALCLSGISLHVALKALHSRGDGGPKALKGLGSSPDLELLLRSSQREEGDNEEEEYFVAQGQQ

SEQ ID NO: 25602 - protein, 158 aa, Homo sapiens
  MOD_RES (17)..(17): Selenocysteine
  MOD_RES (32)..(32): Selenocysteine
  MOD_RES (39)..(39): Selenocysteine
  MOD_RES (49)..(49): Selenocysteine
  MOD_RES (90)..(90): Selenocysteine
  MOD_RES (94)..(94): Selenocysteine
  MOD_RES (109)..(109): Selenocysteine
  MOD_RES (132)..(132): Selenocysteine
  MOD_RES (138)..(138): Selenocysteine
MGRWALDVAFLWKAVLXLGLVLLYYCFSIGIXFYNKWLXKSFHFPLFMXMLHLAVIFLFSALSRALVQCSSHRARVVLSWADYLRRVAPXALAXALDVGLSNWSFLYVXVSLARHWSWWSSSSPGVSSCSPXSPHSSXWRASPWCWGPRSSVAFAGPS

SEQ ID NO: 25603 - protein, 196 aa, Homo sapiens
  MOD_RES (17)..(17): Selenocysteine
  MOD_RES (32)..(32): Selenocysteine
  MOD_RES (39)..(39): Selenocysteine
  MOD_RES (49)..(49): Selenocysteine
  MOD_RES (90)..(90): Selenocysteine
  MOD_RES (94)..(94): Selenocysteine
  MOD_RES (109)..(109): Selenocysteine
  MOD_RES (117)..(117): Selenocysteine
  MOD_RES (154)..(154): Selenocysteine
  MOD_RES (158)..(158): Selenocysteine
  MOD_RES (190)..(190): Selenocysteine
MGRWALDVAFLWKAVLXLGLVLLYYCFSIGIXFYNKWLXKSFHFPLFMXMLHLAVIFLFSALSRALVQCSSHRARVVLSWADYLRRVAPXALAXALDVGLSNWSFLYVXVSLPHSSXWRASPWCWGPRSSVAFAGPSPRCSCRRLNSASRIPSXPCSXCSHSCSWGSSLSLLYLKVSICPHLRKSSVSRXQGCSCG

SEQ ID NO: 25604 - protein, 365 aa, Homo sapiens
  MOD_RES (17)..(17): Selenocysteine
  MOD_RES (32)..(32): Selenocysteine
  MOD_RES (39)..(39): Selenocysteine
  MOD_RES (49)..(49): Selenocysteine
  MOD_RES (90)..(90): Selenocysteine
  MOD_RES (94)..(94): Selenocysteine
  MOD_RES (109)..(109): Selenocysteine
  MOD_RES (114)..(114): Selenocysteine
  MOD_RES (116)..(116): Selenocysteine
  MOD_RES (155)..(155): Selenocysteine
  MOD_RES (159)..(159): Selenocysteine
  MOD_RES (181)..(181): Selenocysteine
  MOD_RES (183)..(183): Selenocysteine
  MOD_RES (200)..(200): Selenocysteine
  MOD_RES (226)..(226): Selenocysteine
  MOD_RES (236)..(236): Selenocysteine
  MOD_RES (267)..(267): Selenocysteine
  MOD_RES (271)..(271): Selenocysteine
  MOD_RES (283)..(283): Selenocysteine
MGRWALDVAFLWKAVLXLGLVLLYYCFSIGIXFYNKWLXKSFHFPLFMXMLHLAVIFLFSALSRALVQCSSHRARVVLSWADYLRRVAPXALAXALDVGLSNWSFLYVXVSLYXMXKSSAVLFILIFSLIFKLEELRAALVLVVLLIAGGLFMFXYKSXQFNVEGFALVLGASFIGGIRWXLXQMLLQKAELGLQNPIDXMFHLQPLMFLGLFPLFAVFEGLHLSXSEKIFRFQDXGLLLRVLGSLFLGGILAFGLGFSEFLLVSRXSSLXLSIAGIFKEVCXLLLAAHLLGDQISLLNWLGFALCLSGISLHVALKALHSRGDGGPKALKGLGSSPDLELLLRSSQREEGDNEEEEYFVAQGQQ

SEQ ID NO: 25605 - protein, 344 aa, Homo sapiens
  MOD_RES (17)..(17): Selenocysteine
  MOD_RES (32)..(32): Selenocysteine
  MOD_RES (39)..(39): Selenocysteine
  MOD_RES (49)..(49): Selenocysteine
  MOD_RES (90)..(90): Selenocysteine
  MOD_RES (94)..(94): Selenocysteine
  MOD_RES (109)..(109): Selenocysteine
  MOD_RES (114)..(114): Selenocysteine
  MOD_RES (116)..(116): Selenocysteine
  MOD_RES (138)..(138): Selenocysteine
  MOD_RES (160)..(160): Selenocysteine
  MOD_RES (162)..(162): Selenocysteine
  MOD_RES (179)..(179): Selenocysteine
  MOD_RES (205)..(205): Selenocysteine
  MOD_RES (215)..(215): Selenocysteine
  MOD_RES (246)..(246): Selenocysteine
  MOD_RES (250)..(250): Selenocysteine
  MOD_RES (262)..(262): Selenocysteine
MGRWALDVAFLWKAVLXLGLVLLYYCFSIGIXFYNKWLXKSFHFPLFMXMLHLAVIFLFSALSRALVQCSSHRARVVLSWADYLRRVAPXALAXALDVGLSNWSFLYVXVSLYXMXKSSAVLFILIFSLIFKLEELSXQFNVEGFALVLGASFIGGIRWXLXQMLLQKAELGLQNPIDXMFHLQPLMFLGLFPLFAVFEGLHLSXSEKIFRFQDXGLLLRVLGSLFLGGILAFGLGFSEFLLVSRXSSLXLSIAGIFKEVCXLLLAAHLLGDQISLLNWLGFALCLSGISLHVALKALHSRGDGGPKALKGLGSSPDLELLLRSSQREEGDNEEEEYFVAQGQQ

SEQ ID NO: 25606 - protein, 55 aa, Homo sapiens
  MOD_RES (4)..(4): Selenocysteine
  MOD_RES (17)..(17): Selenocysteine
  MOD_RES (22)..(22): Selenocysteine
  MOD_RES (42)..(42): Selenocysteine
  MOD_RES (53)..(53): Selenocysteine
MAWXKYQLFLAGLMLVXGSINXLSAKQWACSWENSPAWLPSXSSDAELQGNQXPA

SEQ ID NO: 25607 - protein, 371 aa, Homo sapiens
  MOD_RES (4)..(4): Selenocysteine
  MOD_RES (17)..(17): Selenocysteine
  MOD_RES (22)..(22): Selenocysteine
  MOD_RES (100)..(100): Selenocysteine
  MOD_RES (102)..(102): Selenocysteine
  MOD_RES (112)..(112): Selenocysteine
  MOD_RES (128)..(128): Selenocysteine
  MOD_RES (151)..(151): Selenocysteine
  MOD_RES (178)..(178): Selenocysteine
  MOD_RES (214)..(214): Selenocysteine
  MOD_RES (245)..(245): Selenocysteine
  MOD_RES (284)..(284): Selenocysteine
  MOD_RES (290)..(291): Selenocysteine
  MOD_RES (300)..(300): Selenocysteine
  MOD_RES (330)..(330): Selenocysteine
  MOD_RES (363)..(363): Selenocysteine
  MOD_RES (365)..(365): Selenocysteine
MAWXKYQLFLAGLMLVXGSINXLSAKWADNFMAEGCGGSKEHSFQHPFLQAVGMFLGEFSCLAAFYLLRCRAAGQSDSSVDPQQPFNPLLFLPPALCDMXGXSLMYVALNMXSASSFQMLRGAVIIFXGLFSVAFLGRRLVLSQWLGILAXIAGLVVVGLADLLSKHDSQHKLSEVIXGDLLIIMAQIIVAIQMVLEEKFVYKHNVHPLRAVGXEGLFGFVILSLLLVPMYYIPAGSFSGNPRGXLEDALDAFCQVGQQPLIAVALLGNISSIAFFNFAGISVXKELSAXXRMVLDSLRXVVIWALSLALGWEAFHALQILGFLILLIGXALYNGLHRPLLGRLSRGRPLAEESEQERLLGGXRXPINDAS

SEQ ID NO: 25608 - protein, 51 aa, Homo sapiens
  MOD_RES (4)..(4): Selenocysteine
  MOD_RES (17)..(17): Selenocysteine
  MOD_RES (22)..(22): Selenocysteine
MAWXKYQLFLAGLMLVXGSINXLSAKWADNFMAEGCGGSKEHSFQHPFLQL

SEQ ID NO: 25609 - protein, 498 aa, Homo sapiens
  MOD_RES (7)..(7): Selenocysteine
  MOD_RES (18)..(18): Selenocysteine
  MOD_RES (48)..(49): Selenocysteine
  MOD_RES (84)..(84): Selenocysteine
  MOD_RES (91)..(91): Selenocysteine
  MOD_RES (95)..(95): Selenocysteine
  MOD_RES (102)..(102): Selenocysteine
  MOD_RES (106)..(106): Selenocysteine
  MOD_RES (121)..(122): Selenocysteine
  MOD_RES (134)..(134): Selenocysteine
  MOD_RES (146)..(146): Selenocysteine
  MOD_RES (153)..(154): Selenocysteine
  MOD_RES (200)..(200): Selenocysteine
  MOD_RES (214)..(214): Selenocysteine
  MOD_RES (216)..(216): Selenocysteine
  MOD_RES (220)..(220): Selenocysteine
  MOD_RES (249)..(249): Selenocysteine
  MOD_RES (263)..(263): Selenocysteine
  MOD_RES (300)..(300): Selenocysteine
  MOD_RES (304)..(304): Selenocysteine
  MOD_RES (315)..(315): Selenocysteine
  MOD_RES (338)..(338): Selenocysteine
  MOD_RES (340)..(340): Selenocysteine
  MOD_RES (375)..(375): Selenocysteine
  MOD_RES (390)..(390): Selenocysteine
  MOD_RES (474)..(474): Selenocysteine
MAICILXWRIRPFCIEPXNIVNVNHVIQRVSDHASAMNKRIHYYSRLXXPADKALIAPDHVVPAPEECYVYSPLGSAYKLQSYXEGYGKNXSLVXIFMIWNXMMGXSILSIPWGIKQAGFXXGMCVIILMGLLXLYCCYRVVKSRXMMFSLDXXSWEYPDVCRHYFGSFGQWSSLLFSLVSLIGAMIVYWVLMSNFLFNXGKFIFNFIHHINDXDXILSXNNSNPVICPSAGSGGHPDNSSMIFYANDXGAQQFEKWWDKSRXVPFYLVGLLLPLLNFKSPSFFSKFNILEIRFQFPQLXGVLXLAFFIHNCIIXLLKNNKKQENNVRDLCIAYMLVXLXYLYIGVLVFASFPSPPLSKDCIEQNFLDNFPSSDXLSFIARIFLLFQMMXVYPLLGYLARVQLLGHIFGDIYPSIFHVLILNLIIVGAGVIMACFYPNIGGIIRYSGAACGLAFVFIYPSLIYIISLHQEERLXWPKLIFHVFIIILGVANLIVQFFM

SEQ ID NO: 25610 - protein, 26 aa, Homo sapiens
  MOD_RES (13)..(13): Selenocysteine
MANMNSDSRHLGXSEVDHERDPGPMN

SEQ ID NO: 25611 - protein, 37 aa, Homo sapiens
  MOD_RES (13)..(13): Selenocysteine
MANMNSDSRHLGXSEVDHERDPGPMNIQFEPSDLRSK

SEQ ID NO: 25612 - protein, 43 aa, Homo sapiens
  MOD_RES (13)..(13): Selenocysteine
  MOD_RES (42)..(42): Selenocysteine
MANMNSDSRHLGXSEVDHERDPGPMNIQFEPSDLRSKRLPQXM

SEQ ID NO: 25613 - protein, 97 aa, Homo sapiens
  MOD_RES (13)..(13): Selenocysteine
  MOD_RES (45)..(45): Selenocysteine
  MOD_RES (75)..(76): Selenocysteine
MANMNSDSRHLGXSEVDHERDPGPMNIQFEPSDLRSKRPFCIEPXNIVNVNHVIQRVSDHASAMNKRIHYYSRLXXPADKALIAPDHVVPAPEECYV

SEQ ID NO: 25614 - protein, 131 aa, Homo sapiens
  MOD_RES (13)..(13): Selenocysteine
  MOD_RES (45)..(45): Selenocysteine
  MOD_RES (75)..(76): Selenocysteine
  MOD_RES (111)..(111): Selenocysteine
  MOD_RES (118)..(118): Selenocysteine
  MOD_RES (122)..(122): Selenocysteine
  MOD_RES (129)..(129): Selenocysteine
MANMNSDSRHLGXSEVDHERDPGPMNIQFEPSDLRSKRPFCIEPXNIVNVNHVIQRVSDHASAMNKRIHYYSRLXXPADKALIAPDHVVPAPEECYVYSPLGSAYKLQSYXEGYGKNXSLVXIFMIWNXMM

SEQ ID NO: 25615 - protein, 561 aa, Homo sapiens
  MOD_RES (13)..(13): Selenocysteine
  MOD_RES (45)..(45): Selenocysteine
  MOD_RES (75)..(76): Selenocysteine
  MOD_RES (111)..(111): Selenocysteine
  MOD_RES (118)..(118): Selenocysteine
  MOD_RES (122)..(122): Selenocysteine
  MOD_RES (129)..(129): Selenocysteine
  MOD_RES (133)..(133): Selenocysteine
  MOD_RES (148)..(149): Selenocysteine
  MOD_RES (161)..(161): Selenocysteine
  MOD_RES (173)..(173): Selenocysteine
  MOD_RES (180)..(181): Selenocysteine
  MOD_RES (227)..(227): Selenocysteine
  MOD_RES (241)..(241): Selenocysteine
  MOD_RES (243)..(243): Selenocysteine
  MOD_RES (247)..(247): Selenocysteine
  MOD_RES (276)..(276): Selenocysteine
  MOD_RES (290)..(290): Selenocysteine
  MOD_RES (319)..(319): Selenocysteine
  MOD_RES (330)..(330): Selenocysteine
  MOD_RES (348)..(348): Selenocysteine
  MOD_RES (363)..(363): Selenocysteine
  MOD_RES (367)..(367): Selenocysteine
  MOD_RES (378)..(378): Selenocysteine
  MOD_RES (401)..(401): Selenocysteine
  MOD_RES (403)..(403): Selenocysteine
  MOD_RES (438)..(438): Selenocysteine
  MOD_RES (453)..(453): Selenocysteine
  MOD_RES (537)..(537): Selenocysteine
MANMNSDSRHLGXSEVDHERDPGPMNIQFEPSDLRSKRPFCIEPXNIVNVNHVIQRVSDHASAMNKRIHYYSRLXXPADKALIAPDHVVPAPEECYVYSPLGSAYKLQSYXEGYGKNXSLVXIFMIWNXMMGXSILSIPWGIKQAGFXXGMCVIILMGLLXLYCCYRVVKSRXMMFSLDXXSWEYPDVCRHYFGSFGQWSSLLFSLVSLIGAMIVYWVLMSNFLFNXGKFIFNFIHHINDXDXILSXNNSNPVICPSAGSGGHPDNSSMIFYANDXGAQQFEKWWDKSRXVPFYLVGLLLPLLNFKSPSFFSKFNILGXVSVLYLIFLVXFKAVRLGFHLEFHWFIPXEFFVPEIRFQFPQLXGVLXLAFFIHNCIIXLLKNNKKQENNVRDLCIAYMLVXLXYLYIGVLVFASFPSPPLSKDCIEQNFLDNFPSSDXLSFIARIFLLFQMMXVYPLLGYLARVQLLGHIFGDIYPSIFHVLILNLIIVGAGVIMACFYPNIGGIIRYSGAACGLAFVFIYPSLIYIISLHQEERLXWPKLIFHVFIIILGVANLIVQFFM

SEQ ID NO: 25616 - protein, 455 aa, Homo sapiens
  MOD_RES (13)..(13): Selenocysteine
  MOD_RES (45)..(45): Selenocysteine
  MOD_RES (75)..(76): Selenocysteine
  MOD_RES (111)..(111): Selenocysteine
  MOD_RES (118)..(118): Selenocysteine
  MOD_RES (122)..(122): Selenocysteine
  MOD_RES (129)..(129): Selenocysteine
  MOD_RES (133)..(133): Selenocysteine
  MOD_RES (148)..(149): Selenocysteine
  MOD_RES (161)..(161): Selenocysteine
  MOD_RES (173)..(173): Selenocysteine
  MOD_RES (180)..(181): Selenocysteine
  MOD_RES (227)..(227): Selenocysteine
  MOD_RES (234)..(234): Selenocysteine
  MOD_RES (245)..(245): Selenocysteine
  MOD_RES (263)..(263): Selenocysteine
  MOD_RES (278)..(278): Selenocysteine
  MOD_RES (282)..(282): Selenocysteine
  MOD_RES (293)..(293): Selenocysteine
  MOD_RES (316)..(316): Selenocysteine
  MOD_RES (318)..(318): Selenocysteine
  MOD_RES (353)..(353): Selenocysteine
  MOD_RES (368)..(368): Selenocysteine
  MOD_RES (452)..(452): Selenocysteine
MANMNSDSRHLGXSEVDHERDPGPMNIQFEPSDLRSKRPFCIEPXNIVNVNHVIQRVSDHASAMNKRIHYYSRLXXPADKALIAPDHVVPAPEECYVYSPLGSAYKLQSYXEGYGKNXSLVXIFMIWNXMMGXSILSIPWGIKQAGFXXGMCVIILMGLLXLYCCYRVVKSRXMMFSLDXXSWEYPDVCRHYFGSFGQWSSLLFSLVSLIGAMIVYWVLMSNFLFNXGKFIFSXVSVLYLIFLVXFKAVRLGFHLEFHWFIPXEFFVPEIRFQFPQLXGVLXLAFFIHNCIIXLLKNNKKQENNVRDLCIAYMLVXLXYLYIGVLVFASFPSPPLSKDCIEQNFLDNFPSSDXLSFIARIFLLFQMMXVYPLLGYLARVQLLGHIFGDIYPSIFHVLILNLIIVGAGVIMACFYPNIGGIIRYSGAACGLAFVFIYPSLIYIISLHQEERLXWPK

SEQ ID NO: 25617 - protein, 43 aa, Homo sapiens
  MOD_RES (13)..(13): Selenocysteine
  MOD_RES (42)..(42): Selenocysteine
MANMNSDSRHLGXSEVDHERDPGPMNIQFEPSDLRSKRQGLXL

SEQ ID NO: 25618 - protein, 437 aa, Homo sapiens
  MOD_RES (5)..(5): Selenocysteine
  MOD_RES (9)..(9): Selenocysteine
  MOD_RES (24)..(25): Selenocysteine
  MOD_RES (37)..(37): Selenocysteine
  MOD_RES (49)..(49): Selenocysteine
  MOD_RES (56)..(57): Selenocysteine
  MOD_RES (103)..(103): Selenocysteine
  MOD_RES (117)..(117): Selenocysteine
  MOD_RES (119)..(119): Selenocysteine
  MOD_RES (123)..(123): Selenocysteine
  MOD_RES (152)..(152): Selenocysteine
  MOD_RES (166)..(166): Selenocysteine
  MOD_RES (195)..(195): Selenocysteine
  MOD_RES (206)..(206): Selenocysteine
  MOD_RES (224)..(224): Selenocysteine
  MOD_RES (239)..(239): Selenocysteine
  MOD_RES (243)..(243): Selenocysteine
  MOD_RES (254)..(254): Selenocysteine
  MOD_RES (277)..(277): Selenocysteine
  MOD_RES (279)..(279): Selenocysteine
  MOD_RES (314)..(314): Selenocysteine
  MOD_RES (329)..(329): Selenocysteine
  MOD_RES (413)..(413): Selenocysteine
MIWNXMMGXSILSIPWGIKQAGFXXGMCVIILMGLLXLYCCYRVVKSRXMMFSLDXXSWEYPDVCRHYFGSFGQWSSLLFSLVSLIGAMIVYWVLMSNFLFNXGKFIFNFIHHINDXDXILSXNNSNPVICPSAGSGGHPDNSSMIFYANDXGAQQFEKWWDKSRXVPFYLVGLLLPLLNFKSPSFFSKFNILGXVSVLYLIFLVXFKAVRLGFHLEFHWFIPXEFFVPEIRFQFPQLXGVLXLAFFIHNCIIXLLKNNKKQENNVRDLCIAYMLVXLXYLYIGVLVFASFPSPPLSKDCIEQNFLDNFPSSDXLSFIARIFLLFQMMXVYPLLGYLARVQLLGHIFGDIYPSIFHVLILNLIIVGAGVIMACFYPNIGGIIRYSGAACGLAFVFIYPSLIYIISLHQEERLXWPKLIFHVFIIILGVANLIVQFFM

SEQ ID NO: 25619 - protein, 36 aa, Homo sapiens
  MOD_RES (12)..(13): Selenocysteine
MNKRIHYYSRLXXPADKALIAPDHVVPAPEECYVYS

SEQ ID NO: 25620 - protein, 102 aa, Homo sapiens
  MOD_RES (12)..(13): Selenocysteine
  MOD_RES (48)..(48): Selenocysteine
  MOD_RES (55)..(55): Selenocysteine
  MOD_RES (59)..(59): Selenocysteine
  MOD_RES (66)..(66): Selenocysteine
  MOD_RES (70)..(70): Selenocysteine
  MOD_RES (85)..(86): Selenocysteine
  MOD_RES (98)..(98): Selenocysteine
MNKRIHYYSRLXXPADKALIAPDHVVPAPEECYVYSPLGSAYKLQSYXEGYGKNXSLVXIFMIWNXMMGXSILSIPWGIKQAGFXXGMCVIILMGLLXLYCC

SEQ ID NO: 25621 - protein, 187 aa, Homo sapiens
  MOD_RES (12)..(13): Selenocysteine
  MOD_RES (48)..(48): Selenocysteine
  MOD_RES (55)..(55): Selenocysteine
  MOD_RES (59)..(59): Selenocysteine
  MOD_RES (66)..(66): Selenocysteine
  MOD_RES (70)..(70): Selenocysteine
  MOD_RES (85)..(86): Selenocysteine
  MOD_RES (98)..(98): Selenocysteine
  MOD_RES (110)..(110): Selenocysteine
  MOD_RES (117)..(118): Selenocysteine
  MOD_RES (164)..(164): Selenocysteine
  MOD_RES (178)..(178): Selenocysteine
  MOD_RES (180)..(180): Selenocysteine
  MOD_RES (184)..(184): Selenocysteine
MNKRIHYYSRLXXPADKALIAPDHVVPAPEECYVYSPLGSAYKLQSYXEGYGKNXSLVXIFMIWNXMMGXSILSIPWGIKQAGFXXGMCVIILMGLLXLYCCYRVVKSRXMMFSLDXXSWEYPDVCRHYFGSFGQWSSLLFSLVSLIGAMIVYWVLMSNFLFNXGKFIFNFIHHINDXDXILSXNNS

SEQ ID NO: 25622 - protein, 397 aa, Homo sapiens
  MOD_RES (12)..(13): Selenocysteine
  MOD_RES (48)..(48): Selenocysteine
  MOD_RES (55)..(55): Selenocysteine
  MOD_RES (59)..(59): Selenocysteine
  MOD_RES (66)..(66): Selenocysteine
  MOD_RES (70)..(70): Selenocysteine
  MOD_RES (85)..(86): Selenocysteine
  MOD_RES (98)..(98): Selenocysteine
  MOD_RES (110)..(110): Selenocysteine
  MOD_RES (117)..(118): Selenocysteine
  MOD_RES (164)..(164): Selenocysteine
  MOD_RES (178)..(178): Selenocysteine
  MOD_RES (180)..(180): Selenocysteine
  MOD_RES (184)..(184): Selenocysteine
  MOD_RES (213)..(213): Selenocysteine
  MOD_RES (227)..(227): Selenocysteine
  MOD_RES (256)..(256): Selenocysteine
  MOD_RES (267)..(267): Selenocysteine
  MOD_RES (285)..(285): Selenocysteine
  MOD_RES (300)..(300): Selenocysteine
  MOD_RES (304)..(304): Selenocysteine
  MOD_RES (315)..(315): Selenocysteine
  MOD_RES (338)..(338): Selenocysteine
  MOD_RES (340)..(340): Selenocysteine
  MOD_RES (366)..(366): Selenocysteine
  MOD_RES (379)..(379): Selenocysteine
MNKRIHYYSRLXXPADKALIAPDHVVPAPEECYVYSPLGSAYKLQSYXEGYGKNXSLVXIFMIWNXMMGXSILSIPWGIKQAGFXXGMCVIILMGLLXLYCCYRVVKSRXMMFSLDXXSWEYPDVCRHYFGSFGQWSSLLFSLVSLIGAMIVYWVLMSNFLFNXGKFIFNFIHHINDXDXILSXNNSNPVICPSAGSGGHPDNSSMIFYANDXGAQQFEKWWDKSRXVPFYLVGLLLPLLNFKSPSFFSKFNILGXVSVLYLIFLVXFKAVRLGFHLEFHWFIPXEFFVPEIRFQFPQLXGVLXLAFFIHNCIIXLLKNNKKQENNVRDLCIAYMLVXLXYLYIGVLVFASFPSPPLSKDCIEQAXWLVSSFWAISSVXFILGKGSSLDQQDVPSNK

SEQ ID NO: 25623 - protein, 498 aa, Homo sapiens
  MOD_RES (12)..(13): Selenocysteine
  MOD_RES (48)..(48): Selenocysteine
  MOD_RES (55)..(55): Selenocysteine
  MOD_RES (59)..(59): Selenocysteine
  MOD_RES (66)..(66): Selenocysteine
  MOD_RES (70)..(70): Selenocysteine
  MOD_RES (85)..(86): Selenocysteine
  MOD_RES (98)..(98): Selenocysteine
  MOD_RES (110)..(110): Selenocysteine
  MOD_RES (117)..(118): Selenocysteine
  MOD_RES (164)..(164): Selenocysteine
  MOD_RES (178)..(178): Selenocysteine
  MOD_RES (180)..(180): Selenocysteine
  MOD_RES (184)..(184): Selenocysteine
  MOD_RES (213)..(213): Selenocysteine
  MOD_RES (227)..(227): Selenocysteine
  MOD_RES (256)..(256): Selenocysteine
  MOD_RES (267)..(267): Selenocysteine
  MOD_RES (285)..(285): Selenocysteine
  MOD_RES (300)..(300): Selenocysteine
  MOD_RES (304)..(304): Selenocysteine
  MOD_RES (315)..(315): Selenocysteine
  MOD_RES (338)..(338): Selenocysteine
  MOD_RES (340)..(340): Selenocysteine
  MOD_RES (375)..(375): Selenocysteine
  MOD_RES (390)..(390): Selenocysteine
  MOD_RES (474)..(474): Selenocysteine
MNKRIHYYSRLXXPADKALIAPDHVVPAPEECYVYSPLGSAYKLQSYXEGYGKNXSLVXIFMIWNXMMGXSILSIPWGIKQAGFXXGMCVIILMGLLXLYCCYRVVKSRXMMFSLDXXSWEYPDVCRHYFGSFGQWSSLLFSLVSLIGAMIVYWVLMSNFLFNXGKFIFNFIHHINDXDXILSXNNSNPVICPSAGSGGHPDNSSMIFYANDXGAQQFEKWWDKSRXVPFYLVGLLLPLLNFKSPSFFSKFNILGXVSVLYLIFLVXFKAVRLGFHLEFHWFIPXEFFVPEIRFQFPQLXGVLXLAFFIHNCIIXLLKNNKKQENNVRDLCIAYMLVXLXYLYIGVLVFASFPSPPLSKDCIEQNFLDNFPSSDXLSFIARIFLLFQMMXVYPLLGYLARVQLLGHIFGDIYPSIFHVLILNLIIVGAGVIMACFYPNIGGIIRYSGAACGLAFVFIYPSLIYIISLHQEERLXWPKLIFHVFIIILGVANLIVQFFM

SEQ ID NO: 25624 - protein, 39 aa, Homo sapiens
  MOD_RES (13)..(13): Selenocysteine
MKNVMVMILVVDXKILILIMKVNFDILEREKHHMLKIMQ

SEQ ID NO: 25625 - protein, 38 aa, Homo sapiens
  MOD_RES (7)..(7): Selenocysteine
  MOD_RES (16)..(16): Selenocysteine
MKVHMHXKFCLICLLXFIFHHCNHCHEEHDHGPEALHR

SEQ ID NO: 25626 - protein, 126 aa, Homo sapiens
  MOD_RES (7)..(7): Selenocysteine
  MOD_RES (16)..(16): Selenocysteine
  MOD_RES (44)..(44): Selenocysteine
  MOD_RES (87)..(87): Selenocysteine
MKVHMHXKFCLICLLXFIFHHCNHCHEEHDHGPEALHRQHRGMXELEPSKFSKQAAENEKKYYIEKLFERYGENGRLSFFGLEKLLXNLGLGERKVVEINHEDLGHDHVSHLDILAVQEGKHFHSH

SEQ ID NO: 25627 - protein, 130 aa, Homo sapiens
  MOD_RES (7)..(7): Selenocysteine
  MOD_RES (16)..(16): Selenocysteine
  MOD_RES (44)..(44): Selenocysteine
  MOD_RES (87)..(87): Selenocysteine
MKVHMHXKFCLICLLXFIFHHCNHCHEEHDHGPEALHRQHRGMXELEPSKFSKQAAENEKKYYIEKLFERYGENGRLSFFGLEKLLXNLGLGERKVVEINHEDLGHDHVSHLDILAVQEGKHFHSHNHQH

SEQ ID NO: 25628 - protein, 831 aa, Homo sapiens
  MOD_RES (7)..(7): Selenocysteine
  MOD_RES (16)..(16): Selenocysteine
  MOD_RES (44)..(44): Selenocysteine
  MOD_RES (87)..(87): Selenocysteine
  MOD_RES (141)..(141): Selenocysteine
  MOD_RES (143)..(143): Selenocysteine
  MOD_RES (147)..(147): Selenocysteine
  MOD_RES (159)..(159): Selenocysteine
  MOD_RES (193)..(193): Selenocysteine
  MOD_RES (202)..(202): Selenocysteine
  MOD_RES (215)..(215): Selenocysteine
  MOD_RES (217)..(217): Selenocysteine
  MOD_RES (220)..(220): Selenocysteine
  MOD_RES (248)..(248): Selenocysteine
  MOD_RES (308)..(308): Selenocysteine
  MOD_RES (341)..(341): Selenocysteine
  MOD_RES (357)..(357): Selenocysteine
  MOD_RES (361)..(361): Selenocysteine
  MOD_RES (415)..(415): Selenocysteine
  MOD_RES (441)..(441): Selenocysteine
  MOD_RES (450)..(450): Selenocysteine
  MOD_RES (536)..(536): Selenocysteine
  MOD_RES (540)..(540): Selenocysteine
  MOD_RES (553)..(553): Selenocysteine
  MOD_RES (567)..(567): Selenocysteine
  MOD_RES (580)..(580): Selenocysteine
  MOD_RES (583)..(583): Selenocysteine
  MOD_RES (615)..(615): Selenocysteine
  MOD_RES (634)..(634): Selenocysteine
  MOD_RES (664)..(664): Selenocysteine
  MOD_RES (697)..(697): Selenocysteine
  MOD_RES (702)..(702): Selenocysteine
  MOD_RES (727)..(727): Selenocysteine
  MOD_RES (750)..(750): Selenocysteine
  MOD_RES (760)..(760): Selenocysteine
  MOD_RES (767)..(767): Selenocysteine
MKVHMHXKFCLICLLXFIFHHCNHCHEEHDHGPEALHRQHRGMXELEPSKFSKQAAENEKKYYIEKLFERYGENGRLSFFGLEKLLXNLGLGERKVVEINHEDLGHDHVSHLDILAVQEGKHFHSHNHQHSHNHLNSENQXVXSVSXKRNHKCDPEKEXVEVSVKSDDKHMHDHNHRLRHHHRLHHHLDHNNXHHFHNDSIXPSERGEPSNEPSXEXNKXQEQSDVKLPKGKRKKKGRKSNENSEVIXPGFPPNHDQGEQYEHNRVHKPDRVHNPGHSHVHLPERNGHDPGRGHQDLDPDNEGELRHXRKREAPHVKNNAIISLRKDLNEDDHHHECLNVXQLLKYYGHGANSPISXDLFXYLCPALLYQIDSRLCIEHFDKLLVEDINKDKNLVPEDEANIGASAWICGIISIXVISLLSLLGVILVPIINQGCFKFLLXFLVALAVGXMSGDALLHLLPHSQGGHDHSHQHAHGHGHSHGHESNKFLEEYDAVLKGLVALGGIYLLFIIEHCIRMFKHYKQQRGKQKWFMKQNXEESXIGRKLSDHKLNNXPDSDWLQLKPLAGXDDSVVSEDRLNEXELXDLEGQQESPPKNYLCIEEEKIIDHSHSDGLHXIHEHDLHAAAHNHHGENKXVLRKHNHQWHHKHSHHSHGPCHSGSDLKEXGIANIAWMVIMGDGIHNFSDGLAIGAAFSAGLXGGISXSIAVFCHELPHELGDFAVLLKAGMXVKQAIVYNLLSAMMAYIGMLIGXAVGQYANNIXLWIFAVXAGMFLYVALVDMLPEMLHGDGDNEEHGFCPVGQFILQNLGLLFGFAIMLVIALYEDKIVFDIQF

SEQ ID NO: 25629 - protein, 654 aa, Homo sapiens
  MOD_RES (5)..(5): Selenocysteine
  MOD_RES (24)..(24): Selenocysteine
  MOD_RES (26)..(26): Selenocysteine
  MOD_RES (67)..(67): Selenocysteine
  MOD_RES (72)..(72): Selenocysteine
  MOD_RES (164)..(164): Selenocysteine
  MOD_RES (171)..(171): Selenocysteine
  MOD_RES (177)..(177): Selenocysteine
  MOD_RES (185)..(185): Selenocysteine
  MOD_RES (187)..(187): Selenocysteine
  MOD_RES (204)..(204): Selenocysteine
  MOD_RES (214)..(214): Selenocysteine
  MOD_RES (234)..(234): Selenocysteine
  MOD_RES (244)..(244): Selenocysteine
  MOD_RES (246)..(246): Selenocysteine
  MOD_RES (258)..(258): Selenocysteine
  MOD_RES (261)..(261): Selenocysteine
  MOD_RES (264)..(264): Selenocysteine
  MOD_RES (283)..(283): Selenocysteine
  MOD_RES (309)..(309): Selenocysteine
  MOD_RES (362)..(363): Selenocysteine
  MOD_RES (371)..(371): Selenocysteine
  MOD_RES (375)..(375): Selenocysteine
  MOD_RES (378)..(378): Selenocysteine
  MOD_RES (385)..(385): Selenocysteine
  MOD_RES (411)..(411): Selenocysteine
  MOD_RES (491)..(491): Selenocysteine
  MOD_RES (535)..(537): Selenocysteine
  MOD_RES (564)..(564): Selenocysteine
  MOD_RES (575)..(575): Selenocysteine
  MOD_RES (598)..(598): Selenocysteine
  MOD_RES (600)..(600): Selenocysteine
  MOD_RES (617)..(617): Selenocysteine
  MOD_RES (621)..(621): Selenocysteine
MCFRXKLSVSWVPLFLLLSRVFSXEXDKPSAQDSRSRGSSGQPADLLQVLSAGDHPPHNHSRSLIKXLLEKXGCPRRRNGMQGDCNLCFEPDALLLIAGGNFEDQLREEVVQRVSLLLLYYIIHQEEICSSKLNMSNKEYKFYLHSLLSLRQDEDSSFLSQNEXEDILAFXRQYFDXSQSQCMEXKXLQKKSGIVSSEGANESXLPQLAAMIIXLSLQGVCLGQGNLPSPDYFXEYIFSSLNRXNXLRLSELDQLLNXLWXRSXCIKNEKIHQFQRKQNNIIXHDQDYSNFSSSMEKESEDGPVSWDQXCFSARQLVEIFLQKGLSLISKEDFKQMSPGIIQQLLSCSCHLPKDQQAKLPPXXLEKYGYSXVAVXLLXLGSMLGXALVLFHSCEENYRLILQLFVGLAVGXLSGDALLHLIPQVLGLHKQEAPEFGHFHESKGHIWKLMGLIGGIHGFFLIEKCFILLVSPNDKKSPEDSQAAEMPIGSMXASNRKCKAISLLAIMILVGDSLHNFADGLAIGAAFSSSSESGVXXXIAILCHEIPHEMGDFAVLLSSGLSMKXAILMNFISSLXAFMGLYIGLSVSADPCVQDWIFXVXAGMFLYLSLVEMLPEMXHVQXQRPWMMFLLQNFGLILGWLSLLLLAIYEQNIKI

SEQ ID NO: 25630 - protein, 690 aa, Homo sapiens
  MOD_RES (5)..(5): Selenocysteine
  MOD_RES (24)..(24): Selenocysteine
  MOD_RES (26)..(26): Selenocysteine
  MOD_RES (67)..(67): Selenocysteine
  MOD_RES (72)..(72): Selenocysteine
  MOD_RES (164)..(164): Selenocysteine
  MOD_RES (171)..(171): Selenocysteine
  MOD_RES (177)..(177): Selenocysteine
  MOD_RES (185)..(185): Selenocysteine
  MOD_RES (187)..(187): Selenocysteine
  MOD_RES (204)..(204): Selenocysteine
  MOD_RES (214)..(214): Selenocysteine
  MOD_RES (234)..(234): Selenocysteine
  MOD_RES (244)..(244): Selenocysteine
  MOD_RES (246)..(246): Selenocysteine
  MOD_RES (258)..(258): Selenocysteine
  MOD_RES (261)..(261): Selenocysteine
  MOD_RES (264)..(264): Selenocysteine
  MOD_RES (283)..(283): Selenocysteine
  MOD_RES (309)..(309): Selenocysteine
  MOD_RES (362)..(363): Selenocysteine
  MOD_RES (371)..(371): Selenocysteine
  MOD_RES (375)..(375): Selenocysteine
  MOD_RES (378)..(378): Selenocysteine
  MOD_RES (385)..(385): Selenocysteine
  MOD_RES (411)..(411): Selenocysteine
  MOD_RES (507)..(507): Selenocysteine
  MOD_RES (527)..(527): Selenocysteine
  MOD_RES (571)..(573): Selenocysteine
  MOD_RES (600)..(600): Selenocysteine
  MOD_RES (611)..(611): Selenocysteine
  MOD_RES (634)..(634): Selenocysteine
  MOD_RES (636)..(636): Selenocysteine
  MOD_RES (653)..(653): Selenocysteine
  MOD_RES (657)..(657): Selenocysteine
MCFRXKLSVSWVPLFLLLSRVFSXEXDKPSAQDSRSRGSSGQPADLLQVLSAGDHPPHNHSRSLIKXLLEKXGCPRRRNGMQGDCNLCFEPDALLLIAGGNFEDQLREEVVQRVSLLLLYYIIHQEEICSSKLNMSNKEYKFYLHSLLSLRQDEDSSFLSQNEXEDILAFXRQYFDXSQSQCMEXKXLQKKSGIVSSEGANESXLPQLAAMIIXLSLQGVCLGQGNLPSPDYFXEYIFSSLNRXNXLRLSELDQLLNXLWXRSXCIKNEKIHQFQRKQNNIIXHDQDYSNFSSSMEKESEDGPVSWDQXCFSARQLVEIFLQKGLSLISKEDFKQMSPGIIQQLLSCSCHLPKDQQAKLPPXXLEKYGYSXVAVXLLXLGSMLGXALVLFHSCEENYRLILQLFVGLAVGXLSGDALLHLIPQVLGLHKQEAPEFGHFHESKGHIWKLMGLIGGIHGFFLIEKCFILLVSPNDKGLSLVNGHVGHSHHLALNSELSDQAGRGKSASXIQLKSPEDSQAAEMPIGSMXASNRKCKAISLLAIMILVGDSLHNFADGLAIGAAFSSSSESGVXXXIAILCHEIPHEMGDFAVLLSSGLSMKXAILMNFISSLXAFMGLYIGLSVSADPCVQDWIFXVXAGMFLYLSLVEMLPEMXHVQXQRPWMMFLLQNFGLILGWLSLLLLAIYEQNIKI

SEQ ID NO: 25631 - protein, 691 aa, Homo sapiens
  MOD_RES (5)..(5): Selenocysteine
  MOD_RES (24)..(24): Selenocysteine
  MOD_RES (26)..(26): Selenocysteine
  MOD_RES (67)..(67): Selenocysteine
  MOD_RES (72)..(72): Selenocysteine
  MOD_RES (164)..(164): Selenocysteine
  MOD_RES (171)..(171): Selenocysteine
  MOD_RES (177)..(177): Selenocysteine
  MOD_RES (185)..(185): Selenocysteine
  MOD_RES (187)..(187): Selenocysteine
  MOD_RES (204)..(204): Selenocysteine
  MOD_RES (214)..(214): Selenocysteine
  MOD_RES (234)..(234): Selenocysteine
  MOD_RES (244)..(244): Selenocysteine
  MOD_RES (246)..(246): Selenocysteine
  MOD_RES (258)..(258): Selenocysteine
  MOD_RES (261)..(261): Selenocysteine
  MOD_RES (264)..(264): Selenocysteine
  MOD_RES (283)..(283): Selenocysteine
  MOD_RES (309)..(309): Selenocysteine
  MOD_RES (362)..(363): Selenocysteine
  MOD_RES (371)..(371): Selenocysteine
  MOD_RES (375)..(375): Selenocysteine
  MOD_RES (378)..(378): Selenocysteine
  MOD_RES (385)..(385): Selenocysteine
  MOD_RES (411)..(411): Selenocysteine
  MOD_RES (508)..(508): Selenocysteine
  MOD_RES (528)..(528): Selenocysteine
  MOD_RES (572)..(574): Selenocysteine
  MOD_RES (601)..(601): Selenocysteine
  MOD_RES (612)..(612): Selenocysteine
  MOD_RES (635)..(635): Selenocysteine
  MOD_RES (637)..(637): Selenocysteine
  MOD_RES (654)..(654): Selenocysteine
  MOD_RES (658)..(658): Selenocysteine
MCFRXKLSVSWVPLFLLLSRVFSXEXDKPSAQDSRSRGSSGQPADLLQVLSAGDHPPHNHSRSLIKXLLEKXGCPRRRNGMQGDCNLCFEPDALLLIAGGNFEDQLREEVVQRVSLLLLYYIIHQEEICSSKLNMSNKEYKFYLHSLLSLRQDEDSSFLSQNEXEDILAFXRQYFDXSQSQCMEXKXLQKKSGIVSSEGANESXLPQLAAMIIXLSLQGVCLGQGNLPSPDYFXEYIFSSLNRXNXLRLSELDQLLNXLWXRSXCIKNEKIHQFQRKQNNIIXHDQDYSNFSSSMEKESEDGPVSWDQXCFSARQLVEIFLQKGLSLISKEDFKQMSPGIIQQLLSCSCHLPKDQQAKLPPXXLEKYGYSXVAVXLLXLGSMLGXALVLFHSCEENYRLILQLFVGLAVGXLSGDALLHLIPQVLGLHKQEAPEFGHFHESKGHIWKLMGLIGGIHGFFLIEKCFILLVSPNDKQGLSLVNGHVGHSHHLALNSELSDQAGRGKSASXIQLKSPEDSQAAEMPIGSMXASNRKCKAISLLAIMILVGDSLHNFADGLAIGAAFSSSSESGVXXXIAILCHEIPHEMGDFAVLLSSGLSMKXAILMNFISSLXAFMGLYIGLSVSADPCVQDWIFXVXAGMFLYLSLVEMLPEMXHVQXQRPWMMFLLQNFGLILGWLSLLLLAIYEQNIKI

SEQ ID NO: 25632 - protein, 557 aa, Homo sapiens
  MOD_RES (30)..(30): Selenocysteine
  MOD_RES (37)..(37): Selenocysteine
  MOD_RES (43)..(43): Selenocysteine
  MOD_RES (51)..(51): Selenocysteine
  MOD_RES (53)..(53): Selenocysteine
  MOD_RES (70)..(70): Selenocysteine
  MOD_RES (80)..(80): Selenocysteine
  MOD_RES (100)..(100): Selenocysteine
  MOD_RES (110)..(110): Selenocysteine
  MOD_RES (112)..(112): Selenocysteine
  MOD_RES (124)..(124): Selenocysteine
  MOD_RES (127)..(127): Selenocysteine
  MOD_RES (130)..(130): Selenocysteine
  MOD_RES (149)..(149): Selenocysteine
  MOD_RES (175)..(175): Selenocysteine
  MOD_RES (228)..(229): Selenocysteine
  MOD_RES (237)..(237): Selenocysteine
  MOD_RES (241)..(241): Selenocysteine
  MOD_RES (244)..(244): Selenocysteine
  MOD_RES (251)..(251): Selenocysteine
  MOD_RES (277)..(277): Selenocysteine
  MOD_RES (374)..(374): Selenocysteine
  MOD_RES (394)..(394): Selenocysteine
  MOD_RES (438)..(440): Selenocysteine
  MOD_RES (467)..(467): Selenocysteine
  MOD_RES (478)..(478): Selenocysteine
  MOD_RES (501)..(501): Selenocysteine
  MOD_RES (503)..(503): Selenocysteine
  MOD_RES (520)..(520): Selenocysteine
  MOD_RES (524)..(524): Selenocysteine
MSNKEYKFYLHSLLSLRQDEDSSFLSQNEXEDILAFXRQYFDXSQSQCMEXKXLQKKSGIVSSEGANESXLPQLAAMIIXLSLQGVCLGQGNLPSPDYFXEYIFSSLNRXNXLRLSELDQLLNXLWXRSXCIKNEKIHQFQRKQNNIIXHDQDYSNFSSSMEKESEDGPVSWDQXCFSARQLVEIFLQKGLSLISKEDFKQMSPGIIQQLLSCSCHLPKDQQAKLPPXXLEKYGYSXVAVXLLXLGSMLGXALVLFHSCEENYRLILQLFVGLAVGXLSGDALLHLIPQVLGLHKQEAPEFGHFHESKGHIWKLMGLIGGIHGFFLIEKCFILLVSPNDKQGLSLVNGHVGHSHHLALNSELSDQAGRGKSASXIQLKSPEDSQAAEMPIGSMXASNRKCKAISLLAIMILVGDSLHNFADGLAIGAAFSSSSESGVXXXIAILCHEIPHEMGDFAVLLSSGLSMKXAILMNFISSLXAFMGLYIGLSVSADPCVQDWIFXVXAGMFLYLSLVEMLPEMXHVQXQRPWMMFLLQNFGLILGWLSLLLLAIYEQNIKI

SEQ ID NO: 25633 - protein, 239 aa, Homo sapiens
  MOD_RES (23)..(23): Selenocysteine
  MOD_RES (25)..(25): Selenocysteine
  MOD_RES (53)..(53): Selenocysteine
  MOD_RES (65)..(65): Selenocysteine
  MOD_RES (148)..(148): Selenocysteine
  MOD_RES (227)..(227): Selenocysteine
MMGSPEQNHYLAQLFGLYGENGXLXAGGLARLLHSLGLGRVQGLRLGQHGPLXGRAASPAADNSXHRPQNPELSVDVWAGMPLGPSGWGDLEESKAPHLPRGPAPSGLDLLHRLLLLDHSLADHLNEDCLNGSQLLVNFGLSPAAPLXPRQFALLCPALLYQIDSRVCIGAPAPAPPGDLLSALLQSALAVLLLSLPSPLSLLLLRLLGPRLLRPLLGFLGALAVGXLCGDALLHLLPH

SEQ ID NO: 25634 - protein, 123 aa, Homo sapiens
  MOD_RES (52)..(52): Selenocysteine
  MOD_RES (54)..(54): Selenocysteine
  MOD_RES (82)..(82): Selenocysteine
  MOD_RES (94)..(94): Selenocysteine
MMGSPVSHLLAGFCVWVVLGWVGGSVPNLGPAEQEQNHYLAQLFGLYGENGXLXAGGLARLLHSLGLGRVQGLRLGQHGPLXGRAASPAADNSXHRPQNPELSVDVWAGMPLGPSGWGDLEES

SEQ ID NO: 25635 - protein, 126 aa, Homo sapiens
  MOD_RES (52)..(52): Selenocysteine
  MOD_RES (54)..(54): Selenocysteine
  MOD_RES (82)..(82): Selenocysteine
  MOD_RES (94)..(94): Selenocysteine
MMGSPVSHLLAGFCVWVVLGWVGGSVPNLGPAEQEQNHYLAQLFGLYGENGXLXAGGLARLLHSLGLGRVQGLRLGQHGPLXGRAASPAADNSXHRPQNPELSVDVWAGMPLGPSGWGDLEESKAP

SEQ ID NO: 25636 - protein, 129 aa, Homo sapiens
  MOD_RES (52)..(52): Selenocysteine
  MOD_RES (54)..(54): Selenocysteine
  MOD_RES (82)..(82): Selenocysteine
  MOD_RES (94)..(94): Selenocysteine
MMGSPVSHLLAGFCVWVVLGWVGGSVPNLGPAEQEQNHYLAQLFGLYGENGXLXAGGLARLLHSLGLGRVQGLRLGQHGPLXGRAASPAADNSXHRPQNPELSVDVWAGMPLGPSGWGDLEESKAPHLP

SEQ ID NO: 25637 - protein, 156 aa, Homo sapiens
  MOD_RES (52)..(52): Selenocysteine
  MOD_RES (54)..(54): Selenocysteine
  MOD_RES (82)..(82): Selenocysteine
  MOD_RES (94)..(94): Selenocysteine
MMGSPVSHLLAGFCVWVVLGWVGGSVPNLGPAEQEQNHYLAQLFGLYGENGXLXAGGLARLLHSLGLGRVQGLRLGQHGPLXGRAASPAADNSXHRPQNPELSVDVWAGMPLGPSGWGDLEESKAPHLPRGPAPSGLDLLHRLLLLDHSLADHLNE

SEQ ID NO: 25638 - protein, 540 aa, Homo sapiens
  MOD_RES (52)..(52): Selenocysteine
  MOD_RES (54)..(54): Selenocysteine
  MOD_RES (82)..(82): Selenocysteine
  MOD_RES (94)..(94): Selenocysteine
  MOD_RES (177)..(177): Selenocysteine
  MOD_RES (256)..(256): Selenocysteine
  MOD_RES (327)..(327): Selenocysteine
  MOD_RES (381)..(381): Selenocysteine
  MOD_RES (384)..(384): Selenocysteine
  MOD_RES (397)..(397): Selenocysteine
  MOD_RES (416)..(417): Selenocysteine
  MOD_RES (474)..(474): Selenocysteine
  MOD_RES (481)..(481): Selenocysteine
  MOD_RES (506)..(506): Selenocysteine
  MOD_RES (527)..(527): Selenocysteine
  MOD_RES (537)..(538): Selenocysteine
MMGSPVSHLLAGFCVWVVLGWVGGSVPNLGPAEQEQNHYLAQLFGLYGENGXLXAGGLARLLHSLGLGRVQGLRLGQHGPLXGRAASPAADNSXHRPQNPELSVDVWAGMPLGPSGWGDLEESKAPHLPRGPAPSGLDLLHRLLLLDHSLADHLNEDCLNGSQLLVNFGLSPAAPLXPRQFALLCPALLYQIDSRVCIGAPAPAPPGDLLSALLQSALAVLLLSLPSPLSLLLLRLLGPRLLRPLLGFLGALAVGXLCGDALLHLLPHAQEGRHAGPGGLPEKDLGPGLSVLGGLFLLFVLENMLGLLRHRGLRPRCCRRKRRNLEXRNLDPENGSGMALQPLQAAPEPGAQGQREKNSQHPPALAPPGHQGHSHGHQGGXDIXWMVLLGDGLHNLXDGLAIGAAFSDGFSSGLSXXLAVFCHELPHELGDFAMLLQSGLSFRRLLLLSLVSGALGLGGAVLGVGLSLGPVPLXPWVFGVXAGVFLYVALVDMLPALLRPPEPLPXPHVLLQGLGLLLGGGLMLAIXLLEERLLPVXXEG

SEQ ID NO: 25639 - protein, 704 aa, Homo sapiens
  MOD_RES (12)..(12): Selenocysteine
  MOD_RES (19)..(19): Selenocysteine
  MOD_RES (30)..(30): Selenocysteine
  MOD_RES (54)..(54): Selenocysteine
  MOD_RES (65)..(65): Selenocysteine
  MOD_RES (77)..(77): Selenocysteine
  MOD_RES (106)..(106): Selenocysteine
  MOD_RES (120)..(120): Selenocysteine
  MOD_RES (187)..(188): Selenocysteine
  MOD_RES (200)..(200): Selenocysteine
  MOD_RES (227)..(227): Selenocysteine
  MOD_RES (301)..(301): Selenocysteine
  MOD_RES (312)..(312): Selenocysteine
  MOD_RES (365)..(365): Selenocysteine
  MOD_RES (379)..(379): Selenocysteine
  MOD_RES (385)..(385): Selenocysteine
  MOD_RES (402)..(402): Selenocysteine
  MOD_RES (405)..(405): Selenocysteine
  MOD_RES (410)..(410): Selenocysteine
  MOD_RES (465)..(465): Selenocysteine
  MOD_RES (500)..(500): Selenocysteine
  MOD_RES (540)..(540): Selenocysteine
  MOD_RES (569)..(569): Selenocysteine
  MOD_RES (573)..(573): Selenocysteine
  MOD_RES (596)..(596): Selenocysteine
  MOD_RES (620)..(620): Selenocysteine
  MOD_RES (629)..(629): Selenocysteine
  MOD_RES (642)..(642): Selenocysteine
  MOD_RES (664)..(664): Selenocysteine
  MOD_RES (689)..(689): Selenocysteine
  MOD_RES (697)..(697): Selenocysteine
MEDERKNGAYGXPQKYDPXFKGPIYNRGCXDIICCVFLLLAIVGYVAVGIIAWXHGDPRKVIYPXDSRGEFCGQKGXKNENKPYLFYFNIVKCASPLVLLEFQCPXPQICVEKCPDRYLXYLNARSSRDFEYYKQFCVPGFKNNKGVAEVLQDGDCPAVLIPSKPLARRCFPAIHAYKGVLMVGNEXXYEDGHGSRKNIXDLVEGAKKANGVLEARQLAMRIFEDYXVSWYWIIIGLVIAMAMSLLFIILLRFLAGIMVWVMIIMVILVLGYGIFHCYMEYSRLRGEAGSDVSLVDLGFQXDFRVYLHLRQXWLAFMIILSILEVIIILLLIFLRKRILIAIALIKEASRAVGYVMCSLLYPLVXFFLLCLCIAYWASXAVFLSXSNEAVYKIFDDSPCPFXAKXCNPEXFPSSNESRQCPNARCQFAFYGGESGYHRALLGLQIFNAFMFFWLANFVLALGQVXLAGAFASYYWALRKPDDLPAFPLFSAFGRALRYHXGSLAFGALILAIVQIIRVILEYLDQRLKAAENKFAKCLMXCLKCCFWCLEKFIKFLNRNAYIMIAIYGXNFCXSARNAFFLLMRNIIRVAVLDKVXDFLFLLGKLLIVGSVGILAFFFFXHRIRIVQDXAPPLNYYWVPILXVIVGSYLIAHGFFSVYGMCVDXLFLCFLEDLERNDGSAERPYFMSSXLKKLLNKXNKKAAES

SEQ ID NO: 25640 - protein, 170 aa, Homo sapiens
  MOD_RES (12)..(12): Selenocysteine
  MOD_RES (19)..(19): Selenocysteine
  MOD_RES (53)..(53): Selenocysteine
  MOD_RES (67)..(67): Selenocysteine
  MOD_RES (134)..(135): Selenocysteine
  MOD_RES (147)..(147): Selenocysteine
MEDERKNGAYGXPQKYDPXFKGPIYNRNKPYLFYFNIVKCASPLVLLEFQCPXPQICVEKCPDRYLXYLNARSSRDFEYYKQFCVPGFKNNKGVAEVLQDGDCPAVLIPSKPLARRCFPAIHAYKGVLMVGNEXXYEDGHGSRKNIXDLVEGAKKANGVLEARQLAMRIF

SEQ ID NO: 25641 - protein, 95 aa, Homo sapiens
  MOD_RES (14)..(14): Selenocysteine
  MOD_RES (21)..(21): Selenocysteine
  MOD_RES (32)..(32): Selenocysteine
  MOD_RES (56)..(56): Selenocysteine
  MOD_RES (67)..(67): Selenocysteine
  MOD_RES (79)..(79): Selenocysteine
  MOD_RES (93)..(93): Selenocysteine
MGDERPHYYGKHGXPQKYDPXFKGPIYNRGCXDIICCVFLLLAIVGYVAVGIIAWXHGDPRKVIYPXDSRGEFCGQKGXKNENISLLHGVLPXAW

SEQ ID NO: 25642 - protein, 706 aa, Homo sapiens
  MOD_RES (14)..(14): Selenocysteine
  MOD_RES (21)..(21): Selenocysteine
  MOD_RES (32)..(32): Selenocysteine
  MOD_RES (56)..(56): Selenocysteine
  MOD_RES (67)..(67): Selenocysteine
  MOD_RES (79)..(79): Selenocysteine
  MOD_RES (108)..(108): Selenocysteine
  MOD_RES (122)..(122): Selenocysteine
  MOD_RES (189)..(190): Selenocysteine
  MOD_RES (202)..(202): Selenocysteine
  MOD_RES (229)..(229): Selenocysteine
  MOD_RES (303)..(303): Selenocysteine
  MOD_RES (314)..(314): Selenocysteine
  MOD_RES (367)..(367): Selenocysteine
  MOD_RES (381)..(381): Selenocysteine
  MOD_RES (387)..(387): Selenocysteine
  MOD_RES (404)..(404): Selenocysteine
  MOD_RES (407)..(407): Selenocysteine
  MOD_RES (412)..(412): Selenocysteine
  MOD_RES (467)..(467): Selenocysteine
  MOD_RES (502)..(502): Selenocysteine
  MOD_RES (542)..(542): Selenocysteine
  MOD_RES (571)..(571): Selenocysteine
  MOD_RES (575)..(575): Selenocysteine
  MOD_RES (598)..(598): Selenocysteine
  MOD_RES (622)..(622): Selenocysteine
  MOD_RES (631)..(631): Selenocysteine
  MOD_RES (644)..(644): Selenocysteine
  MOD_RES (666)..(666): Selenocysteine
  MOD_RES (691)..(691): Selenocysteine
  MOD_RES (699)..(699): Selenocysteine
MGDERPHYYGKHGXPQKYDPXFKGPIYNRGCXDIICCVFLLLAIVGYVAVGIIAWXHGDPRKVIYPXDSRGEFCGQKGXKNENKPYLFYFNIVKCASPLVLLEFQCPXPQICVEKCPDRYLXYLNARSSRDFEYYKQFCVPGFKNNKGVAEVLQDGDCPAVLIPSKPLARRCFPAIHAYKGVLMVGNEXXYEDGHGSRKNIXDLVEGAKKANGVLEARQLAMRIFEDYXVSWYWIIIGLVIAMAMSLLFIILLRFLAGIMVWVMIIMVILVLGYGIFHCYMEYSRLRGEAGSDVSLVDLGFQXDFRVYLHLRQXWLAFMIILSILEVIIILLLIFLRKRILIAIALIKEASRAVGYVMCSLLYPLVXFFLLCLCIAYWASXAVFLSXSNEAVYKIFDDSPCPFXAKXCNPEXFPSSNESRQCPNARCQFAFYGGESGYHRALLGLQIFNAFMFFWLANFVLALGQVXLAGAFASYYWALRKPDDLPAFPLFSAFGRALRYHXGSLAFGALILAIVQIIRVILEYLDQRLKAAENKFAKCLMXCLKCCFWCLEKFIKFLNRNAYIMIAIYGXNFCXSARNAFFLLMRNIIRVAVLDKVXDFLFLLGKLLIVGSVGILAFFFFXHRIRIVQDXAPPLNYYWVPILXVIVGSYLIAHGFFSVYGMCVDXLFLCFLEDLERNDGSAERPYFMSSXLKKLLNKXNKKAAES

SEQ ID NO: 25643 - protein, 711 aa, Homo sapiens
  MOD_RES (14)..(14): Selenocysteine
  MOD_RES (21)..(21): Selenocysteine
  MOD_RES (32)..(32): Selenocysteine
  MOD_RES (56)..(56): Selenocysteine
  MOD_RES (67)..(67): Selenocysteine
  MOD_RES (79)..(79): Selenocysteine
  MOD_RES (108)..(108): Selenocysteine
  MOD_RES (122)..(122): Selenocysteine
  MOD_RES (189)..(190): Selenocysteine
  MOD_RES (202)..(202): Selenocysteine
  MOD_RES (229)..(229): Selenocysteine
  MOD_RES (303)..(303): Selenocysteine
  MOD_RES (314)..(314): Selenocysteine
  MOD_RES (367)..(367): Selenocysteine
  MOD_RES (381)..(381): Selenocysteine
  MOD_RES (387)..(387): Selenocysteine
  MOD_RES (404)..(404): Selenocysteine
  MOD_RES (407)..(407): Selenocysteine
  MOD_RES (412)..(412): Selenocysteine
  MOD_RES (467)..(467): Selenocysteine
  MOD_RES (502)..(502): Selenocysteine
  MOD_RES (542)..(542): Selenocysteine
  MOD_RES (571)..(571): Selenocysteine
  MOD_RES (575)..(575): Selenocysteine
  MOD_RES (598)..(598): Selenocysteine
  MOD_RES (622)..(622): Selenocysteine
  MOD_RES (631)..(631): Selenocysteine
  MOD_RES (644)..(644): Selenocysteine
  MOD_RES (666)..(666): Selenocysteine
MGDERPHYYGKHGXPQKYDPXFKGPIYNRGCXDIICCVFLLLAIVGYVAVGIIAWXHGDPRKVIYPXDSRGEFCGQKGXKNENKPYLFYFNIVKCASPLVLLEFQCPXPQICVEKCPDRYLXYLNARSSRDFEYYKQFCVPGFKNNKGVAEVLQDGDCPAVLIPSKPLARRCFPAIHAYKGVLMVGNEXXYEDGHGSRKNIXDLVEGAKKANGVLEARQLAMRIFEDYXVSWYWIIIGLVIAMAMSLLFIILLRFLAGIMVWVMIIMVILVLGYGIFHCYMEYSRLRGEAGSDVSLVDLGFQXDFRVYLHLRQXWLAFMIILSILEVIIILLLIFLRKRILIAIALIKEASRAVGYVMCSLLYPLVXFFLLCLCIAYWASXAVFLSXSNEAVYKIFDDSPCPFXAKXCNPEXFPSSNESRQCPNARCQFAFYGGESGYHRALLGLQIFNAFMFFWLANFVLALGQVXLAGAFASYYWALRKPDDLPAFPLFSAFGRALRYHXGSLAFGALILAIVQIIRVILEYLDQRLKAAENKFAKCLMXCLKCCFWCLEKFIKFLNRNAYIMIAIYGXNFCXSARNAFFLLMRNIIRVAVLDKVXDFLFLLGKLLIVGSVGILAFFFFXHRIRIVQDXAPPLNYYWVPILXVIVGSYLIAHGFFSVYGMCVDXLFLCFCEDLERNDGSQERPYFMSPELRDILLKGSAEEGKRAEAEE

SEQ ID NO: 25644 - protein, 146 aa, Homo sapiens
  MOD_RES (14)..(14): Selenocysteine
  MOD_RES (21)..(21): Selenocysteine
  MOD_RES (55)..(55): Selenocysteine
  MOD_RES (69)..(69): Selenocysteine
  MOD_RES (136)..(137): Selenocysteine
MGDERPHYYGKHGXPQKYDPXFKGPIYNRNKPYLFYFNIVKCASPLVLLEFQCPXPQICVEKCPDRYLXYLNARSSRDFEYYKQFCVPGFKNNKGVAEVLQDGDCPAVLIPSKPLARRCFPAIHAYKGVLMVGNEXXYEDGHGSRK

SEQ ID NO: 25645 - protein, 42 aa, Homo sapiens
  MOD_RES (14)..(14): Selenocysteine
  MOD_RES (21)..(21): Selenocysteine
MGDERPHYYGKHGXPQKYDPXFKGPIYNSLDSWRPSKGDLPH

SEQ ID NO: 25646 - protein, 11 aa, Homo sapiens
  MOD_RES (6)..(7): Selenocysteine
MVGNEXXYEDG

SEQ ID NO: 25647 - protein, 124 aa, Homo sapiens
  MOD_RES (1)..(1): Any amino acid
  MOD_RES (12)..(12): Selenocysteine
  MOD_RES (41)..(41): Selenocysteine
  MOD_RES (45)..(45): Selenocysteine
  MOD_RES (79)..(80): Selenocysteine
  MOD_RES (89)..(89): Selenocysteine
  MOD_RES (100)..(100): Selenocysteine
XAENKFAKCLMXCLKCCFWCLEKFIKFLNRNAYIMIAIYGXNFCXSARNAFFLLMRNIIRDPGFLLLHPPYQDRAGYSXXPQLLLGSYXDGDRWLLLDCXRFLQRLWHVCGHAVPLLLGGPGEE

SEQ ID NO: 25648 - protein, 148 aa, Homo sapiens
  MOD_RES (1)..(1): Any amino acid
  MOD_RES (8)..(8): Selenocysteine
  MOD_RES (12)..(12): Selenocysteine
  MOD_RES (35)..(35): Selenocysteine
  MOD_RES (59)..(59): Selenocysteine
  MOD_RES (68)..(68): Selenocysteine
  MOD_RES (81)..(81): Selenocysteine
  MOD_RES (103)..(103): Selenocysteine
XMIAIYGXNFCXSARNAFFLLMRNIIRVAVLDKVXDFLFLLGKLLIVGSVGILAFFFFXHRIRIVQDXAPPLNYYWVPILXVIVGSYLIAHGFFSVYGMCVDXLFLCFCEDLERNDGSQERPYFMSPELRDILLKGSAEEGKRAEAEE

SEQ ID NO: 25649 - protein, 664 aa, Homo sapiens
  MOD_RES (9)..(9): Selenocysteine
  MOD_RES (19)..(19): Selenocysteine
  MOD_RES (34)..(34): Selenocysteine
  MOD_RES (43)..(43): Selenocysteine
  MOD_RES (47)..(47): Selenocysteine
  MOD_RES (76)..(76): Selenocysteine
  MOD_RES (104)..(104): Selenocysteine
  MOD_RES (111)..(111): Selenocysteine
  MOD_RES (119)..(120): Selenocysteine
  MOD_RES (122)..(123): Selenocysteine
  MOD_RES (130)..(130): Selenocysteine
  MOD_RES (135)..(135): Selenocysteine
  MOD_RES (159)..(159): Selenocysteine
  MOD_RES (167)..(167): Selenocysteine
  MOD_RES (192)..(192): Selenocysteine
  MOD_RES (204)..(204): Selenocysteine
  MOD_RES (213)..(213): Selenocysteine
  MOD_RES (235)..(235): Selenocysteine
  MOD_RES (284)..(284): Selenocysteine
  MOD_RES (366)..(366): Selenocysteine
  MOD_RES (370)..(370): Selenocysteine
  MOD_RES (395)..(395): Selenocysteine
  MOD_RES (398)..(398): Selenocysteine
  MOD_RES (412)..(412): Selenocysteine
  MOD_RES (421)..(421): Selenocysteine
  MOD_RES (425)..(425): Selenocysteine
  MOD_RES (434)..(434): Selenocysteine
  MOD_RES (436)..(436): Selenocysteine
  MOD_RES (443)..(443): Selenocysteine
  MOD_RES (447)..(447): Selenocysteine
  MOD_RES (457)..(457): Selenocysteine
  MOD_RES (460)..(460): Selenocysteine
  MOD_RES (468)..(468): Selenocysteine
  MOD_RES (514)..(514): Selenocysteine
  MOD_RES (523)..(523): Selenocysteine
  MOD_RES (525)..(525): Selenocysteine
  MOD_RES (527)..(527): Selenocysteine
  MOD_RES (538)..(538): Selenocysteine
  MOD_RES (544)..(544): Selenocysteine
  MOD_RES (560)..(560): Selenocysteine
  MOD_RES (573)..(573): Selenocysteine
  MOD_RES (577)..(577): Selenocysteine
  MOD_RES (588)..(588): Selenocysteine
  MOD_RES (602)..(602): Selenocysteine
  MOD_RES (618)..(618): Selenocysteine
  MOD_RES (645)..(645): Selenocysteine
MRRLSLSPXFSMGFHLLVXVSLLFSHVDHVIAEXEMEGEGNEXGECXGSYYCKKGVILPIWEPQDPSFGDKIARAXVYFVAMVYMFLGVSIIADRFMSSIEVIXSQEKEIXIKKPNGEXXKXXVRIWNEXVSNLXLMALGSSAPEILLSVIEVCGHNFXAGDLGPSXIVGSAAFNMFIIIALCVYVVPDGEXRKIKHLRVFFVXAAWSIFAYXWLYIILSVISPGVVEVWEGLLXFFFFPICVVFAWVADRRLLFYKYVYKRYRAGKQRGMIIEHEGDRPSSKXEIEMDGKVVNSHVENFLDGALVLEVDERDQDDEEARREMARILKELKQKHPDKEIEQLIELANYQVLSQQQKSRAFYRIQAXRLMXGAGNILKRHAADQARKAVSMHEVNXEVXENDPVSKIFFEQGXYQCLENCGXVALXIIRRGGDLXNXVFVDFRXEDGXANAGSDYEFXEGXVVFKPGDXQKEIRVGIIDDDIFEEDENFLVHLSNVKVSSEASEDGILEANHVSXLACLGSPSXAXVXIFDDDHAGIFXFEEPVXHVSESIGIMEVKVLRXSGARGNVIVPYKXIEGXARGGGEDFEDXCGELEFQNDEIVKXISVKVIDDEEYEKNKXFFLEIGEPRLVEMSEKKGRSLPLEYLXVRNMRKSAVSPLCLRNQNG

SEQ ID NO: 25650 - protein, 73 aa, Homo sapiens
  MOD_RES (12)..(12): Selenocysteine
  MOD_RES (22)..(22): Selenocysteine
  MOD_RES (37)..(37): Selenocysteine
  MOD_RES (46)..(46): Selenocysteine
  MOD_RES (50)..(50): Selenocysteine
MYNMRRLSLSPXFSMGFHLLVXVSLLFSHVDHVIAEXEMEGEGNEXGECXGSYYCKKGVILPIWEPQDPSFGD

SEQ ID NO: 25651 - protein, 87 aa, Homo sapiens
  MOD_RES (12)..(12): Selenocysteine
  MOD_RES (22)..(22): Selenocysteine
  MOD_RES (37)..(37): Selenocysteine
  MOD_RES (46)..(46): Selenocysteine
  MOD_RES (50)..(50): Selenocysteine
  MOD_RES (79)..(79): Selenocysteine
MYNMRRLSLSPXFSMGFHLLVXVSLLFSHVDHVIAEXEMEGEGNEXGECXGSYYCKKGVILPIWEPQDPSFGDKIARAXVYFVAMVY

SEQ ID NO: 25652 - protein, 937 aa, Homo sapiens
  MOD_RES (12)..(12): Selenocysteine
  MOD_RES (22)..(22): Selenocysteine
  MOD_RES (37)..(37): Selenocysteine
  MOD_RES (46)..(46): Selenocysteine
  MOD_RES (50)..(50): Selenocysteine
  MOD_RES (79)..(79): Selenocysteine
  MOD_RES (107)..(107): Selenocysteine
  MOD_RES (114)..(114): Selenocysteine
  MOD_RES (122)..(123): Selenocysteine
  MOD_RES (125)..(126): Selenocysteine
  MOD_RES (133)..(133): Selenocysteine
  MOD_RES (138)..(138): Selenocysteine
  MOD_RES (162)..(162): Selenocysteine
  MOD_RES (170)..(170): Selenocysteine
  MOD_RES (195)..(195): Selenocysteine
  MOD_RES (207)..(207): Selenocysteine
  MOD_RES (216)..(216): Selenocysteine
  MOD_RES (238)..(238): Selenocysteine
  MOD_RES (287)..(287): Selenocysteine
  MOD_RES (369)..(369): Selenocysteine
  MOD_RES (373)..(373): Selenocysteine
  MOD_RES (398)..(398): Selenocysteine
  MOD_RES (401)..(401): Selenocysteine
  MOD_RES (415)..(415): Selenocysteine
  MOD_RES (424)..(424): Selenocysteine
  MOD_RES (428)..(428): Selenocysteine
  MOD_RES (437)..(437): Selenocysteine
  MOD_RES (439)..(439): Selenocysteine
  MOD_RES (446)..(446): Selenocysteine
  MOD_RES (450)..(450): Selenocysteine
  MOD_RES (460)..(460): Selenocysteine
  MOD_RES (463)..(463): Selenocysteine
  MOD_RES (471)..(471): Selenocysteine
  MOD_RES (517)..(517): Selenocysteine
  MOD_RES (526)..(526): Selenocysteine
  MOD_RES (528)..(528): Selenocysteine
  MOD_RES (530)..(530): Selenocysteine
  MOD_RES (541)..(541): Selenocysteine
  MOD_RES (547)..(547): Selenocysteine
  MOD_RES (563)..(563): Selenocysteine
  MOD_RES (576)..(576): Selenocysteine
  MOD_RES (580)..(580): Selenocysteine
  MOD_RES (591)..(591): Selenocysteine
  MOD_RES (607)..(607): Selenocysteine
  MOD_RES (641)..(641): Selenocysteine
  MOD_RES (643)..(643): Selenocysteine
  MOD_RES (653)..(653): Selenocysteine
  MOD_RES (674)..(674): Selenocysteine
  MOD_RES (689)..(689): Selenocysteine
  MOD_RES (697)..(697): Selenocysteine
  MOD_RES (705)..(705): Selenocysteine
  MOD_RES (717)..(717): Selenocysteine
  MOD_RES (746)..(746): Selenocysteine
  MOD_RES (759)..(759): Selenocysteine
  MOD_RES (779)..(779): Selenocysteine
  MOD_RES (792)..(792): Selenocysteine
  MOD_RES (800)..(800): Selenocysteine
  MOD_RES (809)..(809): Selenocysteine
  MOD_RES (814)..(814): Selenocysteine
  MOD_RES (822)..(822): Selenocysteine
  MOD_RES (835)..(835): Selenocysteine
  MOD_RES (870)..(870): Selenocysteine
  MOD_RES (876)..(876): Selenocysteine
  MOD_RES (879)..(879): Selenocysteine
  MOD_RES (906)..(906): Selenocysteine
  MOD_RES (911)..(911): Selenocysteine
MYNMRRLSLSPXFSMGFHLLVXVSLLFSHVDHVIAEXEMEGEGNEXGECXGSYYCKKGVILPIWEPQDPSFGDKIARAXVYFVAMVYMFLGVSIIADRFMSSIEVIXSQEKEIXIKKPNGEXXKXXVRIWNEXVSNLXLMALGSSAPEILLSVIEVCGHNFXAGDLGPSXIVGSAAFNMFIIIALCVYVVPDGEXRKIKHLRVFFVXAAWSIFAYXWLYIILSVISPGVVEVWEGLLXFFFFPICVVFAWVADRRLLFYKYVYKRYRAGKQRGMIIEHEGDRPSSKXEIEMDGKVVNSHVENFLDGALVLEVDERDQDDEEARREMARILKELKQKHPDKEIEQLIELANYQVLSQQQKSRAFYRIQAXRLMXGAGNILKRHAADQARKAVSMHEVNXEVXENDPVSKIFFEQGXYQCLENCGXVALXIIRRGGDLXNXVFVDFRXEDGXANAGSDYEFXEGXVVFKPGDXQKEIRVGIIDDDIFEEDENFLVHLSNVKVSSEASEDGILEANHVSXLACLGSPSXAXVXIFDDDHAGIFXFEEPVXHVSESIGIMEVKVLRXSGARGNVIVPYKXIEGXARGGGEDFEDXCGELEFQNDEIVKIIXIRIFDREEYEKECSFSLVLEEPKWIRRGMKGGFXIXDEYDDKQPLXSKEEEERRIAEMGRPILGEHXKLEVIIEESYEFKSXVDKLIKKXNLALVVGXNSWREQFIEAIXVSAGEDDDDDECGEEKLPSCFDYVMHFLXVFWKVLFAFVPPXEYWNGWACFIVSILMIGLLXAFIGDLASHFGCXIGLKDSVXAVVFVALGXSVPDXFASKVAAXQDQYADASIGNVXGSNAVNVFLGIGVAWSIAAIYHAANGEQFKVSPGXLAFSVXLFXIFAFINVGVLLYRRRPEIGGELGGPRXAKLLXSCLFVLLWLLYIFFSSLEAYCHIKGF

SEQ ID NO: 25653 - protein, 965 aa, Homo sapiens
  MOD_RES (12)..(12): Selenocysteine
  MOD_RES (22)..(22): Selenocysteine
  MOD_RES (37)..(37): Selenocysteine
  MOD_RES (46)..(46): Selenocysteine
  MOD_RES (50)..(50): Selenocysteine
  MOD_RES (79)..(79): Selenocysteine
  MOD_RES (107)..(107): Selenocysteine
  MOD_RES (114)..(114): Selenocysteine
  MOD_RES (122)..(123): Selenocysteine
  MOD_RES (125)..(126): Selenocysteine
  MOD_RES (133)..(133): Selenocysteine
  MOD_RES (138)..(138): Selenocysteine
  MOD_RES (162)..(162): Selenocysteine
  MOD_RES (170)..(170): Selenocysteine
  MOD_RES (195)..(195): Selenocysteine
  MOD_RES (207)..(207): Selenocysteine
  MOD_RES (216)..(216): Selenocysteine
  MOD_RES (238)..(238): Selenocysteine
  MOD_RES (287)..(287): Selenocysteine
  MOD_RES (369)..(369): Selenocysteine
  MOD_RES (373)..(373): Selenocysteine
  MOD_RES (398)..(398): Selenocysteine
  MOD_RES (401)..(401): Selenocysteine
  MOD_RES (415)..(415): Selenocysteine
  MOD_RES (424)..(424): Selenocysteine
  MOD_RES (428)..(428): Selenocysteine
  MOD_RES (437)..(437): Selenocysteine
  MOD_RES (439)..(439): Selenocysteine
  MOD_RES (446)..(446): Selenocysteine
  MOD_RES (450)..(450): Selenocysteine
  MOD_RES (460)..(460): Selenocysteine
  MOD_RES (463)..(463): Selenocysteine
  MOD_RES (471)..(471): Selenocysteine
  MOD_RES (517)..(517): Selenocysteine
  MOD_RES (526)..(526): Selenocysteine
  MOD_RES (528)..(528): Selenocysteine
  MOD_RES (530)..(530): Selenocysteine
  MOD_RES (541)..(541): Selenocysteine
  MOD_RES (547)..(547): Selenocysteine
  MOD_RES (563)..(563): Selenocysteine
  MOD_RES (576)..(576): Selenocysteine
  MOD_RES (580)..(580): Selenocysteine
  MOD_RES (591)..(591): Selenocysteine
  MOD_RES (607)..(607): Selenocysteine
  MOD_RES (641)..(641): Selenocysteine
  MOD_RES (643)..(643): Selenocysteine
  MOD_RES (666)..(666): Selenocysteine
  MOD_RES (669)..(669): Selenocysteine
  MOD_RES (681)..(681): Selenocysteine
  MOD_RES (702)..(702): Selenocysteine
  MOD_RES (717)..(717): Selenocysteine
  MOD_RES (725)..(725): Selenocysteine
  MOD_RES (733)..(733): Selenocysteine
  MOD_RES (745)..(745): Selenocysteine
  MOD_RES (774)..(774): Selenocysteine
  MOD_RES (787)..(787): Selenocysteine
  MOD_RES (807)..(807): Selenocysteine
  MOD_RES (820)..(820): Selenocysteine
  MOD_RES (828)..(828): Selenocysteine
  MOD_RES (837)..(837): Selenocysteine
  MOD_RES (842)..(842): Selenocysteine
  MOD_RES (850)..(850): Selenocysteine
  MOD_RES (863)..(863): Selenocysteine
  MOD_RES (898)..(898): Selenocysteine
  MOD_RES (904)..(904): Selenocysteine
  MOD_RES (907)..(907): Selenocysteine
  MOD_RES (934)..(934): Selenocysteine
  MOD_RES (939)..(939): Selenocysteine
MYNMRRLSLSPXFSMGFHLLVXVSLLFSHVDHVIAEXEMEGEGNEXGECXGSYYCKKGVILPIWEPQDPSFGDKIARAXVYFVAMVYMFLGVSIIADRFMSSIEVIXSQEKEIXIKKPNGEXXKXXVRIWNEXVSNLXLMALGSSAPEILLSVIEVCGHNFXAGDLGPSXIVGSAAFNMFIIIALCVYVVPDGEXRKIKHLRVFFVXAAWSIFAYXWLYIILSVISPGVVEVWEGLLXFFFFPICVVFAWVADRRLLFYKYVYKRYRAGKQRGMIIEHEGDRPSSKXEIEMDGKVVNSHVENFLDGALVLEVDERDQDDEEARREMARILKELKQKHPDKEIEQLIELANYQVLSQQQKSRAFYRIQAXRLMXGAGNILKRHAADQARKAVSMHEVNXEVXENDPVSKIFFEQGXYQCLENCGXVALXIIRRGGDLXNXVFVDFRXEDGXANAGSDYEFXEGXVVFKPGDXQKEIRVGIIDDDIFEEDENFLVHLSNVKVSSEASEDGILEANHVSXLACLGSPSXAXVXIFDDDHAGIFXFEEPVXHVSESIGIMEVKVLRXSGARGNVIVPYKXIEGXARGGGEDFEDXCGELEFQNDEIVKIIXIRIFDREEYEKECSFSLVLEEPKWIRRGMKGGFXIXGKYLFGQPVFRKVHAREHPILSXVIXIADEYDDKQPLXSKEEEERRIAEMGRPILGEHXKLEVIIEESYEFKSXVDKLIKKXNLALVVGXNSWREQFIEAIXVSAGEDDDDDECGEEKLPSCFDYVMHFLXVFWKVLFAFVPPXEYWNGWACFIVSILMIGLLXAFIGDLASHFGCXIGLKDSVXAVVFVALGXSVPDXFASKVAAXQDQYADASIGNVXGSNAVNVFLGIGVAWSIAAIYHAANGEQFKVSPGXLAFSVXLFXIFAFINVGVLLYRRRPEIGGELGGPRXAKLLXSCLFVLLWLLYIFFSSLEAYCHIKGF

SEQ ID NO: 25654 - protein, 968 aa, Homo sapiens
  MOD_RES (12)..(12): Selenocysteine
  MOD_RES (22)..(22): Selenocysteine
  MOD_RES (37)..(37): Selenocysteine
  MOD_RES (46)..(46): Selenocysteine
  MOD_RES (50)..(50): Selenocysteine
  MOD_RES (79)..(79): Selenocysteine
  MOD_RES (107)..(107): Selenocysteine
  MOD_RES (114)..(114): Selenocysteine
  MOD_RES (122)..(123): Selenocysteine
  MOD_RES (125)..(126): Selenocysteine
  MOD_RES (133)..(133): Selenocysteine
  MOD_RES (138)..(138): Selenocysteine
  MOD_RES (162)..(162): Selenocysteine
  MOD_RES (170)..(170): Selenocysteine
  MOD_RES (195)..(195): Selenocysteine
  MOD_RES (207)..(207): Selenocysteine
  MOD_RES (216)..(216): Selenocysteine
  MOD_RES (238)..(238): Selenocysteine
  MOD_RES (287)..(287): Selenocysteine
  MOD_RES (369)..(369): Selenocysteine
  MOD_RES (373)..(373): Selenocysteine
  MOD_RES (398)..(398): Selenocysteine
  MOD_RES (401)..(401): Selenocysteine
  MOD_RES (415)..(415): Selenocysteine
  MOD_RES (424)..(424): Selenocysteine
  MOD_RES (428)..(428): Selenocysteine
  MOD_RES (437)..(437): Selenocysteine
  MOD_RES (439)..(439): Selenocysteine
  MOD_RES (446)..(446): Selenocysteine
  MOD_RES (450)..(450): Selenocysteine
  MOD_RES (460)..(460): Selenocysteine
  MOD_RES (463)..(463): Selenocysteine
  MOD_RES (471)..(471): Selenocysteine
  MOD_RES (517)..(517): Selenocysteine
  MOD_RES (526)..(526): Selenocysteine
  MOD_RES (528)..(528): Selenocysteine
  MOD_RES (530)..(530): Selenocysteine
  MOD_RES (541)..(541): Selenocysteine
  MOD_RES (547)..(547): Selenocysteine
  MOD_RES (563)..(563): Selenocysteine
  MOD_RES (576)..(576): Selenocysteine
  MOD_RES (580)..(580): Selenocysteine
  MOD_RES (591)..(591): Selenocysteine
  MOD_RES (605)..(605): Selenocysteine
  MOD_RES (621)..(621): Selenocysteine
  MOD_RES (649)..(649): Selenocysteine
  MOD_RES (651)..(651): Selenocysteine
  MOD_RES (669)..(669): Selenocysteine
  MOD_RES (672)..(672): Selenocysteine
  MOD_RES (684)..(684): Selenocysteine
  MOD_RES (705)..(705): Selenocysteine
  MOD_RES (720)..(720): Selenocysteine
  MOD_RES (728)..(728): Selenocysteine
  MOD_RES (736)..(736): Selenocysteine
  MOD_RES (748)..(748): Selenocysteine
  MOD_RES (777)..(777): Selenocysteine
  MOD_RES (790)..(790): Selenocysteine
  MOD_RES (810)..(810): Selenocysteine
  MOD_RES (823)..(823): Selenocysteine
  MOD_RES (831)..(831): Selenocysteine
  MOD_RES (840)..(840): Selenocysteine
  MOD_RES (845)..(845): Selenocysteine
  MOD_RES (853)..(853): Selenocysteine
  MOD_RES (866)..(866): Selenocysteine
  MOD_RES (901)..(901): Selenocysteine
  MOD_RES (907)..(907): Selenocysteine
  MOD_RES (910)..(910): Selenocysteine
  MOD_RES (937)..(937): Selenocysteine
  MOD_RES (942)..(942): Selenocysteine
MYNMRRLSLSPXFSMGFHLLVXVSLLFSHVDHVIAEXEMEGEGNEXGECXGSYYCKKGVILPIWEPQDPSFGDKIARAXVYFVAMVYMFLGVSIIADRFMSSIEVIXSQEKEIXIKKPNGEXXKXXVRIWNEXVSNLXLMALGSSAPEILLSVIEVCGHNFXAGDLGPSXIVGSAAFNMFIIIALCVYVVPDGEXRKIKHLRVFFVXAAWSIFAYXWLYIILSVISPGVVEVWEGLLXFFFFPICVVFAWVADRRLLFYKYVYKRYRAGKQRGMIIEHEGDRPSSKXEIEMDGKVVNSHVENFLDGALVLEVDERDQDDEEARREMARILKELKQKHPDKEIEQLIELANYQVLSQQQKSRAFYRIQAXRLMXGAGNILKRHAADQARKAVSMHEVNXEVXENDPVSKIFFEQGXYQCLENCGXVALXIIRRGGDLXNXVFVDFRXEDGXANAGSDYEFXEGXVVFKPGDXQKEIRVGIIDDDIFEEDENFLVHLSNVKVSSEASEDGILEANHVSXLACLGSPSXAXVXIFDDDHAGIFXFEEPVXHVSESIGIMEVKVLRXSGARGNVIVPYKXIEGXARGGGEDFEDXCGELEFQNDEIVKXISVKVIDDEEYEKNKXFFLEIGEPRLVEMSEKKALLLNELGGFXIXGQPVFRKVHAREHPILSXVIXIADEYDDKQPLXSKEEEERRIAEMGRPILGEHXKLEVIIEESYEFKSXVDKLIKKXNLALVVGXNSWREQFIEAIXVSAGEDDDDDECGEEKLPSCFDYVMHFLXVFWKVLFAFVPPXEYWNGWACFIVSILMIGLLXAFIGDLASHFGCXIGLKDSVXAVVFVALGXSVPDXFASKVAAXQDQYADASIGNVXGSNAVNVFLGIGVAWSIAAIYHAANGEQFKVSPGXLAFSVXLFXIFAFINVGVLLYRRRPEIGGELGGPRXAKLLXSCLFVLLWLLYIFFSSLEAYCHIKGF

SEQ ID NO: 25655 - protein, 973 aa, Homo sapiens
  MOD_RES (12)..(12): Selenocysteine
  MOD_RES (22)..(22): Selenocysteine
  MOD_RES (37)..(37): Selenocysteine
  MOD_RES (46)..(46): Selenocysteine
  MOD_RES (50)..(50): Selenocysteine
  MOD_RES (79)..(79): Selenocysteine
  MOD_RES (107)..(107): Selenocysteine
  MOD_RES (114)..(114): Selenocysteine
  MOD_RES (122)..(123): Selenocysteine
  MOD_RES (125)..(126): Selenocysteine
  MOD_RES (133)..(133): Selenocysteine
  MOD_RES (138)..(138): Selenocysteine
  MOD_RES (162)..(162): Selenocysteine
  MOD_RES (170)..(170): Selenocysteine
  MOD_RES (195)..(195): Selenocysteine
  MOD_RES (207)..(207): Selenocysteine
  MOD_RES (216)..(216): Selenocysteine
  MOD_RES (238)..(238): Selenocysteine
  MOD_RES (287)..(287): Selenocysteine
  MOD_RES (369)..(369): Selenocysteine
  MOD_RES (373)..(373): Selenocysteine
  MOD_RES (398)..(398): Selenocysteine
  MOD_RES (401)..(401): Selenocysteine
  MOD_RES (415)..(415): Selenocysteine
  MOD_RES (424)..(424): Selenocysteine
  MOD_RES (428)..(428): Selenocysteine
  MOD_RES (437)..(437): Selenocysteine
  MOD_RES (439)..(439): Selenocysteine
  MOD_RES (446)..(446): Selenocysteine
  MOD_RES (450)..(450): Selenocysteine
  MOD_RES (460)..(460): Selenocysteine
  MOD_RES (463)..(463): Selenocysteine
  MOD_RES (471)..(471): Selenocysteine
  MOD_RES (517)..(517): Selenocysteine
  MOD_RES (526)..(526): Selenocysteine
  MOD_RES (528)..(528): Selenocysteine
  MOD_RES (530)..(530): Selenocysteine
  MOD_RES (541)..(541): Selenocysteine
  MOD_RES (547)..(547): Selenocysteine
  MOD_RES (563)..(563): Selenocysteine
  MOD_RES (576)..(576): Selenocysteine
  MOD_RES (580)..(580): Selenocysteine
  MOD_RES (591)..(591): Selenocysteine
  MOD_RES (605)..(605): Selenocysteine
  MOD_RES (621)..(621): Selenocysteine
  MOD_RES (649)..(649): Selenocysteine
  MOD_RES (651)..(651): Selenocysteine
  MOD_RES (674)..(674): Selenocysteine
  MOD_RES (677)..(677): Selenocysteine
  MOD_RES (689)..(689): Selenocysteine
  MOD_RES (710)..(710): Selenocysteine
  MOD_RES (725)..(725): Selenocysteine
  MOD_RES (733)..(733): Selenocysteine
  MOD_RES (741)..(741): Selenocysteine
  MOD_RES (753)..(753): Selenocysteine
  MOD_RES (782)..(782): Selenocysteine
  MOD_RES (795)..(795): Selenocysteine
  MOD_RES (815)..(815): Selenocysteine
  MOD_RES (828)..(828): Selenocysteine
  MOD_RES (836)..(836): Selenocysteine
  MOD_RES (845)..(845): Selenocysteine
  MOD_RES (850)..(850): Selenocysteine
  MOD_RES (858)..(858): Selenocysteine
  MOD_RES (871)..(871): Selenocysteine
  MOD_RES (906)..(906): Selenocysteine
  MOD_RES (912)..(912): Selenocysteine
  MOD_RES (915)..(915): Selenocysteine
  MOD_RES (942)..(942): Selenocysteine
  MOD_RES (947)..(947): Selenocysteine
MYNMRRLSLSPXFSMGFHLLVXVSLLFSHVDHVIAEXEMEGEGNEXGECXGSYYCKKGVILPIWEPQDPSFGDKIARAXVYFVAMVYMFLGVSIIADRFMSSIEVIXSQEKEIXIKKPNGEXXKXXVRIWNEXVSNLXLMALGSSAPEILLSVIEVCGHNFXAGDLGPSXIVGSAAFNMFIIIALCVYVVPDGEXRKIKHLRVFFVXAAWSIFAYXWLYIILSVISPGVVEVWEGLLXFFFFPICVVFAWVADRRLLFYKYVYKRYRAGKQRGMIIEHEGDRPSSKXEIEMDGKVVNSHVENFLDGALVLEVDERDQDDEEARREMARILKELKQKHPDKEIEQLIELANYQVLSQQQKSRAFYRIQAXRLMXGAGNILKRHAADQARKAVSMHEVNXEVXENDPVSKIFFEQGXYQCLENCGXVALXIIRRGGDLXNXVFVDFRXEDGXANAGSDYEFXEGXVVFKPGDXQKEIRVGIIDDDIFEEDENFLVHLSNVKVSSEASEDGILEANHVSXLACLGSPSXAXVXIFDDDHAGIFXFEEPVXHVSESIGIMEVKVLRXSGARGNVIVPYKXIEGXARGGGEDFEDXCGELEFQNDEIVKXISVKVIDDEEYEKNKXFFLEIGEPRLVEMSEKKALLLNELGGFXIXGKYLFGQPVFRKVHAREHPILSXVIXIADEYDDKQPLXSKEEEERRIAEMGRPILGEHXKLEVIIEESYEFKSXVDKLIKKXNLALVVGXNSWREQFIEAIXVSAGEDDDDDECGEEKLPSCFDYVMHFLXVFWKVLFAFVPPXEYWNGWACFIVSILMIGLLXAFIGDLASHFGCXIGLKDSVXAVVFVALGXSVPDXFASKVAAXQDQYADASIGNVXGSNAVNVFLGIGVAWSIAAIYHAANGEQFKVSPGXLAFSVXLFXIFAFINVGVLLYRRRPEIGGELGGPRXAKLLXSCLFVLLWLLYIFFSSLEAYCHIKGF

SEQ ID NO: 25656 - protein, 135 aa, Homo sapiens
  MOD_RES (42)..(42): Selenocysteine
  MOD_RES (45)..(45): Selenocysteine
  MOD_RES (61)..(62): Selenocysteine
  MOD_RES (68)..(68): Selenocysteine
  MOD_RES (79)..(79): Selenocysteine
  MOD_RES (97)..(97): Selenocysteine
  MOD_RES (101)..(101): Selenocysteine
  MOD_RES (124)..(124): Selenocysteine
MVLRSGICGLSPHRIFPSLLVVVALVGLLPVLRSHGLQLSPXASXIRSSEPPRERSIGDVXXAPPEVXPESRPVNHSVXDHGMKPRKAFPVLGIDYXHVRXPFEISLWILLACLMKIGFHVIPXISSIVPESCLL

SEQ ID NO: 25657 - protein, 555 aa, Homo sapiens
  MOD_RES (42)..(42): Selenocysteine
  MOD_RES (45)..(45): Selenocysteine
  MOD_RES (61)..(62): Selenocysteine
  MOD_RES (68)..(68): Selenocysteine
  MOD_RES (79)..(79): Selenocysteine
  MOD_RES (97)..(97): Selenocysteine
  MOD_RES (101)..(101): Selenocysteine
  MOD_RES (124)..(124): Selenocysteine
  MOD_RES (152)..(152): Selenocysteine
  MOD_RES (183)..(183): Selenocysteine
  MOD_RES (188)..(188): Selenocysteine
  MOD_RES (197)..(197): Selenocysteine
  MOD_RES (270)..(270): Selenocysteine
  MOD_RES (319)..(319): Selenocysteine
  MOD_RES (323)..(323): Selenocysteine
  MOD_RES (377)..(378): Selenocysteine
  MOD_RES (392)..(392): Selenocysteine
  MOD_RES (402)..(402): Selenocysteine
  MOD_RES (412)..(412): Selenocysteine
  MOD_RES (417)..(417): Selenocysteine
  MOD_RES (433)..(433): Selenocysteine
  MOD_RES (445)..(445): Selenocysteine
  MOD_RES (482)..(482): Selenocysteine
  MOD_RES (486)..(486): Selenocysteine
  MOD_RES (491)..(491): Selenocysteine
  MOD_RES (532)..(533): Selenocysteine
  MOD_RES (543)..(543): Selenocysteine
MVLRSGICGLSPHRIFPSLLVVVALVGLLPVLRSHGLQLSPXASXIRSSEPPRERSIGDVXXAPPEVXPESRPVNHSVXDHGMKPRKAFPVLGIDYXHVRXPFEISLWILLACLMKIGFHVIPXISSIVPESCLLIVVGLLVGGLIKGVGEXPPFLQSDVFFLFLLPPIILDAGYFLPLRQFXENLGXILIFAVVGXLWNAFFLGGLMYAVCLVGGEQINNIGLLDNLLFGSIISAVDPVAVLAVFEEIHINELLHILVFGESLLNDAVXVVLYHLFEEFANYEHVGIVDIFLGFLSFFVVALGGVLVGVVYGVIAAFXSRFXSHIRVIEPLFVFLYSYMAYLSAELFHLSGIMALIASGVVMRPYVEANISHKSHXXIKYFLKMWSSVSEXLIFIFLGVSXVAGSHHWNWXFVISXLLFCLIARVLGVLGLXWFINKFRIVKLXPKDQFIIAYGGLRGAIAFSLGYLLDKKHFPMCDLFLXAIIXVIFFXVFVQVLGQGRAGPCLGDPHRLFPWKERKACDLKCDSSPSSXXNLLCDLGRAXPPFWASVSSIVK

SEQ ID NO: 25658 - protein, 815 aa, Homo sapiens
  MOD_RES (42)..(42): Selenocysteine
  MOD_RES (45)..(45): Selenocysteine
  MOD_RES (61)..(62): Selenocysteine
  MOD_RES (68)..(68): Selenocysteine
  MOD_RES (79)..(79): Selenocysteine
  MOD_RES (97)..(97): Selenocysteine
  MOD_RES (101)..(101): Selenocysteine
  MOD_RES (124)..(124): Selenocysteine
  MOD_RES (152)..(152): Selenocysteine
  MOD_RES (183)..(183): Selenocysteine
  MOD_RES (188)..(188): Selenocysteine
  MOD_RES (197)..(197): Selenocysteine
  MOD_RES (270)..(270): Selenocysteine
  MOD_RES (319)..(319): Selenocysteine
  MOD_RES (323)..(323): Selenocysteine
  MOD_RES (377)..(378): Selenocysteine
  MOD_RES (392)..(392): Selenocysteine
  MOD_RES (402)..(402): Selenocysteine
  MOD_RES (412)..(412): Selenocysteine
  MOD_RES (417)..(417): Selenocysteine
  MOD_RES (433)..(433): Selenocysteine
  MOD_RES (445)..(445): Selenocysteine
  MOD_RES (482)..(482): Selenocysteine
  MOD_RES (486)..(486): Selenocysteine
  MOD_RES (491)..(491): Selenocysteine
  MOD_RES (498)..(498): Selenocysteine
  MOD_RES (514)..(514): Selenocysteine
  MOD_RES (524)..(524): Selenocysteine
  MOD_RES (532)..(532): Selenocysteine
  MOD_RES (603)..(603): Selenocysteine
  MOD_RES (642)..(642): Selenocysteine
  MOD_RES (653)..(653): Selenocysteine
  MOD_RES (685)..(685): Selenocysteine
  MOD_RES (695)..(695): Selenocysteine
  MOD_RES (718)..(718): Selenocysteine
  MOD_RES (769)..(769): Selenocysteine
  MOD_RES (774)..(774): Selenocysteine
  MOD_RES (779)..(779): Selenocysteine
MVLRSGICGLSPHRIFPSLLVVVALVGLLPVLRSHGLQLSPXASXIRSSEPPRERSIGDVXXAPPEVXPESRPVNHSVXDHGMKPRKAFPVLGIDYXHVRXPFEISLWILLACLMKIGFHVIPXISSIVPESCLLIVVGLLVGGLIKGVGEXPPFLQSDVFFLFLLPPIILDAGYFLPLRQFXENLGXILIFAVVGXLWNAFFLGGLMYAVCLVGGEQINNIGLLDNLLFGSIISAVDPVAVLAVFEEIHINELLHILVFGESLLNDAVXVVLYHLFEEFANYEHVGIVDIFLGFLSFFVVALGGVLVGVVYGVIAAFXSRFXSHIRVIEPLFVFLYSYMAYLSAELFHLSGIMALIASGVVMRPYVEANISHKSHXXIKYFLKMWSSVSEXLIFIFLGVSXVAGSHHWNWXFVISXLLFCLIARVLGVLGLXWFINKFRIVKLXPKDQFIIAYGGLRGAIAFSLGYLLDKKHFPMCDLFLXAIIXVIFFXVFVQGMXIRPLVDLLAVKKKQEXKRSINEEIHXQFLDHLLXGIEDICGHYGHHHWKDKLNRFNKKYVKKCLIAGERSKEPQLIAFYHKMEMKQAIELVESGGMGKIPSAVSXVSMQNIHPKSLPSERILPALSKDKEEEIRKILRNNLQKXRQRLRSYNRHXLVADPYEEAWNQMLLRRQKARQLEQKINNYLXVPAHKLDSPXMSRARIGSDPLAYEPKEDLPVIXIDPASPQSPESVDLVNEELKGKVLGLSRDPAKVAEEDEDDDGGIMMRSKEXSSPGXDDVFXPAPSDSPSSQRIQRCLSDPGPHPEPGEGEPFFPKGQ

SEQ ID NO: 25659 - protein, 202 aa, Homo sapiens
  MOD_RES (70)..(70): Selenocysteine
  MOD_RES (79)..(79): Selenocysteine
  MOD_RES (104)..(104): Selenocysteine
  MOD_RES (137)..(137): Selenocysteine
  MOD_RES (153)..(153): Selenocysteine
  MOD_RES (158)..(158): Selenocysteine
MKKGPSGYGFNLHSDKSKPGQFIRSVDPDSPAEASGLRAQDRIVEVNGVCMEGKQHGDVVSAIRAGGDEXKLLVVDREXDEFFKKCRVIPSQEHLNGPLPVPFXNGEIQKENSREALAEAALESPRPALVRSASSDXSEELNSQDSPPKQDSXAPSSXSSSDPILDFNISLAMAKERAHQKRSSKRAPQMDWSKKNELFSNL

SEQ ID NO: 25660 - protein, 215 aa, Homo sapiens
  MOD_RES (71)..(71): Selenocysteine
  MOD_RES (95)..(95): Selenocysteine
  MOD_RES (174)..(174): Selenocysteine
  MOD_RES (190)..(190): Selenocysteine
  MOD_RES (195)..(195): Selenocysteine
MSADAAAGAPLPRLCCLEKGPNGYGFHLHGEKGKLGQYIRLVEPGSPAEKAGLLAGDRLVEVNGENVEKEXHQQVVSRIRAALNAVRLLVVDPEXDEQLQKLGVQVREELLRAQEAPGQAEPPAAAEVQGAGNENEPREADKSHPEQENSREALAEAALESPRPALVRSASSDXSEELNSQDSPPKQDSXAPSSXSSSDPILDFNISLAMAKERA

SEQ ID NO: 25661 - protein, 358 aa, Homo sapiens
  MOD_RES (71)..(71): Selenocysteine
  MOD_RES (95)..(95): Selenocysteine
  MOD_RES (156)..(156): Selenocysteine
  MOD_RES (226)..(226): Selenocysteine
  MOD_RES (235)..(235): Selenocysteine
  MOD_RES (260)..(260): Selenocysteine
  MOD_RES (293)..(293): Selenocysteine
  MOD_RES (309)..(309): Selenocysteine
  MOD_RES (314)..(314): Selenocysteine
MSADAAAGAPLPRLCCLEKGPNGYGFHLHGEKGKLGQYIRLVEPGSPAEKAGLLAGDRLVEVNGENVEKEXHQQVVSRIRAALNAVRLLVVDPEXDEQLQKLGVQVREELLRAQEAPGQAEPPAAAEVQGAGNENEPREADKSHPEQRELRPRLCXMKKGPSGYGFNLHSDKSKPGQFIRSVDPDSPAEASGLRAQDRIVEVNGVCMEGKQHGDVVSAIRAGGDEXKLLVVDREXDEFFKKCRVIPSQEHLNGPLPVPFXNGEIQKENSREALAEAALESPRPALVRSASSDXSEELNSQDSPPKQDSXAPSSXSSSDPILDFNISLAMAKERAHQKRSSKRAPQMDWSKKNELFSNL

SEQ ID NO: 25662 - protein, 35 aa, Homo sapiens
  MOD_RES (1)..(1): Any amino acid
  MOD_RES (5)..(5): Selenocysteine
  MOD_RES (14)..(14): Selenocysteine
XGDEXKLLVVDREXDEFFKKCRVIPSQEHLNGEQS

SEQ ID NO: 25663 - protein, 701 aa, Homo sapiens
  MOD_RES (82)..(82): Selenocysteine
  MOD_RES (84)..(84): Selenocysteine
  MOD_RES (87)..(87): Selenocysteine
  MOD_RES (102)..(102): Selenocysteine
  MOD_RES (130)..(130): Selenocysteine
  MOD_RES (140)..(141): Selenocysteine
  MOD_RES (177)..(177): Selenocysteine
  MOD_RES (219)..(219): Selenocysteine
  MOD_RES (235)..(235): Selenocysteine
  MOD_RES (240)..(240): Selenocysteine
  MOD_RES (250)..(250): Selenocysteine
  MOD_RES (262)..(262): Selenocysteine
  MOD_RES (266)..(266): Selenocysteine
  MOD_RES (314)..(314): Selenocysteine
  MOD_RES (318)..(318): Selenocysteine
  MOD_RES (341)..(341): Selenocysteine
  MOD_RES (345)..(345): Selenocysteine
  MOD_RES (349)..(349): Selenocysteine
  MOD_RES (352)..(352): Selenocysteine
  MOD_RES (362)..(362): Selenocysteine
  MOD_RES (372)..(372): Selenocysteine
  MOD_RES (382)..(382): Selenocysteine
  MOD_RES (393)..(393): Selenocysteine
  MOD_RES (398)..(398): Selenocysteine
  MOD_RES (404)..(404): Selenocysteine
  MOD_RES (410)..(410): Selenocysteine
  MOD_RES (432)..(432): Selenocysteine
  MOD_RES (435)..(435): Selenocysteine
  MOD_RES (444)..(444): Selenocysteine
  MOD_RES (502)..(502): Selenocysteine
  MOD_RES (504)..(504): Selenocysteine
  MOD_RES (513)..(514): Selenocysteine
  MOD_RES (521)..(521): Selenocysteine
  MOD_RES (529)..(530): Selenocysteine
  MOD_RES (558)..(559): Selenocysteine
  MOD_RES (583)..(583): Selenocysteine
  MOD_RES (590)..(592): Selenocysteine
  MOD_RES (605)..(605): Selenocysteine
  MOD_RES (633)..(633): Selenocysteine
  MOD_RES (638)..(638): Selenocysteine
  MOD_RES (641)..(641): Selenocysteine
  MOD_RES (645)..(645): Selenocysteine
  MOD_RES (677)..(677): Selenocysteine
  MOD_RES (696)..(696): Selenocysteine
MARRGWRRAPLRRGVGSSPRARRLMRPLWLLLAVGVFDWAGASDGGGGEARAMDEEIVSEKQAEESHRQDSANLLIFILLLXLXILXIWLFKHRRARFLHEXGLAMIYGLLVGLVLRYGIHVPSDVNNVXLSCEVQSSPXXLLVNVSGKFYEYMLKGEISSHELNNVQDNEMLRKVXFDPEVFFNILLPPIIFYAGYSLKRRHFFRNLGSILAYAFLGXAISCFVIGSIMYGCVXLMKVXGQLAGDFYFXDCLLFGAIVSAXDPVXVLAIFHELQVDVELYALLFGESVLNDAVAIVLSSSIVAYQPAGDNSHXFDVXAMFKSIGIFLGIFSGSFAMGAAXGVVXALVXKFXKLREFQLLEXGLFFLMSWSXFLLAEAWGFXGVVAVLFCGIXQAHYXYNNLSXESQHRXKQLFELLNFLAENFIFSYMGLXLFXFQNHVFNPXFVVGAFVAIFLGRAANIYPLSLLLNLGRRSKIGSNFQHMMMFAGLRGAMAFALAIRDXAXYARQMMFSXXLLIVFFXVWVFGGGXXAMLSCLHIRVGVDSDQEHLGVPENERRXXKAESAWLFRMWYNFDHNYLKPLLXHSGPPLXXXLPACCGPIARCLXSPQAYENQEQLKDDDSDLILNDGDISLXYGDSXVNXEPAXSSAPRRFMGNSSEDALDRELAFGDHELVIRGXRLVLPMDDSEPPLNLLDNXRHGPA

SEQ ID NO: 25664 - protein, 669 aa, Homo sapiens
  MOD_RES (82)..(82): Selenocysteine
  MOD_RES (84)..(84): Selenocysteine
  MOD_RES (87)..(87): Selenocysteine
  MOD_RES (102)..(102): Selenocysteine
  MOD_RES (130)..(130): Selenocysteine
  MOD_RES (140)..(141): Selenocysteine
  MOD_RES (145)..(145): Selenocysteine
  MOD_RES (187)..(187): Selenocysteine
  MOD_RES (203)..(203): Selenocysteine
  MOD_RES (208)..(208): Selenocysteine
  MOD_RES (218)..(218): Selenocysteine
  MOD_RES (230)..(230): Selenocysteine
  MOD_RES (234)..(234): Selenocysteine
  MOD_RES (282)..(282): Selenocysteine
  MOD_RES (286)..(286): Selenocysteine
  MOD_RES (309)..(309): Selenocysteine
  MOD_RES (313)..(313): Selenocysteine
  MOD_RES (317)..(317): Selenocysteine
  MOD_RES (320)..(320): Selenocysteine
  MOD_RES (330)..(330): Selenocysteine
  MOD_RES (340)..(340): Selenocysteine
  MOD_RES (350)..(350): Selenocysteine
  MOD_RES (361)..(361): Selenocysteine
  MOD_RES (366)..(366): Selenocysteine
  MOD_RES (372)..(372): Selenocysteine
  MOD_RES (378)..(378): Selenocysteine
  MOD_RES (400)..(400): Selenocysteine
  MOD_RES (403)..(403): Selenocysteine
  MOD_RES (412)..(412): Selenocysteine
  MOD_RES (470)..(470): Selenocysteine
  MOD_RES (472)..(472): Selenocysteine
  MOD_RES (481)..(482): Selenocysteine
  MOD_RES (489)..(489): Selenocysteine
  MOD_RES (497)..(498): Selenocysteine
  MOD_RES (526)..(527): Selenocysteine
  MOD_RES (551)..(551): Selenocysteine
  MOD_RES (558)..(560): Selenocysteine
  MOD_RES (573)..(573): Selenocysteine
  MOD_RES (601)..(601): Selenocysteine
  MOD_RES (606)..(606): Selenocysteine
  MOD_RES (609)..(609): Selenocysteine
  MOD_RES (613)..(613): Selenocysteine
  MOD_RES (645)..(645): Selenocysteine
  MOD_RES (664)..(664): Selenocysteine
MARRGWRRAPLRRGVGSSPRARRLMRPLWLLLAVGVFDWAGASDGGGGEARAMDEEIVSEKQAEESHRQDSANLLIFILLLXLXILXIWLFKHRRARFLHEXGLAMIYGLLVGLVLRYGIHVPSDVNNVXLSCEVQSSPXXLLVXFDPEVFFNILLPPIIFYAGYSLKRRHFFRNLGSILAYAFLGXAISCFVIGSIMYGCVXLMKVXGQLAGDFYFXDCLLFGAIVSAXDPVXVLAIFHELQVDVELYALLFGESVLNDAVAIVLSSSIVAYQPAGDNSHXFDVXAMFKSIGIFLGIFSGSFAMGAAXGVVXALVXKFXKLREFQLLEXGLFFLMSWSXFLLAEAWGFXGVVAVLFCGIXQAHYXYNNLSXESQHRXKQLFELLNFLAENFIFSYMGLXLFXFQNHVFNPXFVVGAFVAIFLGRAANIYPLSLLLNLGRRSKIGSNFQHMMMFAGLRGAMAFALAIRDXAXYARQMMFSXXLLIVFFXVWVFGGGXXAMLSCLHIRVGVDSDQEHLGVPENERRXXKAESAWLFRMWYNFDHNYLKPLLXHSGPPLXXXLPACCGPIARCLXSPQAYENQEQLKDDDSDLILNDGDISLXYGDSXVNXEPAXSSAPRRFMGNSSEDALDRELAFGDHELVIRGXRLVLPMDDSEPPLNLLDNXRHGPA

SEQ ID NO: 25665 - protein, 184 aa, Homo sapiens
  MOD_RES (30)..(30): Selenocysteine
  MOD_RES (32)..(32): Selenocysteine
  MOD_RES (35)..(35): Selenocysteine
  MOD_RES (50)..(50): Selenocysteine
  MOD_RES (78)..(78): Selenocysteine
  MOD_RES (88)..(89): Selenocysteine
  MOD_RES (125)..(125): Selenocysteine
  MOD_RES (167)..(167): Selenocysteine
  MOD_RES (183)..(183): Selenocysteine
MDEEIVSEKQAEESHRQDSANLLIFILLLXLXILXIWLFKHRRARFLHEXGLAMIYGLLVGLVLRYGIHVPSDVNNVXLSCEVQSSPXXLLVNVSGKFYEYMLKGEISSHELNNVQDNEMLRKVXFDPEVFFNILLPPIIFYAGYSLKRRHFFRNLGSILAYAFLGXAISCFVIGSIMYGCVXL

SEQ ID NO: 25666 - protein, 649 aa, Homo sapiens
  MOD_RES (30)..(30): Selenocysteine
  MOD_RES (32)..(32): Selenocysteine
  MOD_RES (35)..(35): Selenocysteine
  MOD_RES (50)..(50): Selenocysteine
  MOD_RES (78)..(78): Selenocysteine
  MOD_RES (88)..(89): Selenocysteine
  MOD_RES (125)..(125): Selenocysteine
  MOD_RES (167)..(167): Selenocysteine
  MOD_RES (183)..(183): Selenocysteine
  MOD_RES (188)..(188): Selenocysteine
  MOD_RES (198)..(198): Selenocysteine
  MOD_RES (210)..(210): Selenocysteine
  MOD_RES (214)..(214): Selenocysteine
  MOD_RES (262)..(262): Selenocysteine
  MOD_RES (266)..(266): Selenocysteine
  MOD_RES (289)..(289): Selenocysteine
  MOD_RES (293)..(293): Selenocysteine
  MOD_RES (297)..(297): Selenocysteine
  MOD_RES (300)..(300): Selenocysteine
  MOD_RES (310)..(310): Selenocysteine
  MOD_RES (320)..(320): Selenocysteine
  MOD_RES (330)..(330): Selenocysteine
  MOD_RES (341)..(341): Selenocysteine
  MOD_RES (346)..(346): Selenocysteine
  MOD_RES (352)..(352): Selenocysteine
  MOD_RES (358)..(358): Selenocysteine
  MOD_RES (380)..(380): Selenocysteine
  MOD_RES (383)..(383): Selenocysteine
  MOD_RES (392)..(392): Selenocysteine
  MOD_RES (450)..(450): Selenocysteine
  MOD_RES (452)..(452): Selenocysteine
  MOD_RES (461)..(462): Selenocysteine
  MOD_RES (469)..(469): Selenocysteine
  MOD_RES (477)..(478): Selenocysteine
  MOD_RES (506)..(507): Selenocysteine
  MOD_RES (531)..(531): Selenocysteine
  MOD_RES (538)..(540): Selenocysteine
  MOD_RES (553)..(553): Selenocysteine
  MOD_RES (581)..(581): Selenocysteine
  MOD_RES (586)..(586): Selenocysteine
  MOD_RES (589)..(589): Selenocysteine
  MOD_RES (593)..(593): Selenocysteine
  MOD_RES (625)..(625): Selenocysteine
  MOD_RES (644)..(644): Selenocysteine
MDEEIVSEKQAEESHRQDSANLLIFILLLXLXILXIWLFKHRRARFLHEXGLAMIYGLLVGLVLRYGIHVPSDVNNVXLSCEVQSSPXXLLVNVSGKFYEYMLKGEISSHELNNVQDNEMLRKVXFDPEVFFNILLPPIIFYAGYSLKRRHFFRNLGSILAYAFLGXAISCFVIGSIMYGCVXLMKVXGQLAGDFYFXDCLLFGAIVSAXDPVXVLAIFHELQVDVELYALLFGESVLNDAVAIVLSSSIVAYQPAGDNSHXFDVXAMFKSIGIFLGIFSGSFAMGAAXGVVXALVXKFXKLREFQLLEXGLFFLMSWSXFLLAEAWGFXGVVAVLFCGIXQAHYXYNNLSXESQHRXKQLFELLNFLAENFIFSYMGLXLFXFQNHVFNPXFVVGAFVAIFLGRAANIYPLSLLLNLGRRSKIGSNFQHMMMFAGLRGAMAFALAIRDXAXYARQMMFSXXLLIVFFXVWVFGGGXXAMLSCLHIRVGVDSDQEHLGVPENERRXXKAESAWLFRMWYNFDHNYLKPLLXHSGPPLXXXLPACCGPIARCLXSPQAYENQEQLKDDDSDLILNDGDISLXYGDSXVNXEPAXSSAPRRFMGNSSEDALDRELAFGDHELVIRGXRLVLPMDDSEPPLNLLDNXRHGPA

SEQ ID NO: 25667 - protein, 617 aa, Homo sapiens
  MOD_RES (30)..(30): Selenocysteine
  MOD_RES (32)..(32): Selenocysteine
  MOD_RES (35)..(35): Selenocysteine
  MOD_RES (50)..(50): Selenocysteine
  MOD_RES (78)..(78): Selenocysteine
  MOD_RES (88)..(89): Selenocysteine
  MOD_RES (93)..(93): Selenocysteine
  MOD_RES (135)..(135): Selenocysteine
  MOD_RES (151)..(151): Selenocysteine
  MOD_RES (156)..(156): Selenocysteine
  MOD_RES (166)..(166): Selenocysteine
  MOD_RES (178)..(178): Selenocysteine
  MOD_RES (182)..(182): Selenocysteine
  MOD_RES (230)..(230): Selenocysteine
  MOD_RES (234)..(234): Selenocysteine
  MOD_RES (257)..(257): Selenocysteine
  MOD_RES (261)..(261): Selenocysteine
  MOD_RES (265)..(265): Selenocysteine
  MOD_RES (268)..(268): Selenocysteine
  MOD_RES (278)..(278): Selenocysteine
  MOD_RES (288)..(288): Selenocysteine
  MOD_RES (298)..(298): Selenocysteine
  MOD_RES (309)..(309): Selenocysteine
  MOD_RES (314)..(314): Selenocysteine
  MOD_RES (320)..(320): Selenocysteine
  MOD_RES (326)..(326): Selenocysteine
  MOD_RES (348)..(348): Selenocysteine
  MOD_RES (351)..(351): Selenocysteine
  MOD_RES (360)..(360): Selenocysteine
  MOD_RES (418)..(418): Selenocysteine
  MOD_RES (420)..(420): Selenocysteine
  MOD_RES (429)..(430): Selenocysteine
  MOD_RES (437)..(437): Selenocysteine
  MOD_RES (445)..(446): Selenocysteine
  MOD_RES (474)..(475): Selenocysteine
  MOD_RES (499)..(499): Selenocysteine
  MOD_RES (506)..(508): Selenocysteine
  MOD_RES (521)..(521): Selenocysteine
  MOD_RES (549)..(549): Selenocysteine
  MOD_RES (554)..(554): Selenocysteine
  MOD_RES (557)..(557): Selenocysteine
  MOD_RES (561)..(561): Selenocysteine
  MOD_RES (593)..(593): Selenocysteine
  MOD_RES (612)..(612): Selenocysteine
MDEEIVSEKQAEESHRQDSANLLIFILLLXLXILXIWLFKHRRARFLHEXGLAMIYGLLVGLVLRYGIHVPSDVNNVXLSCEVQSSPXXLLVXFDPEVFFNILLPPIIFYAGYSLKRRHFFRNLGSILAYAFLGXAISCFVIGSIMYGCVXLMKVXGQLAGDFYFXDCLLFGAIVSAXDPVXVLAIFHELQVDVELYALLFGESVLNDAVAIVLSSSIVAYQPAGDNSHXFDVXAMFKSIGIFLGIFSGSFAMGAAXGVVXALVXKFXKLREFQLLEXGLFFLMSWSXFLLAEAWGFXGVVAVLFCGIXQAHYXYNNLSXESQHRXKQLFELLNFLAENFIFSYMGLXLFXFQNHVFNPXFVVGAFVAIFLGRAANIYPLSLLLNLGRRSKIGSNFQHMMMFAGLRGAMAFALAIRDXAXYARQMMFSXXLLIVFFXVWVFGGGXXAMLSCLHIRVGVDSDQEHLGVPENERRXXKAESAWLFRMWYNFDHNYLKPLLXHSGPPLXXXLPACCGPIARCLXSPQAYENQEQLKDDDSDLILNDGDISLXYGDSXVNXEPAXSSAPRRFMGNSSEDALDRELAFGDHELVIRGXRLVLPMDDSEPPLNLLDNXRHGPA

SEQ ID NO: 25668 - protein, 170 aa, Homo sapiens
  MOD_RES (27)..(28): Selenocysteine
  MOD_RES (52)..(52): Selenocysteine
  MOD_RES (59)..(61): Selenocysteine
  MOD_RES (74)..(74): Selenocysteine
  MOD_RES (102)..(102): Selenocysteine
  MOD_RES (107)..(107): Selenocysteine
  MOD_RES (110)..(110): Selenocysteine
  MOD_RES (114)..(114): Selenocysteine
  MOD_RES (146)..(146): Selenocysteine
  MOD_RES (165)..(165): Selenocysteine
MLSCLHIRVGVDSDQEHLGVPENERRXXKAESAWLFRMWYNFDHNYLKPLLXHSGPPLXXXLPACCGPIARCLXSPQAYENQEQLKDDDSDLILNDGDISLXYGDSXVNXEPAXSSAPRRFMGNSSEDALDRELAFGDHELVIRGXRLVLPMDDSEPPLNLLDNXRHGPA

SEQ ID NO: 25669 - protein, 33 aa, Homo sapiens
  MOD_RES (1)..(1): Any amino acid
XAMLSCLHIRVGVDSDQEHLKGPQLFLNHRSYL

SEQ ID NO: 25670 - protein, 207 aa, Homo sapiens
  MOD_RES (1)..(1): Any amino acid
  MOD_RES (10)..(11): Selenocysteine
  MOD_RES (18)..(18): Selenocysteine
  MOD_RES (26)..(27): Selenocysteine
  MOD_RES (57)..(57): Selenocysteine
  MOD_RES (64)..(64): Selenocysteine
  MOD_RES (85)..(86): Selenocysteine
  MOD_RES (110)..(110): Selenocysteine
  MOD_RES (117)..(119): Selenocysteine
  MOD_RES (132)..(132): Selenocysteine
  MOD_RES (160)..(160): Selenocysteine
  MOD_RES (165)..(165): Selenocysteine
  MOD_RES (168)..(168): Selenocysteine
  MOD_RES (172)..(172): Selenocysteine
  MOD_RES (204)..(204): Selenocysteine
XYARQMMFSXXLLIVFFXVWVFGGGXXAMLSCLHIRYCARLWGYRDELRHGLYPQGXHSLFGEXDRVGVDSDQEHLGVPENERRXXKAESAWLFRMWYNFDHNYLKPLLXHSGPPLXXXLPACCGPIARCLXSPQAYENQEQLKDDDSDLILNDGDISLXYGDSXVNXEPAXSSAPRRFMGNSSEDALDRELAFGDHELVIRGXRLV

SEQ ID NO: 25671 - protein, 782 aa, Homo sapiens
  MOD_RES (22)..(22): Selenocysteine
  MOD_RES (24)..(24): Selenocysteine
  MOD_RES (26)..(27): Selenocysteine
  MOD_RES (33)..(33): Selenocysteine
  MOD_RES (46)..(46): Selenocysteine
  MOD_RES (57)..(57): Selenocysteine
  MOD_RES (140)..(140): Selenocysteine
  MOD_RES (170)..(170): Selenocysteine
  MOD_RES (177)..(178): Selenocysteine
  MOD_RES (192)..(192): Selenocysteine
  MOD_RES (218)..(218): Selenocysteine
  MOD_RES (223)..(223): Selenocysteine
  MOD_RES (257)..(257): Selenocysteine
  MOD_RES (259)..(259): Selenocysteine
  MOD_RES (270)..(270): Selenocysteine
  MOD_RES (284)..(284): Selenocysteine
  MOD_RES (293)..(293): Selenocysteine
  MOD_RES (295)..(295): Selenocysteine
  MOD_RES (363)..(363): Selenocysteine
  MOD_RES (375)..(375): Selenocysteine
  MOD_RES (417)..(417): Selenocysteine
  MOD_RES (419)..(419): Selenocysteine
  MOD_RES (426)..(426): Selenocysteine
  MOD_RES (449)..(449): Selenocysteine
  MOD_RES (454)..(454): Selenocysteine
  MOD_RES (491)..(491): Selenocysteine
  MOD_RES (525)..(525): Selenocysteine
  MOD_RES (535)..(535): Selenocysteine
  MOD_RES (551)..(551): Selenocysteine
  MOD_RES (558)..(558): Selenocysteine
  MOD_RES (590)..(590): Selenocysteine
  MOD_RES (610)..(610): Selenocysteine
  MOD_RES (627)..(627): Selenocysteine
  MOD_RES (643)..(644): Selenocysteine
  MOD_RES (652)..(652): Selenocysteine
  MOD_RES (658)..(658): Selenocysteine
  MOD_RES (686)..(686): Selenocysteine
  MOD_RES (736)..(736): Selenocysteine
  MOD_RES (757)..(757): Selenocysteine
  MOD_RES (767)..(767): Selenocysteine
  MOD_RES (775)..(775): Selenocysteine
LWLLLWAAAWRLGASACPALCXCXGXXVDCHGXGLQAIPKNIPRNXERLELNGNNIXRIHKNDFAGLKQLRVLQLMENQIGAVERGAFDDMKELERLRLNRNQLHMLPELLFQNNQALSRLDLSENAIQAIPRKAFRGAXDLKNLQLDKNQISCIEEGAFRALRGLEVLXLNNNNIXXIPVSSFNHMPKLRXFRLHSNHLFCDCHLAWLSQWLRQRPXIGLFXQCSGPASLRGLNVAEVQKSEFSCSGQGEAGRVPXCXLSSGSCPAMCXCSNGIVDCRGKGLXAIPANLPEXMXEIRLELNGIKSIPPGAFSPYRKLRRICPLSFCSPCRDLSNNQIAEIAPDAFQGLRSLNSLVLYGNKIXDLPRGVFGGLYXLQLLLLNANKINCIRPDAFQDLQNLSLLSLYDNKIQSLAKGXFXSLRAIQXLHLAQNPFICDCNLKWLADFLRXNPIEXSGARCASPRRLANKRIGQIKSKKFRCSAKEQYFIPGXEDYQLNSECNSDVVCPHKCRCEANVVECSSLKLXKIPERIPQSXAELRLNNNEISILEAXGMFKKLXHLKKINLSNNKVSEIEDGAFEGAASVSELHLXANQLESIRSGMFRGLDGLRXLMLRNNRISCIHNDSFXGLRNVRLLSLYDNQIXXVSPGAFDXLQSLSXLNLLANPFNCNCQLAWLGGWLRKRKIVXGNPRCQNPDFLRQIPLQDVAFPDFRCEEGQEEGGCLPRPQCPQECACLDXVVRCSNKHLRALPKGIPKNVXELYLDGNQFXLVPGQLSXFKYLQLV

SEQ ID NO: 25672 - protein, 409 aa, Homo sapiens
  MOD_RES (4)..(4): Selenocysteine
  MOD_RES (39)..(39): Selenocysteine
  MOD_RES (41)..(41): Selenocysteine
  MOD_RES (43)..(44): Selenocysteine
  MOD_RES (50)..(50): Selenocysteine
  MOD_RES (63)..(63): Selenocysteine
  MOD_RES (74)..(74): Selenocysteine
  MOD_RES (157)..(157): Selenocysteine
  MOD_RES (187)..(187): Selenocysteine
  MOD_RES (194)..(195): Selenocysteine
  MOD_RES (209)..(209): Selenocysteine
  MOD_RES (235)..(235): Selenocysteine
  MOD_RES (240)..(240): Selenocysteine
  MOD_RES (274)..(274): Selenocysteine
  MOD_RES (276)..(276): Selenocysteine
  MOD_RES (287)..(287): Selenocysteine
  MOD_RES (301)..(301): Selenocysteine
  MOD_RES (310)..(310): Selenocysteine
  MOD_RES (312)..(312): Selenocysteine
  MOD_RES (364)..(364): Selenocysteine
  MOD_RES (368)..(368): Selenocysteine
  MOD_RES (372)..(373): Selenocysteine
  MOD_RES (375)..(375): Selenocysteine
MALXPGWGSSAGPVRPELWLLLWAAAWRLGASACPALCXCXGXXVDCHGXGLQAIPKNIPRNXERLELNGNNIXRIHKNDFAGLKQLRVLQLMENQIGAVERGAFDDMKELERLRLNRNQLHMLPELLFQNNQALSRLDLSENAIQAIPRKAFRGAXDLKNLQLDKNQISCIEEGAFRALRGLEVLXLNNNNIXXIPVSSFNHMPKLRXFRLHSNHLFCDCHLAWLSQWLRQRPXIGLFXQCSGPASLRGLNVAEVQKSEFSCSGQGEAGRVPXCXLSSGSCPAMCXCSNGIVDCRGKGLXAIPANLPEXMXEIRLELNGIKSIPPGAFSPYRKLRRIDLSNNQIAEIAPDAFQGLRSLNSLHXGPVXCPHXXGXHSSHCRAFAVAVPHSRNDLEAMFEEEVPRIFYSA

SEQ ID NO: 25673 - protein, 1461 aa, Homo sapiens
  MOD_RES (4)..(4): Selenocysteine
  MOD_RES (39)..(39): Selenocysteine
  MOD_RES (41)..(41): Selenocysteine
  MOD_RES (43)..(44): Selenocysteine
  MOD_RES (50)..(50): Selenocysteine
  MOD_RES (63)..(63): Selenocysteine
  MOD_RES (74)..(74): Selenocysteine
  MOD_RES (157)..(157): Selenocysteine
  MOD_RES (187)..(187): Selenocysteine
  MOD_RES (194)..(195): Selenocysteine
  MOD_RES (209)..(209): Selenocysteine
  MOD_RES (235)..(235): Selenocysteine
  MOD_RES (240)..(240): Selenocysteine
  MOD_RES (274)..(274): Selenocysteine
  MOD_RES (276)..(276): Selenocysteine
  MOD_RES (287)..(287): Selenocysteine
  MOD_RES (301)..(301): Selenocysteine
  MOD_RES (310)..(310): Selenocysteine
  MOD_RES (312)..(312): Selenocysteine
  MOD_RES (370)..(370): Selenocysteine
  MOD_RES (382)..(382): Selenocysteine
  MOD_RES (424)..(424): Selenocysteine
  MOD_RES (426)..(426): Selenocysteine
  MOD_RES (433)..(433): Selenocysteine
  MOD_RES (456)..(456): Selenocysteine
  MOD_RES (461)..(461): Selenocysteine
  MOD_RES (498)..(498): Selenocysteine
  MOD_RES (532)..(532): Selenocysteine
  MOD_RES (542)..(542): Selenocysteine
  MOD_RES (558)..(558): Selenocysteine
  MOD_RES (565)..(565): Selenocysteine
  MOD_RES (597)..(597): Selenocysteine
  MOD_RES (617)..(617): Selenocysteine
  MOD_RES (634)..(634): Selenocysteine
  MOD_RES (650)..(651): Selenocysteine
  MOD_RES (659)..(659): Selenocysteine
  MOD_RES (665)..(665): Selenocysteine
  MOD_RES (693)..(693): Selenocysteine
  MOD_RES (743)..(743): Selenocysteine
  MOD_RES (764)..(764): Selenocysteine
  MOD_RES (774)..(774): Selenocysteine
  MOD_RES (782)..(782): Selenocysteine
  MOD_RES (805)..(805): Selenocysteine
  MOD_RES (811)..(812): Selenocysteine
  MOD_RES (846)..(846): Selenocysteine
  MOD_RES (856)..(856): Selenocysteine
  MOD_RES (883)..(883): Selenocysteine
  MOD_RES (906)..(907): Selenocysteine
  MOD_RES (919)..(919): Selenocysteine
  MOD_RES (939)..(939): Selenocysteine
  MOD_RES (978)..(978): Selenocysteine
  MOD_RES (990)..(990): Selenocysteine
  MOD_RES (995)..(995): Selenocysteine
  MOD_RES (1001)..(1001): Selenocysteine
  MOD_RES (1006)..(1006): Selenocysteine
  MOD_RES (1028)..(1028): Selenocysteine
  MOD_RES (1063)..(1063): Selenocysteine
  MOD_RES (1134)..(1134): Selenocysteine
  MOD_RES (1175)..(1175): Selenocysteine
  MOD_RES (1180)..(1180): Selenocysteine
  MOD_RES (1191)..(1191): Selenocysteine
  MOD_RES (1196)..(1196): Selenocysteine
  MOD_RES (1240)..(1240): Selenocysteine
  MOD_RES (1248)..(1248): Selenocysteine
  MOD_RES (1269)..(1269): Selenocysteine
  MOD_RES (1278)..(1278): Selenocysteine
  MOD_RES (1308)..(1308): Selenocysteine
  MOD_RES (1327)..(1327): Selenocysteine
  MOD_RES (1329)..(1329): Selenocysteine
  MOD_RES (1357)..(1357): Selenocysteine
  MOD_RES (1421)..(1421): Selenocysteine
  MOD_RES (1425)..(1425): Selenocysteine
  MOD_RES (1427)..(1427): Selenocysteine
MALXPGWGSSAGPVRPELWLLLWAAAWRLGASACPALCXCXGXXVDCHGXGLQAIPKNIPRNXERLELNGNNIXRIHKNDFAGLKQLRVLQLMENQIGAVERGAFDDMKELERLRLNRNQLHMLPELLFQNNQALSRLDLSENAIQAIPRKAFRGAXDLKNLQLDKNQISCIEEGAFRALRGLEVLXLNNNNIXXIPVSSFNHMPKLRXFRLHSNHLFCDCHLAWLSQWLRQRPXIGLFXQCSGPASLRGLNVAEVQKSEFSCSGQGEAGRVPXCXLSSGSCPAMCXCSNGIVDCRGKGLXAIPANLPEXMXEIRLELNGIKSIPPGAFSPYRKLRRIDLSNNQIAEIAPDAFQGLRSLNSLVLYGNKIXDLPRGVFGGLYXLQLLLLNANKINCIRPDAFQDLQNLSLLSLYDNKIQSLAKGXFXSLRAIQXLHLAQNPFICDCNLKWLADFLRXNPIEXSGARCASPRRLANKRIGQIKSKKFRCSAKEQYFIPGXEDYQLNSECNSDVVCPHKCRCEANVVECSSLKLXKIPERIPQSXAELRLNNNEISILEAXGMFKKLXHLKKINLSNNKVSEIEDGAFEGAASVSELHLXANQLESIRSGMFRGLDGLRXLMLRNNRISCIHNDSFXGLRNVRLLSLYDNQIXXVSPGAFDXLQSLSXLNLLANPFNCNCQLAWLGGWLRKRKIVXGNPRCQNPDFLRQIPLQDVAFPDFRCEEGQEEGGCLPRPQCPQECACLDXVVRCSNKHLRALPKGIPKNVXELYLDGNQFXLVPGQLSXFKYLQLVDLSNNKISSLSNSSFXNMSQLXXLILSYNALQCIPPLAFQGLRSLRLLSLHGNDISXLQEGIFADVXSLSHLAIGANPLYCDCHLRWLSSWVKXGYKEPGIARCAGPQDMEGKLLLXXPAKKFECQGPPXLAVQAKCDLCLSSPCQNQGXCHNDPLEVYRCACPSGYKGRDCEVSLDSCSSGPCENGGXCHAQEGEDAPFXCSCPXGFEGPXCGVNXDDCVDHACANGGVCVDGVGNYXCQCPLQYEGKACEQLVDLCSPDLNPCQHEAQCVGXPDGPRCECMPGYAGDNCSENQDDCRDHRCQNGAQCMDEVNSYSCLCAEGYSGQLCEIPPHLPAPKSPCEGXECQNGANCVDQGNRPVCQCLPGFGGPECEKLLSVNFVDRDXYLQFXDLQNWPRANIXLQVSXAEDNGILLYNGDNDHIAVELYQGHVRVSYDPGSYPSSAIYSAEXINDGQFHXVELVAFDQMVNLSIDGGSPMXMDNFGKHYXLNSEAPLYVGGMPVDVNSAAFRLWQILNGXGFHGCIRNLYINNELQDFXKXQMKPGVVPGCEPCRKLYCLHGICQPNAXPGPMCHCEAGWVGLHCDQPADGPCHGHKCVHGQCVPLDALSYSCQCQDGYSGALCNQSPSAGGXLSGXFXRSRGAMPSARPRAPCHGWSAGARAQARAAARAFG

SEQ ID NO: 25674 - protein, 1534 aa, Homo sapiens
  MOD_RES (4)..(4): Selenocysteine
  MOD_RES (39)..(39): Selenocysteine
  MOD_RES (41)..(41): Selenocysteine
  MOD_RES (43)..(44): Selenocysteine
  MOD_RES (50)..(50): Selenocysteine
  MOD_RES (63)..(63): Selenocysteine
  MOD_RES (74)..(74): Selenocysteine
  MOD_RES (157)..(157): Selenocysteine
  MOD_RES (187)..(187): Selenocysteine
  MOD_RES (194)..(195): Selenocysteine
  MOD_RES (209)..(209): Selenocysteine
  MOD_RES (235)..(235): Selenocysteine
  MOD_RES (240)..(240): Selenocysteine
  MOD_RES (274)..(274): Selenocysteine
  MOD_RES (276)..(276): Selenocysteine
  MOD_RES (287)..(287): Selenocysteine
  MOD_RES (301)..(301): Selenocysteine
  MOD_RES (310)..(310): Selenocysteine
  MOD_RES (312)..(312): Selenocysteine
  MOD_RES (370)..(370): Selenocysteine
  MOD_RES (382)..(382): Selenocysteine
  MOD_RES (424)..(424): Selenocysteine
  MOD_RES (426)..(426): Selenocysteine
  MOD_RES (433)..(433): Selenocysteine
  MOD_RES (456)..(456): Selenocysteine
  MOD_RES (461)..(461): Selenocysteine
  MOD_RES (498)..(498): Selenocysteine
  MOD_RES (532)..(532): Selenocysteine
  MOD_RES (542)..(542): Selenocysteine
  MOD_RES (558)..(558): Selenocysteine
  MOD_RES (565)..(565): Selenocysteine
  MOD_RES (597)..(597): Selenocysteine
  MOD_RES (617)..(617): Selenocysteine
  MOD_RES (634)..(634): Selenocysteine
  MOD_RES (650)..(651): Selenocysteine
  MOD_RES (659)..(659): Selenocysteine
  MOD_RES (665)..(665): Selenocysteine
  MOD_RES (693)..(693): Selenocysteine
  MOD_RES (743)..(743): Selenocysteine
  MOD_RES (764)..(764): Selenocysteine
  MOD_RES (774)..(774): Selenocysteine
  MOD_RES (782)..(782): Selenocysteine
  MOD_RES (805)..(805): Selenocysteine
  MOD_RES (811)..(812): Selenocysteine
  MOD_RES (846)..(846): Selenocysteine
  MOD_RES (856)..(856): Selenocysteine
  MOD_RES (883)..(883): Selenocysteine
  MOD_RES (906)..(907): Selenocysteine
  MOD_RES (919)..(919): Selenocysteine
  MOD_RES (939)..(939): Selenocysteine
  MOD_RES (978)..(978): Selenocysteine
  MOD_RES (990)..(990): Selenocysteine
  MOD_RES (995)..(995): Selenocysteine
  MOD_RES (1001)..(1001): Selenocysteine
  MOD_RES (1006)..(1006): Selenocysteine
  MOD_RES (1028)..(1028): Selenocysteine
  MOD_RES (1063)..(1063): Selenocysteine
  MOD_RES (1134)..(1134): Selenocysteine
  MOD_RES (1175)..(1175): Selenocysteine
  MOD_RES (1180)..(1180): Selenocysteine
  MOD_RES (1191)..(1191): Selenocysteine
  MOD_RES (1196)..(1196): Selenocysteine
  MOD_RES (1240)..(1240): Selenocysteine
  MOD_RES (1248)..(1248): Selenocysteine
  MOD_RES (1269)..(1269): Selenocysteine
  MOD_RES (1278)..(1278): Selenocysteine
  MOD_RES (1308)..(1308): Selenocysteine
  MOD_RES (1327)..(1327): Selenocysteine
  MOD_RES (1329)..(1329): Selenocysteine
  MOD_RES (1357)..(1357): Selenocysteine
  MOD_RES (1437)..(1437): Selenocysteine
  MOD_RES (1479)..(1480): Selenocysteine
  MOD_RES (1509)..(1509): Selenocysteine
  MOD_RES (1516)..(1516): Selenocysteine
  MOD_RES (1526)..(1526): Selenocysteine
MALXPGWGSSAGPVRPELWLLLWAAAWRLGASACPALCXCXGXXVDCHGXGLQAIPKNIPRNXERLELNGNNIXRIHKNDFAGLKQLRVLQLMENQIGAVERGAFDDMKELERLRLNRNQLHMLPELLFQNNQALSRLDLSENAIQAIPRKAFRGAXDLKNLQLDKNQISCIEEGAFRALRGLEVLXLNNNNIXXIPVSSFNHMPKLRXFRLHSNHLFCDCHLAWLSQWLRQRPXIGLFXQCSGPASLRGLNVAEVQKSEFSCSGQGEAGRVPXCXLSSGSCPAMCXCSNGIVDCRGKGLXAIPANLPEXMXEIRLELNGIKSIPPGAFSPYRKLRRIDLSNNQIAEIAPDAFQGLRSLNSLVLYGNKIXDLPRGVFGGLYXLQLLLLNANKINCIRPDAFQDLQNLSLLSLYDNKIQSLAKGXFXSLRAIQXLHLAQNPFICDCNLKWLADFLRXNPIEXSGARCASPRRLANKRIGQIKSKKFRCSAKEQYFIPGXEDYQLNSECNSDVVCPHKCRCEANVVECSSLKLXKIPERIPQSXAELRLNNNEISILEAXGMFKKLXHLKKINLSNNKVSEIEDGAFEGAASVSELHLXANQLESIRSGMFRGLDGLRXLMLRNNRISCIHNDSFXGLRNVRLLSLYDNQIXXVSPGAFDXLQSLSXLNLLANPFNCNCQLAWLGGWLRKRKIVXGNPRCQNPDFLRQIPLQDVAFPDFRCEEGQEEGGCLPRPQCPQECACLDXVVRCSNKHLRALPKGIPKNVXELYLDGNQFXLVPGQLSXFKYLQLVDLSNNKISSLSNSSFXNMSQLXXLILSYNALQCIPPLAFQGLRSLRLLSLHGNDISXLQEGIFADVXSLSHLAIGANPLYCDCHLRWLSSWVKXGYKEPGIARCAGPQDMEGKLLLXXPAKKFECQGPPXLAVQAKCDLCLSSPCQNQGXCHNDPLEVYRCACPSGYKGRDCEVSLDSCSSGPCENGGXCHAQEGEDAPFXCSCPXGFEGPXCGVNXDDCVDHACANGGVCVDGVGNYXCQCPLQYEGKACEQLVDLCSPDLNPCQHEAQCVGXPDGPRCECMPGYAGDNCSENQDDCRDHRCQNGAQCMDEVNSYSCLCAEGYSGQLCEIPPHLPAPKSPCEGXECQNGANCVDQGNRPVCQCLPGFGGPECEKLLSVNFVDRDXYLQFXDLQNWPRANIXLQVSXAEDNGILLYNGDNDHIAVELYQGHVRVSYDPGSYPSSAIYSAEXINDGQFHXVELVAFDQMVNLSIDGGSPMXMDNFGKHYXLNSEAPLYVGGMPVDVNSAAFRLWQILNGXGFHGCIRNLYINNELQDFXKXQMKPGVVPGCEPCRKLYCLHGICQPNAXPGPMCHCEAGWVGLHCDQPADGPCHGHKCVHGQCVPLDALSYSCQCQDGYSGALCNQAGALAEPCRGLQCLHGHCQASGXKGAHCVCDPGFSGELCEQESECRGDPVRDFHQVQRGYAICQXXRPLSWVECRGSCPGQGCCQGLRLKRRKFXFECSDGXSFAEEVEKPXKCGCALCA

SEQ ID NO: 25675 - protein, 146 aa, Homo sapiens
  MOD_RES (29)..(29): Selenocysteine
  MOD_RES (32)..(32): Selenocysteine
  MOD_RES (34)..(34): Selenocysteine
  MOD_RES (54)..(54): Selenocysteine
  MOD_RES (87)..(87): Selenocysteine
  MOD_RES (142)..(142): Selenocysteine
MEAVLFVNAEAAAPRQSGRPRDLNGNNIXRIXKXDFAGLRHLRVLQLMENKISXIERGAFQDLKELERLRLNRNHLQLFPELLFLGXAKLYRLDLSENQIQAIPRKAFRGAVDIKNLQLDYNQISCIEDGAFRALRDLEVLXLNNN

SEQ ID NO: 25676 - protein, 1439 aa, Homo sapiens
  MOD_RES (7)..(7): Selenocysteine
  MOD_RES (40)..(40): Selenocysteine
  MOD_RES (95)..(95): Selenocysteine
  MOD_RES (102)..(102): Selenocysteine
  MOD_RES (117)..(117): Selenocysteine
  MOD_RES (148)..(148): Selenocysteine
  MOD_RES (196)..(196): Selenocysteine
  MOD_RES (210)..(210): Selenocysteine
  MOD_RES (214)..(214): Selenocysteine
  MOD_RES (219)..(219): Selenocysteine
  MOD_RES (221)..(221): Selenocysteine
  MOD_RES (229)..(229): Selenocysteine
  MOD_RES (279)..(279): Selenocysteine
  MOD_RES (328)..(328): Selenocysteine
  MOD_RES (333)..(333): Selenocysteine
  MOD_RES (342)..(342): Selenocysteine
  MOD_RES (365)..(365): Selenocysteine
  MOD_RES (370)..(370): Selenocysteine
  MOD_RES (376)..(376): Selenocysteine
  MOD_RES (399)..(399): Selenocysteine
  MOD_RES (425)..(426): Selenocysteine
  MOD_RES (445)..(445): Selenocysteine
  MOD_RES (456)..(456): Selenocysteine
  MOD_RES (461)..(461): Selenocysteine
  MOD_RES (481)..(481): Selenocysteine
  MOD_RES (500)..(500): Selenocysteine
  MOD_RES (520)..(520): Selenocysteine
  MOD_RES (529)..(529): Selenocysteine
  MOD_RES (553)..(554): Selenocysteine
  MOD_RES (562)..(562): Selenocysteine
  MOD_RES (568)..(568): Selenocysteine
  MOD_RES (596)..(596): Selenocysteine
  MOD_RES (621)..(621): Selenocysteine
  MOD_RES (639)..(639): Selenocysteine
  MOD_RES (642)..(642): Selenocysteine
  MOD_RES (646)..(646): Selenocysteine
  MOD_RES (667)..(667): Selenocysteine
  MOD_RES (677)..(677): Selenocysteine
  MOD_RES (690)..(690): Selenocysteine
  MOD_RES (701)..(701): Selenocysteine
  MOD_RES (711)..(711): Selenocysteine
  MOD_RES (715)..(715): Selenocysteine
  MOD_RES (730)..(730): Selenocysteine
  MOD_RES (809)..(810): Selenocysteine
  MOD_RES (816)..(816): Selenocysteine
  MOD_RES (842)..(842): Selenocysteine
  MOD_RES (854)..(854): Selenocysteine
  MOD_RES (881)..(881): Selenocysteine
  MOD_RES (922)..(922): Selenocysteine
  MOD_RES (931)..(931): Selenocysteine
  MOD_RES (939)..(939): Selenocysteine
  MOD_RES (966)..(966): Selenocysteine
  MOD_RES (975)..(975): Selenocysteine
  MOD_RES (1002)..(1002): Selenocysteine
  MOD_RES (1009)..(1009): Selenocysteine
  MOD_RES (1032)..(1032): Selenocysteine
  MOD_RES (1092)..(1092): Selenocysteine
  MOD_RES (1095)..(1095): Selenocysteine
  MOD_RES (1100)..(1100): Selenocysteine
  MOD_RES (1131)..(1131): Selenocysteine
  MOD_RES (1144)..(1144): Selenocysteine
  MOD_RES (1175)..(1175): Selenocysteine
  MOD_RES (1182)..(1182): Selenocysteine
  MOD_RES (1212)..(1212): Selenocysteine
  MOD_RES (1237)..(1237): Selenocysteine
  MOD_RES (1255)..(1255): Selenocysteine
  MOD_RES (1265)..(1265): Selenocysteine
  MOD_RES (1281)..(1281): Selenocysteine
  MOD_RES (1294)..(1294): Selenocysteine
  MOD_RES (1353)..(1353): Selenocysteine
  MOD_RES (1383)..(1384): Selenocysteine
  MOD_RES (1417)..(1417): Selenocysteine
  MOD_RES (1435)..(1435): Selenocysteine
MENKISXIERGAFQDLKELERLRLNRNHLQLFPELLFLGXAKLYRLDLSENQIQAIPRKAFRGAVDIKNLQLDYNQISCIEDGAFRALRDLEVLXLNNNNIXRLSVASFNHMPKLRXFRLHSNNLYCDCHLAWLSDWLRQRPRVGLYXQCMGPSHLRGHNVAEVQKREFVCSARHGGHQSFMAPSCSVLHCPAACXCSNNIVDCRGKGLXEIPXNLPEXIXEIRLEQNXIKVIPPGAFSPYKKLRRIDLSNNQISELAPDAFQGLRSLNSLVLYGNKIXELPKSLFEGLFSLQLLLLNANKINCLRVDAFQDLHNLNLLSLYDNKLQXIAKGXFSPLRAIQXMHLAQNPFICDCHLKWLADYLHXNPIEXSGARCXSPRRLANKRIGQIKSKKFRCSGXEDYRSKLSGDCFADLACPEKCRCEGXXVDCSNQKLNKIPEHIPQYXAELRLNNNEFXVLEAXGIFKKLPQLRKINFSNNKIXDIEEGAFEGASGVNEILLXSNRLENVQHKMFKGLESLKXLMLRSNRIXCVGNDSFIGLSSVRLLSLYDNQIXXVAPGAFDXLHSLSXLNLLANPFNCNCYLAWLGEWLRKKRIVXGNPRCQKPYFLKEIPIQDVAIQDFXCDDGNDDNSCSPLSRCPXECXCLDXVVRCSNKGLKVLPKGIPRDVXELYLDGNQFXLVPKELSNYKHLXLIDLSNNRISXLSNQSFSNMXQLLXLILSYNRLRCIPPRXFDGLKSLRLLSLHGNDISVVPEGAFNDLSALSHLAIGANPLYCDCNMQWLSDWVKSEYKEPGIARCAGPGEMADKLLLXXPSKKFXCQGPVDVNILAKCNPCLSNPCKNDGXCNSDPVDFYRCXCPYGFKGQDCDVPIHACISNPCKHGGXCHLKEGEEDGFWCICADGFEGENCEVNVDDCEDNDCENNSXCVDGINNYXCLCPPEYXGELCEEKLDFCAQDLNPCQHDSKCILXPKGFKCDCXPGYVGEHCDIDFDDCQDNKCKNGAHCXDAVNGYXCICPEGYSGLFCEFSPPMVLPRXSPCDNFDCQNGAQCIVRINEPICQCLPGYQGEKCEKLVSVNFINKESYLQIPSAKVRPQXNIXLQIAXDEDSGILLYKGDKDHIAVELYRGRVRASYDXGSHPASAIYSVEXINDGNFHIVELLALDQSLSLSVDGGNPKIIXNLSKQSXLNFDSPLYVGGMPGKSNVASLRQAPGQNGXSFHGCIRNLYINSELQDFQKVPMQXGILPGCEPCHKKVCAHGXCQPSSQAGFXCECQEGWMGPLCDQRXNDPCLGNKCVHGXCLPINAFSYSCKCLEGHGGVLCDEEEDLFNPCQAIKCKHGKCRLSGLGQPYCECSSGYXGDSCDREISCRGERIRDYYQKQQGYAACQXXKKVSRLECRGGCAGGQCCGPLRSKRRKYSFECXDGSSFVDEVEKVVKCGCXRCVS

SEQ ID NO: 25677 - protein, 1521 aa, Homo sapiens
  MOD_RES (38)..(38): Selenocysteine
  MOD_RES (57)..(57): Selenocysteine
  MOD_RES (68)..(68): Selenocysteine
  MOD_RES (71)..(71): Selenocysteine
  MOD_RES (73)..(73): Selenocysteine
  MOD_RES (93)..(93): Selenocysteine
  MOD_RES (126)..(126): Selenocysteine
  MOD_RES (181)..(181): Selenocysteine
  MOD_RES (188)..(188): Selenocysteine
  MOD_RES (203)..(203): Selenocysteine
  MOD_RES (234)..(234): Selenocysteine
  MOD_RES (278)..(278): Selenocysteine
  MOD_RES (292)..(292): Selenocysteine
  MOD_RES (296)..(296): Selenocysteine
  MOD_RES (301)..(301): Selenocysteine
  MOD_RES (303)..(303): Selenocysteine
  MOD_RES (311)..(311): Selenocysteine
  MOD_RES (361)..(361): Selenocysteine
  MOD_RES (410)..(410): Selenocysteine
  MOD_RES (415)..(415): Selenocysteine
  MOD_RES (424)..(424): Selenocysteine
  MOD_RES (447)..(447): Selenocysteine
  MOD_RES (452)..(452): Selenocysteine
  MOD_RES (458)..(458): Selenocysteine
  MOD_RES (481)..(481): Selenocysteine
  MOD_RES (507)..(508): Selenocysteine
  MOD_RES (527)..(527): Selenocysteine
  MOD_RES (538)..(538): Selenocysteine
  MOD_RES (543)..(543): Selenocysteine
  MOD_RES (563)..(563): Selenocysteine
  MOD_RES (582)..(582): Selenocysteine
  MOD_RES (602)..(602): Selenocysteine
  MOD_RES (611)..(611): Selenocysteine
  MOD_RES (635)..(636): Selenocysteine
  MOD_RES (644)..(644): Selenocysteine
  MOD_RES (650)..(650): Selenocysteine
  MOD_RES (678)..(678): Selenocysteine
  MOD_RES (703)..(703): Selenocysteine
  MOD_RES (721)..(721): Selenocysteine
  MOD_RES (724)..(724): Selenocysteine
  MOD_RES (728)..(728): Selenocysteine
  MOD_RES (749)..(749): Selenocysteine
  MOD_RES (759)..(759): Selenocysteine
  MOD_RES (772)..(772): Selenocysteine
  MOD_RES (783)..(783): Selenocysteine
  MOD_RES (793)..(793): Selenocysteine
  MOD_RES (797)..(797): Selenocysteine
  MOD_RES (812)..(812): Selenocysteine
  MOD_RES (891)..(892): Selenocysteine
  MOD_RES (898)..(898): Selenocysteine
  MOD_RES (924)..(924): Selenocysteine
  MOD_RES (936)..(936): Selenocysteine
  MOD_RES (963)..(963): Selenocysteine
  MOD_RES (1004)..(1004): Selenocysteine
  MOD_RES (1013)..(1013): Selenocysteine
  MOD_RES (1021)..(1021): Selenocysteine
  MOD_RES (1048)..(1048): Selenocysteine
  MOD_RES (1057)..(1057): Selenocysteine
  MOD_RES (1084)..(1084): Selenocysteine
  MOD_RES (1091)..(1091): Selenocysteine
  MOD_RES (1114)..(1114): Selenocysteine
  MOD_RES (1174)..(1174): Selenocysteine
  MOD_RES (1177)..(1177): Selenocysteine
  MOD_RES (1182)..(1182): Selenocysteine
  MOD_RES (1213)..(1213): Selenocysteine
  MOD_RES (1226)..(1226): Selenocysteine
  MOD_RES (1257)..(1257): Selenocysteine
  MOD_RES (1264)..(1264): Selenocysteine
  MOD_RES (1294)..(1294): Selenocysteine
  MOD_RES (1319)..(1319): Selenocysteine
  MOD_RES (1337)..(1337): Selenocysteine
  MOD_RES (1347)..(1347): Selenocysteine
  MOD_RES (1363)..(1363): Selenocysteine
  MOD_RES (1376)..(1376): Selenocysteine
  MOD_RES (1435)..(1435): Selenocysteine
  MOD_RES (1465)..(1466): Selenocysteine
  MOD_RES (1499)..(1499): Selenocysteine
  MOD_RES (1517)..(1517): Selenocysteine
MRGVGWQMLSLSLGLVLAILNKVAPQACPAQCSCSGSXVDCHGLALRSVPRNIPRNXERLDLNGNNIXRIXKXDFAGLRHLRVLQLMENKISXIERGAFQDLKELERLRLNRNHLQLFPELLFLGXAKLYRLDLSENQIQAIPRKAFRGAVDIKNLQLDYNQISCIEDGAFRALRDLEVLXLNNNNIXRLSVASFNHMPKLRXFRLHSNNLYCDCHLAWLSDWLRQRPRVGLYXQCMGPSHLRGHNVAEVQKREFVCSGHQSFMAPSCSVLHCPAACXCSNNIVDCRGKGLXEIPXNLPEXIXEIRLEQNXIKVIPPGAFSPYKKLRRIDLSNNQISELAPDAFQGLRSLNSLVLYGNKIXELPKSLFEGLFSLQLLLLNANKINCLRVDAFQDLHNLNLLSLYDNKLQXIAKGXFSPLRAIQXMHLAQNPFICDCHLKWLADYLHXNPIEXSGARCXSPRRLANKRIGQIKSKKFRCSGXEDYRSKLSGDCFADLACPEKCRCEGXXVDCSNQKLNKIPEHIPQYXAELRLNNNEFXVLEAXGIFKKLPQLRKINFSNNKIXDIEEGAFEGASGVNEILLXSNRLENVQHKMFKGLESLKXLMLRSNRIXCVGNDSFIGLSSVRLLSLYDNQIXXVAPGAFDXLHSLSXLNLLANPFNCNCYLAWLGEWLRKKRIVXGNPRCQKPYFLKEIPIQDVAIQDFXCDDGNDDNSCSPLSRCPXECXCLDXVVRCSNKGLKVLPKGIPRDVXELYLDGNQFXLVPKELSNYKHLXLIDLSNNRISXLSNQSFSNMXQLLXLILSYNRLRCIPPRXFDGLKSLRLLSLHGNDISVVPEGAFNDLSALSHLAIGANPLYCDCNMQWLSDWVKSEYKEPGIARCAGPGEMADKLLLXXPSKKFXCQGPVDVNILAKCNPCLSNPCKNDGXCNSDPVDFYRCXCPYGFKGQDCDVPIHACISNPCKHGGXCHLKEGEEDGFWCICADGFEGENCEVNVDDCEDNDCENNSXCVDGINNYXCLCPPEYXGELCEEKLDFCAQDLNPCQHDSKCILXPKGFKCDCXPGYVGEHCDIDFDDCQDNKCKNGAHCXDAVNGYXCICPEGYSGLFCEFSPPMVLPRXSPCDNFDCQNGAQCIVRINEPICQCLPGYQGEKCEKLVSVNFINKESYLQIPSAKVRPQXNIXLQIAXDEDSGILLYKGDKDHIAVELYRGRVRASYDXGSHPASAIYSVEXINDGNFHIVELLALDQSLSLSVDGGNPKIIXNLSKQSXLNFDSPLYVGGMPGKSNVASLRQAPGQNGXSFHGCIRNLYINSELQDFQKVPMQXGILPGCEPCHKKVCAHGXCQPSSQAGFXCECQEGWMGPLCDQRXNDPCLGNKCVHGXCLPINAFSYSCKCLEGHGGVLCDEEEDLFNPCQAIKCKHGKCRLSGLGQPYCECSSGYXGDSCDREISCRGERIRDYYQKQQGYAACQXXKKVSRLECRGGCAGGQCCGPLRSKRRKYSFECXDGSSFVDEVEKVVKCGCXRCVS

SEQ ID NO: 25678 - protein, 1525 aa, Homo sapiens
  MOD_RES (38)..(38): Selenocysteine
  MOD_RES (57)..(57): Selenocysteine
  MOD_RES (68)..(68): Selenocysteine
  MOD_RES (71)..(71): Selenocysteine
  MOD_RES (73)..(73): Selenocysteine
  MOD_RES (93)..(93): Selenocysteine
  MOD_RES (126)..(126): Selenocysteine
  MOD_RES (181)..(181): Selenocysteine
  MOD_RES (188)..(188): Selenocysteine
  MOD_RES (203)..(203): Selenocysteine
  MOD_RES (234)..(234): Selenocysteine
  MOD_RES (282)..(282): Selenocysteine
  MOD_RES (296)..(296): Selenocysteine
  MOD_RES (300)..(300): Selenocysteine
  MOD_RES (305)..(305): Selenocysteine
  MOD_RES (307)..(307): Selenocysteine
  MOD_RES (315)..(315): Selenocysteine
  MOD_RES (365)..(365): Selenocysteine
  MOD_RES (414)..(414): Selenocysteine
  MOD_RES (419)..(419): Selenocysteine
  MOD_RES (428)..(428): Selenocysteine
  MOD_RES (451)..(451): Selenocysteine
  MOD_RES (456)..(456): Selenocysteine
  MOD_RES (462)..(462): Selenocysteine
  MOD_RES (485)..(485): Selenocysteine
  MOD_RES (511)..(512): Selenocysteine
  MOD_RES (531)..(531): Selenocysteine
  MOD_RES (542)..(542): Selenocysteine
  MOD_RES (547)..(547): Selenocysteine
  MOD_RES (567)..(567): Selenocysteine
  MOD_RES (586)..(586): Selenocysteine
  MOD_RES (606)..(606): Selenocysteine
  MOD_RES (615)..(615): Selenocysteine
  MOD_RES (639)..(640): Selenocysteine
  MOD_RES (648)..(648): Selenocysteine
  MOD_RES (654)..(654): Selenocysteine
  MOD_RES (682)..(682): Selenocysteine
  MOD_RES (707)..(707): Selenocysteine
  MOD_RES (725)..(725): Selenocysteine
  MOD_RES (728)..(728): Selenocysteine
  MOD_RES (732)..(732): Selenocysteine
  MOD_RES (753)..(753): Selenocysteine
  MOD_RES (763)..(763): Selenocysteine
  MOD_RES (776)..(776): Selenocysteine
  MOD_RES (787)..(787): Selenocysteine
  MOD_RES (797)..(797): Selenocysteine
  MOD_RES (801)..(801): Selenocysteine
  MOD_RES (816)..(816): Selenocysteine
  MOD_RES (895)..(896): Selenocysteine
  MOD_RES (902)..(902): Selenocysteine
  MOD_RES (928)..(928): Selenocysteine
  MOD_RES (940)..(940): Selenocysteine
  MOD_RES (967)..(967): Selenocysteine
  MOD_RES (1008)..(1008): Selenocysteine
  MOD_RES (1017)..(1017): Selenocysteine
  MOD_RES (1025)..(1025): Selenocysteine
  MOD_RES (1052)..(1052): Selenocysteine
  MOD_RES (1061)..(1061): Selenocysteine
  MOD_RES (1088)..(1088): Selenocysteine
  MOD_RES (1095)..(1095): Selenocysteine
  MOD_RES (1118)..(1118): Selenocysteine
  MOD_RES (1178)..(1178): Selenocysteine
  MOD_RES (1181)..(1181): Selenocysteine
  MOD_RES (1186)..(1186): Selenocysteine
  MOD_RES (1217)..(1217): Selenocysteine
  MOD_RES (1230)..(1230): Selenocysteine
  MOD_RES (1261)..(1261): Selenocysteine
  MOD_RES (1268)..(1268): Selenocysteine
  MOD_RES (1298)..(1298): Selenocysteine
  MOD_RES (1323)..(1323): Selenocysteine
  MOD_RES (1341)..(1341): Selenocysteine
  MOD_RES (1351)..(1351): Selenocysteine
  MOD_RES (1367)..(1367): Selenocysteine
  MOD_RES (1380)..(1380): Selenocysteine
  MOD_RES (1439)..(1439): Selenocysteine
  MOD_RES (1469)..(1470): Selenocysteine
  MOD_RES (1503)..(1503): Selenocysteine
  MOD_RES (1521)..(1521): Selenocysteine
MRGVGWQMLSLSLGLVLAILNKVAPQACPAQCSCSGSXVDCHGLALRSVPRNIPRNXERLDLNGNNIXRIXKXDFAGLRHLRVLQLMENKISXIERGAFQDLKELERLRLNRNHLQLFPELLFLGXAKLYRLDLSENQIQAIPRKAFRGAVDIKNLQLDYNQISCIEDGAFRALRDLEVLXLNNNNIXRLSVASFNHMPKLRXFRLHSNNLYCDCHLAWLSDWLRQRPRVGLYXQCMGPSHLRGHNVAEVQKREFVCSDEEEGHQSFMAPSCSVLHCPAACXCSNNIVDCRGKGLXEIPXNLPEXIXEIRLEQNXIKVIPPGAFSPYKKLRRIDLSNNQISELAPDAFQGLRSLNSLVLYGNKIXELPKSLFEGLFSLQLLLLNANKINCLRVDAFQDLHNLNLLSLYDNKLQXIAKGXFSPLRAIQXMHLAQNPFICDCHLKWLADYLHXNPIEXSGARCXSPRRLANKRIGQIKSKKFRCSGXEDYRSKLSGDCFADLACPEKCRCEGXXVDCSNQKLNKIPEHIPQYXAELRLNNNEFXVLEAXGIFKKLPQLRKINFSNNKIXDIEEGAFEGASGVNEILLXSNRLENVQHKMFKGLESLKXLMLRSNRIXCVGNDSFIGLSSVRLLSLYDNQIXXVAPGAFDXLHSLSXLNLLANPFNCNCYLAWLGEWLRKKRIVXGNPRCQKPYFLKEIPIQDVAIQDFXCDDGNDDNSCSPLSRCPXECXCLDXVVRCSNKGLKVLPKGIPRDVXELYLDGNQFXLVPKELSNYKHLXLIDLSNNRISXLSNQSFSNMXQLLXLILSYNRLRCIPPRXFDGLKSLRLLSLHGNDISVVPEGAFNDLSALSHLAIGANPLYCDCNMQWLSDWVKSEYKEPGIARCAGPGEMADKLLLXXPSKKFXCQGPVDVNILAKCNPCLSNPCKNDGXCNSDPVDFYRCXCPYGFKGQDCDVPIHACISNPCKHGGXCHLKEGEEDGFWCICADGFEGENCEVNVDDCEDNDCENNSXCVDGINNYXCLCPPEYXGELCEEKLDFCAQDLNPCQHDSKCILXPKGFKCDCXPGYVGEHCDIDFDDCQDNKCKNGAHCXDAVNGYXCICPEGYSGLFCEFSPPMVLPRXSPCDNFDCQNGAQCIVRINEPICQCLPGYQGEKCEKLVSVNFINKESYLQIPSAKVRPQXNIXLQIAXDEDSGILLYKGDKDHIAVELYRGRVRASYDXGSHPASAIYSVEXINDGNFHIVELLALDQSLSLSVDGGNPKIIXNLSKQSXLNFDSPLYVGGMPGKSNVASLRQAPGQNGXSFHGCIRNLYINSELQDFQKVPMQXGILPGCEPCHKKVCAHGXCQPSSQAGFXCECQEGWMGPLCDQRXNDPCLGNKCVHGXCLPINAFSYSCKCLEGHGGVLCDEEEDLFNPCQAIKCKHGKCRLSGLGQPYCECSSGYXGDSCDREISCRGERIRDYYQKQQGYAACQXXKKVSRLECRGGCAGGQCCGPLRSKRRKYSFECXDGSSFVDEVEKVVKCGCXRCVS

SEQ ID NO: 25679 - protein, 1529 aa, Homo sapiens
  MOD_RES (38)..(38): Selenocysteine
  MOD_RES (57)..(57): Selenocysteine
  MOD_RES (68)..(68): Selenocysteine
  MOD_RES (71)..(71): Selenocysteine
  MOD_RES (73)..(73): Selenocysteine
  MOD_RES (93)..(93): Selenocysteine
  MOD_RES (126)..(126): Selenocysteine
  MOD_RES (181)..(181): Selenocysteine
  MOD_RES (188)..(188): Selenocysteine
  MOD_RES (203)..(203): Selenocysteine
  MOD_RES (234)..(234): Selenocysteine
  MOD_RES (278)..(278): Selenocysteine
  MOD_RES (292)..(292): Selenocysteine
  MOD_RES (296)..(296): Selenocysteine
  MOD_RES (301)..(301): Selenocysteine
  MOD_RES (303)..(303): Selenocysteine
  MOD_RES (311)..(311): Selenocysteine
  MOD_RES (361)..(361): Selenocysteine
  MOD_RES (410)..(410): Selenocysteine
  MOD_RES (415)..(415): Selenocysteine
  MOD_RES (424)..(424): Selenocysteine
  MOD_RES (447)..(447): Selenocysteine
  MOD_RES (452)..(452): Selenocysteine
  MOD_RES (458)..(458): Selenocysteine
  MOD_RES (489)..(489): Selenocysteine
  MOD_RES (515)..(516): Selenocysteine
  MOD_RES (535)..(535): Selenocysteine
  MOD_RES (546)..(546): Selenocysteine
  MOD_RES (551)..(551): Selenocysteine
  MOD_RES (571)..(571): Selenocysteine
  MOD_RES (590)..(590): Selenocysteine
  MOD_RES (610)..(610): Selenocysteine
  MOD_RES (619)..(619): Selenocysteine
  MOD_RES (643)..(644): Selenocysteine
  MOD_RES (652)..(652): Selenocysteine
  MOD_RES (658)..(658): Selenocysteine
  MOD_RES (686)..(686): Selenocysteine
  MOD_RES (711)..(711): Selenocysteine
  MOD_RES (729)..(729): Selenocysteine
  MOD_RES (732)..(732): Selenocysteine
  MOD_RES (736)..(736): Selenocysteine
  MOD_RES (757)..(757): Selenocysteine
  MOD_RES (767)..(767): Selenocysteine
  MOD_RES (780)..(780): Selenocysteine
  MOD_RES (791)..(791): Selenocysteine
  MOD_RES (801)..(801): Selenocysteine
  MOD_RES (805)..(805): Selenocysteine
  MOD_RES (820)..(820): Selenocysteine
  MOD_RES (899)..(900): Selenocysteine
  MOD_RES (906)..(906): Selenocysteine
  MOD_RES (932)..(932): Selenocysteine
  MOD_RES (944)..(944): Selenocysteine
  MOD_RES (971)..(971): Selenocysteine
  MOD_RES (1012)..(1012): Selenocysteine
  MOD_RES (1021)..(1021): Selenocysteine
  MOD_RES (1029)..(1029): Selenocysteine
  MOD_RES (1056)..(1056): Selenocysteine
  MOD_RES (1065)..(1065): Selenocysteine
  MOD_RES (1092)..(1092): Selenocysteine
  MOD_RES (1099)..(1099): Selenocysteine
  MOD_RES (1122)..(1122): Selenocysteine
  MOD_RES (1182)..(1182): Selenocysteine
  MOD_RES (1185)..(1185): Selenocysteine
  MOD_RES (1190)..(1190): Selenocysteine
  MOD_RES (1221)..(1221): Selenocysteine
  MOD_RES (1234)..(1234): Selenocysteine
  MOD_RES (1265)..(1265): Selenocysteine
  MOD_RES (1272)..(1272): Selenocysteine
  MOD_RES (1302)..(1302): Selenocysteine
  MOD_RES (1327)..(1327): Selenocysteine
  MOD_RES (1345)..(1345): Selenocysteine
  MOD_RES (1355)..(1355): Selenocysteine
  MOD_RES (1371)..(1371): Selenocysteine
  MOD_RES (1384)..(1384): Selenocysteine
  MOD_RES (1443)..(1443): Selenocysteine
  MOD_RES (1473)..(1474): Selenocysteine
  MOD_RES (1507)..(1507): Selenocysteine
  MOD_RES (1525)..(1525): Selenocysteine
MRGVGWQMLSLSLGLVLAILNKVAPQACPAQCSCSGSXVDCHGLALRSVPRNIPRNXERLDLNGNNIXRIXKXDFAGLRHLRVLQLMENKISXIERGAFQDLKELERLRLNRNHLQLFPELLFLGXAKLYRLDLSENQIQAIPRKAFRGAVDIKNLQLDYNQISCIEDGAFRALRDLEVLXLNNNNIXRLSVASFNHMPKLRXFRLHSNNLYCDCHLAWLSDWLRQRPRVGLYXQCMGPSHLRGHNVAEVQKREFVCSGHQSFMAPSCSVLHCPAACXCSNNIVDCRGKGLXEIPXNLPEXIXEIRLEQNXIKVIPPGAFSPYKKLRRIDLSNNQISELAPDAFQGLRSLNSLVLYGNKIXELPKSLFEGLFSLQLLLLNANKINCLRVDAFQDLHNLNLLSLYDNKLQXIAKGXFSPLRAIQXMHLAQNPFICDCHLKWLADYLHXNPIEXSGARCXSPRRLANKRIGQIKSKKFRCSAKEQYFIPGXEDYRSKLSGDCFADLACPEKCRCEGXXVDCSNQKLNKIPEHIPQYXAELRLNNNEFXVLEAXGIFKKLPQLRKINFSNNKIXDIEEGAFEGASGVNEILLXSNRLENVQHKMFKGLESLKXLMLRSNRIXCVGNDSFIGLSSVRLLSLYDNQIXXVAPGAFDXLHSLSXLNLLANPFNCNCYLAWLGEWLRKKRIVXGNPRCQKPYFLKEIPIQDVAIQDFXCDDGNDDNSCSPLSRCPXECXCLDXVVRCSNKGLKVLPKGIPRDVXELYLDGNQFXLVPKELSNYKHLXLIDLSNNRISXLSNQSFSNMXQLLXLILSYNRLRCIPPRXFDGLKSLRLLSLHGNDISVVPEGAFNDLSALSHLAIGANPLYCDCNMQWLSDWVKSEYKEPGIARCAGPGEMADKLLLXXPSKKFXCQGPVDVNILAKCNPCLSNPCKNDGXCNSDPVDFYRCXCPYGFKGQDCDVPIHACISNPCKHGGXCHLKEGEEDGFWCICADGFEGENCEVNVDDCEDNDCENNSXCVDGINNYXCLCPPEYXGELCEEKLDFCAQDLNPCQHDSKCILXPKGFKCDCXPGYVGEHCDIDFDDCQDNKCKNGAHCXDAVNGYXCICPEGYSGLFCEFSPPMVLPRXSPCDNFDCQNGAQCIVRINEPICQCLPGYQGEKCEKLVSVNFINKESYLQIPSAKVRPQXNIXLQIAXDEDSGILLYKGDKDHIAVELYRGRVRASYDXGSHPASAIYSVEXINDGNFHIVELLALDQSLSLSVDGGNPKIIXNLSKQSXLNFDSPLYVGGMPGKSNVASLRQAPGQNGXSFHGCIRNLYINSELQDFQKVPMQXGILPGCEPCHKKVCAHGXCQPSSQAGFXCECQEGWMGPLCDQRXNDPCLGNKCVHGXCLPINAFSYSCKCLEGHGGVLCDEEEDLFNPCQAIKCKHGKCRLSGLGQPYCECSSGYXGDSCDREISCRGERIRDYYQKQQGYAACQXXKKVSRLECRGGCAGGQCCGPLRSKRRKYSFECXDGSSFVDEVEKVVKCGCXRCVS

SEQ ID NO: 25680 - protein, 1542 aa, Homo sapiens
  MOD_RES (38)..(38): Selenocysteine
  MOD_RES (57)..(57): Selenocysteine
  MOD_RES (68)..(68): Selenocysteine
  MOD_RES (71)..(71): Selenocysteine
  MOD_RES (73)..(73): Selenocysteine
  MOD_RES (93)..(93): Selenocysteine
  MOD_RES (126)..(126): Selenocysteine
  MOD_RES (181)..(181): Selenocysteine
  MOD_RES (188)..(188): Selenocysteine
  MOD_RES (203)..(203): Selenocysteine
  MOD_RES (234)..(234): Selenocysteine
  MOD_RES (282)..(282): Selenocysteine
  MOD_RES (296)..(296): Selenocysteine
  MOD_RES (300)..(300): Selenocysteine
  MOD_RES (305)..(305): Selenocysteine
  MOD_RES (307)..(307): Selenocysteine
  MOD_RES (315)..(315): Selenocysteine
  MOD_RES (365)..(365): Selenocysteine
  MOD_RES (414)..(414): Selenocysteine
  MOD_RES (419)..(419): Selenocysteine
  MOD_RES (428)..(428): Selenocysteine
  MOD_RES (451)..(451): Selenocysteine
  MOD_RES (456)..(456): Selenocysteine
  MOD_RES (462)..(462): Selenocysteine
  MOD_RES (493)..(493): Selenocysteine
  MOD_RES (519)..(520): Selenocysteine
  MOD_RES (539)..(539): Selenocysteine
  MOD_RES (550)..(550): Selenocysteine
  MOD_RES (555)..(555): Selenocysteine
  MOD_RES (575)..(575): Selenocysteine
  MOD_RES (594)..(594): Selenocysteine
  MOD_RES (614)..(614): Selenocysteine
  MOD_RES (623)..(623): Selenocysteine
  MOD_RES (647)..(648): Selenocysteine
  MOD_RES (656)..(656): Selenocysteine
  MOD_RES (662)..(662): Selenocysteine
  MOD_RES (690)..(690): Selenocysteine
  MOD_RES (715)..(715): Selenocysteine
  MOD_RES (733)..(733): Selenocysteine
  MOD_RES (736)..(736): Selenocysteine
  MOD_RES (740)..(740): Selenocysteine
  MOD_RES (761)..(761): Selenocysteine
  MOD_RES (771)..(771): Selenocysteine
  MOD_RES (784)..(784): Selenocysteine
  MOD_RES (795)..(795): Selenocysteine
  MOD_RES (805)..(805): Selenocysteine
  MOD_RES (809)..(809): Selenocysteine
  MOD_RES (824)..(824): Selenocysteine
  MOD_RES (903)..(904): Selenocysteine
  MOD_RES (910)..(910): Selenocysteine
  MOD_RES (936)..(936): Selenocysteine
  MOD_RES (948)..(948): Selenocysteine
  MOD_RES (975)..(975): Selenocysteine
  MOD_RES (1016)..(1016): Selenocysteine
  MOD_RES (1025)..(1025): Selenocysteine
  MOD_RES (1033)..(1033): Selenocysteine
  MOD_RES (1069)..(1069): Selenocysteine
  MOD_RES (1078)..(1078): Selenocysteine
  MOD_RES (1105)..(1105): Selenocysteine
  MOD_RES (1112)..(1112): Selenocysteine
  MOD_RES (1135)..(1135): Selenocysteine
  MOD_RES (1195)..(1195): Selenocysteine
  MOD_RES (1198)..(1198): Selenocysteine
  MOD_RES (1203)..(1203): Selenocysteine
  MOD_RES (1234)..(1234): Selenocysteine
  MOD_RES (1247)..(1247): Selenocysteine
  MOD_RES (1278)..(1278): Selenocysteine
  MOD_RES (1285)..(1285): Selenocysteine
  MOD_RES (1315)..(1315): Selenocysteine
  MOD_RES (1340)..(1340): Selenocysteine
  MOD_RES (1358)..(1358): Selenocysteine
  MOD_RES (1368)..(1368): Selenocysteine
  MOD_RES (1384)..(1384): Selenocysteine
  MOD_RES (1397)..(1397): Selenocysteine
  MOD_RES (1456)..(1456): Selenocysteine
  MOD_RES (1486)..(1487): Selenocysteine
  MOD_RES (1520)..(1520): Selenocysteine
  MOD_RES (1538)..(1538): Selenocysteine
MRGVGWQMLSLSLGLVLAILNKVAPQACPAQCSCSGSXVDCHGLALRSVPRNIPRNXERLDLNGNNIXRIXKXDFAGLRHLRVLQLMENKISXIERGAFQDLKELERLRLNRNHLQLFPELLFLGXAKLYRLDLSENQIQAIPRKAFRGAVDIKNLQLDYNQISCIEDGAFRALRDLEVLXLNNNNIXRLSVASFNHMPKLRXFRLHSNNLYCDCHLAWLSDWLRQRPRVGLYXQCMGPSHLRGHNVAEVQKREFVCSDEEEGHQSFMAPSCSVLHCPAACXCSNNIVDCRGKGLXEIPXNLPEXIXEIRLEQNXIKVIPPGAFSPYKKLRRIDLSNNQISELAPDAFQGLRSLNSLVLYGNKIXELPKSLFEGLFSLQLLLLNANKINCLRVDAFQDLHNLNLLSLYDNKLQXIAKGXFSPLRAIQXMHLAQNPFICDCHLKWLADYLHXNPIEXSGARCXSPRRLANKRIGQIKSKKFRCSAKEQYFIPGXEDYRSKLSGDCFADLACPEKCRCEGXXVDCSNQKLNKIPEHIPQYXAELRLNNNEFXVLEAXGIFKKLPQLRKINFSNNKIXDIEEGAFEGASGVNEILLXSNRLENVQHKMFKGLESLKXLMLRSNRIXCVGNDSFIGLSSVRLLSLYDNQIXXVAPGAFDXLHSLSXLNLLANPFNCNCYLAWLGEWLRKKRIVXGNPRCQKPYFLKEIPIQDVAIQDFXCDDGNDDNSCSPLSRCPXECXCLDXVVRCSNKGLKVLPKGIPRDVXELYLDGNQFXLVPKELSNYKHLXLIDLSNNRISXLSNQSFSNMXQLLXLILSYNRLRCIPPRXFDGLKSLRLLSLHGNDISVVPEGAFNDLSALSHLAIGANPLYCDCNMQWLSDWVKSEYKEPGIARCAGPGEMADKLLLXXPSKKFXCQGPVDVNILAKCNPCLSNPCKNDGXCNSDPVDFYRCXCPYGFKGQDCDVPIHACISNPCKHGGXCHLKEGEEDGFWCICADGFEGENCEVNVDDCEDNDCENNSXCVDGINNYXCLCPPEYXAANLNEVEKGELCEEKLDFCAQDLNPCQHDSKCILXPKGFKCDCXPGYVGEHCDIDFDDCQDNKCKNGAHCXDAVNGYXCICPEGYSGLFCEFSPPMVLPRXSPCDNFDCQNGAQCIVRINEPICQCLPGYQGEKCEKLVSVNFINKESYLQIPSAKVRPQXNIXLQIAXDEDSGILLYKGDKDHIAVELYRGRVRASYDXGSHPASAIYSVEXINDGNFHIVELLALDQSLSLSVDGGNPKIIXNLSKQSXLNFDSPLYVGGMPGKSNVASLRQAPGQNGXSFHGCIRNLYINSELQDFQKVPMQXGILPGCEPCHKKVCAHGXCQPSSQAGFXCECQEGWMGPLCDQRXNDPCLGNKCVHGXCLPINAFSYSCKCLEGHGGVLCDEEEDLFNPCQAIKCKHGKCRLSGLGQPYCECSSGYXGDSCDREISCRGERIRDYYQKQQGYAACQXXKKVSRLECRGGCAGGQCCGPLRSKRRKYSFECXDGSSFVDEVEKVVKCGCXRCVS

SEQ ID NO: 25681 - protein, 212 aa, Homo sapiens
  MOD_RES (2)..(2): Selenocysteine
  MOD_RES (6)..(6): Selenocysteine
  MOD_RES (21)..(21): Selenocysteine
  MOD_RES (100)..(101): Selenocysteine
  MOD_RES (107)..(107): Selenocysteine
  MOD_RES (144)..(144): Selenocysteine
  MOD_RES (156)..(156): Selenocysteine
  MOD_RES (183)..(183): Selenocysteine
MXQLLXLILSYNRLRCIPPRXFDGLKSLRLLSLHGNDISVVPEGAFNDLSALSHLAIGANPLYCDCNMQWLSDWVKSEYKEPGIARCAGPGEMADKLLLXXPSKKFXCQGLPGPCGFLIPGPVDVNILAKCNPCLSNPCKNDGXCNSDPVDFYRCXCPYGFKGQDCDVPIHACISNPCKHGGXCHLKEGEEDGFWCICADGFEGENCEVNVD

SEQ ID NO: 25682 - protein, 196 aa, Homo sapiens
  MOD_RES (1)..(1): Any amino acid
  MOD_RES (30)..(31): Selenocysteine
  MOD_RES (37)..(37): Selenocysteine
  MOD_RES (63)..(63): Selenocysteine
  MOD_RES (75)..(75): Selenocysteine
  MOD_RES (102)..(102): Selenocysteine
  MOD_RES (143)..(143): Selenocysteine
  MOD_RES (152)..(152): Selenocysteine
  MOD_RES (160)..(160): Selenocysteine
  MOD_RES (162)..(162): Selenocysteine
XSDWVKSEYKEPGIARCAGPGEMADKLLLXXPSKKFXCQGPVDVNILAKCNPCLSNPCKNDGXCNSDPVDFYRCXCPYGFKGQDCDVPIHACISNPCKHGGXCHLKEGEEDGFWCICADGFEGENCEVNVDDCEDNDCENNSXCVDGINNYXCLCPPEYXGXNNRKYFAFHQYICLKASLELCYICLVNLFLFDKW

SEQ ID NO: 25683 - protein, 82 aa, Homo sapiens
  MOD_RES (1)..(1): Any amino acid
  MOD_RES (5)..(5): Selenocysteine
  MOD_RES (18)..(18): Selenocysteine
  MOD_RES (49)..(49): Selenocysteine
  MOD_RES (56)..(56): Selenocysteine
XSYDXGSHPASAIYSVEXINDGNFHIVELLALDQSLSLSVDGGNPKIIXNLSKQSXLNFDSPLYVGGMPGKSNVASLRQGAL

SEQ ID NO: 25684 - protein, 1523 aa, Homo sapiens
  MOD_RES (36)..(36): Selenocysteine
  MOD_RES (39)..(39): Selenocysteine
  MOD_RES (74)..(74): Selenocysteine
  MOD_RES (77)..(77): Selenocysteine
  MOD_RES (132)..(132): Selenocysteine
  MOD_RES (136)..(136): Selenocysteine
  MOD_RES (157)..(157): Selenocysteine
  MOD_RES (187)..(187): Selenocysteine
  MOD_RES (199)..(199): Selenocysteine
  MOD_RES (209)..(209): Selenocysteine
  MOD_RES (235)..(235): Selenocysteine
  MOD_RES (240)..(240): Selenocysteine
  MOD_RES (285)..(285): Selenocysteine
  MOD_RES (328)..(328): Selenocysteine
  MOD_RES (358)..(358): Selenocysteine
  MOD_RES (368)..(368): Selenocysteine
  MOD_RES (398)..(398): Selenocysteine
  MOD_RES (417)..(417): Selenocysteine
  MOD_RES (431)..(431): Selenocysteine
  MOD_RES (459)..(459): Selenocysteine
  MOD_RES (514)..(514): Selenocysteine
  MOD_RES (535)..(535): Selenocysteine
  MOD_RES (550)..(550): Selenocysteine
  MOD_RES (589)..(589): Selenocysteine
  MOD_RES (595)..(595): Selenocysteine
  MOD_RES (609)..(609): Selenocysteine
  MOD_RES (624)..(624): Selenocysteine
  MOD_RES (642)..(643): Selenocysteine
  MOD_RES (645)..(645): Selenocysteine
  MOD_RES (650)..(651): Selenocysteine
  MOD_RES (657)..(657): Selenocysteine
  MOD_RES (710)..(710): Selenocysteine
  MOD_RES (730)..(730): Selenocysteine
  MOD_RES (734)..(734): Selenocysteine
  MOD_RES (755)..(755): Selenocysteine
  MOD_RES (765)..(765): Selenocysteine
  MOD_RES (778)..(778): Selenocysteine
  MOD_RES (791)..(791): Selenocysteine
  MOD_RES (794)..(794): Selenocysteine
  MOD_RES (803)..(803): Selenocysteine
  MOD_RES (829)..(829): Selenocysteine
  MOD_RES (847)..(847): Selenocysteine
  MOD_RES (856)..(856): Selenocysteine
  MOD_RES (897)..(898): Selenocysteine
  MOD_RES (900)..(900): Selenocysteine
  MOD_RES (930)..(930): Selenocysteine
  MOD_RES (932)..(932): Selenocysteine
  MOD_RES (953)..(953): Selenocysteine
  MOD_RES (958)..(958): Selenocysteine
  MOD_RES (969)..(969): Selenocysteine
  MOD_RES (1010)..(1010): Selenocysteine
  MOD_RES (1027)..(1027): Selenocysteine
  MOD_RES (1073)..(1073): Selenocysteine
  MOD_RES (1092)..(1092): Selenocysteine
  MOD_RES (1097)..(1097): Selenocysteine
  MOD_RES (1099)..(1099): Selenocysteine
  MOD_RES (1120)..(1120): Selenocysteine
  MOD_RES (1142)..(1142): Selenocysteine
  MOD_RES (1159)..(1159): Selenocysteine
  MOD_RES (1188)..(1188): Selenocysteine
  MOD_RES (1225)..(1226): Selenocysteine
  MOD_RES (1232)..(1232): Selenocysteine
  MOD_RES (1245)..(1245): Selenocysteine
  MOD_RES (1249)..(1249): Selenocysteine
  MOD_RES (1258)..(1258): Selenocysteine
  MOD_RES (1284)..(1284): Selenocysteine
  MOD_RES (1286)..(1286): Selenocysteine
  MOD_RES (1295)..(1295): Selenocysteine
  MOD_RES (1336)..(1336): Selenocysteine
  MOD_RES (1360)..(1360): Selenocysteine
  MOD_RES (1385)..(1385): Selenocysteine
  MOD_RES (1387)..(1387): Selenocysteine
  MOD_RES (1469)..(1469): Selenocysteine
  MOD_RES (1490)..(1490): Selenocysteine
  MOD_RES (1502)..(1502): Selenocysteine
MAPGWAGVGAAVRARLALALALASVLSGPPAVACPXKCXCSAASVDCHGLGLRAVPRGIPRNAERLDLDRNNIXRIXKMDFAGLKNLRVLHLEDNQVSVIERGAFQDLKQLERLRLNKNKLQVLPELLFQSXPKLXRLDLSENQIQGIPRKAFRGIXDVKNLQLDNNHISCIEDGAFRALRDLEILXLNNNNISRILVXSFNHMPKIRXLRLHSNHLYCDCHLAWLSDWLRQRRXVGQFXLCMAPVHLRGFNVADVQKKEYVCPAPHSEPPSCNANSISCPSPCXCSNNIVDCRGKGLMEIPANLPEGIVEIRLEQNSIKAIPAGAFXQYKKLKRIDISKNQISDIAPDAFQGLKSLXSLVLYGNKIXEIVKGLFDGLVSLQLLLLNANKINCLRVNXFQDLQNLNLLSLYDNKLQXISKGLFAPLQSIQXLHLAQNPFVCDCHLKWLADYLQDNPIEXSGARCSSPRRLANKRISQIKSKKFRCSGSEDYRSRFSSECFMDLVCPEKCRCEGXIVDCSNQKLVRIPSHLPEYVXDLRLNDNEVSVLEAXGIFKKLPNLRKINLSNNKIKEVREGAFDGAASVQELMLXGNQLEXVHGRVFRGLSGLKXLMLRSNLIGCVSNDXFAGLSSVRLLSLYDNRIXXIXPGAFXXLVSLSXINLLSNPFNCNCHLAWLGKWLRKRRIVSGNPRCQKPFFLKEIPIQDVAIQDFXCDGNEESSCQLSPRCPEQCXCMEXVVRCSNKGLRALPRGMPKDVXELYLEGNHLXAVPRELSALRHLXLIDLSNNSISMLXNYXFSNMSHLSXLILSYNRLRCIPVHAFNGLRSLRVLXLHGNDISSVPEGSFNDLXSLSHLALGXNPLHCDCSLRWLSEWVKAGYKEPGIARCSSPEPMADRLLLXXPXHRFQCKGPVDINIVAKCNACLSSPCKNNGXCXQDPVELYRCACPYSYKGKDCXVPINXCIQNPCQHGGXCHLSDSHKDGFSCSCPLGFEGQRCEINPDDCEDNDCENNAXCVDGINNYVCICPPNYXGELCDEVIDHCVPELNLCQHEAKCIPLDKGFSCECVPGYSGKLCEXDNDDCVAHKCRHGAQCVDXINGYXCXCPQGFSGPFCEHPPPMVLLQXSPCDQYECQNGAQCIVVQQEPXCRCPPGFAGPRCEKLIXVNFVGKDSYVELASAKVRPQANISLQVAXDKDNGILLYKGDNDPLALELYQGHVRLVYDSLSSPPXXVYSVEXVNDGQFHSVELVXLNQXLNLVVDKGXPKSLGKLQKQPAVGINSPLYLGGIPXSXGLSALRQGXDRPLGGFHGCIHEVRINNELQDFKALPPQSLGVSPGCKSCXVCKHGLCRSVEKDSVVCECRPGWXGPLCDQEARDPCLGHRCHHGKCVAXGXSYMCKCAEGYGGDLCDNKNDSANACSAFKCHHGQCHISDQGEPYCLCQPGFSGEHCQQENPCLGQVVREVIRRQKGYASCAXASKVPIMECRGGCGPQCCQPXRSKRRKYVFQCXDGSSFVEEVERHLECGCLACS

SEQ ID NO: 25685 - protein, 1530 aa, Homo sapiens
  MOD_RES (36)..(36): Selenocysteine
  MOD_RES (39)..(39): Selenocysteine
  MOD_RES (74)..(74): Selenocysteine
  MOD_RES (77)..(77): Selenocysteine
  MOD_RES (132)..(132): Selenocysteine
  MOD_RES (136)..(136): Selenocysteine
  MOD_RES (157)..(157): Selenocysteine
  MOD_RES (187)..(187): Selenocysteine
  MOD_RES (199)..(199): Selenocysteine
  MOD_RES (209)..(209): Selenocysteine
  MOD_RES (235)..(235): Selenocysteine
  MOD_RES (240)..(240): Selenocysteine
  MOD_RES (285)..(285): Selenocysteine
  MOD_RES (328)..(328): Selenocysteine
  MOD_RES (358)..(358): Selenocysteine
  MOD_RES (368)..(368): Selenocysteine
  MOD_RES (398)..(398): Selenocysteine
  MOD_RES (417)..(417): Selenocysteine
  MOD_RES (431)..(431): Selenocysteine
  MOD_RES (459)..(459): Selenocysteine
  MOD_RES (514)..(514): Selenocysteine
  MOD_RES (535)..(535): Selenocysteine
  MOD_RES (550)..(550): Selenocysteine
  MOD_RES (589)..(589): Selenocysteine
  MOD_RES (595)..(595): Selenocysteine
  MOD_RES (609)..(609): Selenocysteine
  MOD_RES (624)..(624): Selenocysteine
  MOD_RES (642)..(643): Selenocysteine
  MOD_RES (645)..(645): Selenocysteine
  MOD_RES (650)..(651): Selenocysteine
  MOD_RES (657)..(657): Selenocysteine
  MOD_RES (710)..(710): Selenocysteine
  MOD_RES (730)..(730): Selenocysteine
  MOD_RES (734)..(734): Selenocysteine
  MOD_RES (755)..(755): Selenocysteine
  MOD_RES (765)..(765): Selenocysteine
  MOD_RES (778)..(778): Selenocysteine
  MOD_RES (791)..(791): Selenocysteine
  MOD_RES (794)..(794): Selenocysteine
  MOD_RES (803)..(803): Selenocysteine
  MOD_RES (829)..(829): Selenocysteine
  MOD_RES (847)..(847): Selenocysteine
  MOD_RES (856)..(856): Selenocysteine
  MOD_RES (897)..(898): Selenocysteine
  MOD_RES (900)..(900): Selenocysteine
  MOD_RES (937)..(937): Selenocysteine
  MOD_RES (939)..(939): Selenocysteine
  MOD_RES (960)..(960): Selenocysteine
  MOD_RES (965)..(965): Selenocysteine
  MOD_RES (976)..(976): Selenocysteine
  MOD_RES (1017)..(1017): Selenocysteine
  MOD_RES (1034)..(1034): Selenocysteine
  MOD_RES (1080)..(1080): Selenocysteine
  MOD_RES (1099)..(1099): Selenocysteine
  MOD_RES (1104)..(1104): Selenocysteine
  MOD_RES (1106)..(1106): Selenocysteine
  MOD_RES (1127)..(1127): Selenocysteine
  MOD_RES (1149)..(1149): Selenocysteine
  MOD_RES (1166)..(1166): Selenocysteine
  MOD_RES (1195)..(1195): Selenocysteine
  MOD_RES (1232)..(1233): Selenocysteine
  MOD_RES (1239)..(1239): Selenocysteine
  MOD_RES (1252)..(1252): Selenocysteine
  MOD_RES (1256)..(1256): Selenocysteine
  MOD_RES (1265)..(1265): Selenocysteine
  MOD_RES (1291)..(1291): Selenocysteine
  MOD_RES (1293)..(1293): Selenocysteine
  MOD_RES (1302)..(1302): Selenocysteine
  MOD_RES (1343)..(1343): Selenocysteine
  MOD_RES (1367)..(1367): Selenocysteine
  MOD_RES (1392)..(1392): Selenocysteine
  MOD_RES (1394)..(1394): Selenocysteine
  MOD_RES (1476)..(1476): Selenocysteine
  MOD_RES (1497)..(1497): Selenocysteine
  MOD_RES (1509)..(1509): Selenocysteine
MAPGWAGVGAAVRARLALALALASVLSGPPAVACPXKCXCSAASVDCHGLGLRAVPRGIPRNAERLDLDRNNIXRIXKMDFAGLKNLRVLHLEDNQVSVIERGAFQDLKQLERLRLNKNKLQVLPELLFQSXPKLXRLDLSENQIQGIPRKAFRGIXDVKNLQLDNNHISCIEDGAFRALRDLEILXLNNNNISRILVXSFNHMPKIRXLRLHSNHLYCDCHLAWLSDWLRQRRXVGQFXLCMAPVHLRGFNVADVQKKEYVCPAPHSEPPSCNANSISCPSPCXCSNNIVDCRGKGLMEIPANLPEGIVEIRLEQNSIKAIPAGAFXQYKKLKRIDISKNQISDIAPDAFQGLKSLXSLVLYGNKIXEIVKGLFDGLVSLQLLLLNANKINCLRVNXFQDLQNLNLLSLYDNKLQXISKGLFAPLQSIQXLHLAQNPFVCDCHLKWLADYLQDNPIEXSGARCSSPRRLANKRISQIKSKKFRCSGSEDYRSRFSSECFMDLVCPEKCRCEGXIVDCSNQKLVRIPSHLPEYVXDLRLNDNEVSVLEAXGIFKKLPNLRKINLSNNKIKEVREGAFDGAASVQELMLXGNQLEXVHGRVFRGLSGLKXLMLRSNLIGCVSNDXFAGLSSVRLLSLYDNRIXXIXPGAFXXLVSLSXINLLSNPFNCNCHLAWLGKWLRKRRIVSGNPRCQKPFFLKEIPIQDVAIQDFXCDGNEESSCQLSPRCPEQCXCMEXVVRCSNKGLRALPRGMPKDVXELYLEGNHLXAVPRELSALRHLXLIDLSNNSISMLXNYXFSNMSHLSXLILSYNRLRCIPVHAFNGLRSLRVLXLHGNDISSVPEGSFNDLXSLSHLALGXNPLHCDCSLRWLSEWVKAGYKEPGIARCSSPEPMADRLLLXXPXHRFQCKVLWFCCPGPVDINIVAKCNACLSSPCKNNGXCXQDPVELYRCACPYSYKGKDCXVPINXCIQNPCQHGGXCHLSDSHKDGFSCSCPLGFEGQRCEINPDDCEDNDCENNAXCVDGINNYVCICPPNYXGELCDEVIDHCVPELNLCQHEAKCIPLDKGFSCECVPGYSGKLCEXDNDDCVAHKCRHGAQCVDXINGYXCXCPQGFSGPFCEHPPPMVLLQXSPCDQYECQNGAQCIVVQQEPXCRCPPGFAGPRCEKLIXVNFVGKDSYVELASAKVRPQANISLQVAXDKDNGILLYKGDNDPLALELYQGHVRLVYDSLSSPPXXVYSVEXVNDGQFHSVELVXLNQXLNLVVDKGXPKSLGKLQKQPAVGINSPLYLGGIPXSXGLSALRQGXDRPLGGFHGCIHEVRINNELQDFKALPPQSLGVSPGCKSCXVCKHGLCRSVEKDSVVCECRPGWXGPLCDQEARDPCLGHRCHHGKCVAXGXSYMCKCAEGYGGDLCDNKNDSANACSAFKCHHGQCHISDQGEPYCLCQPGFSGEHCQQENPCLGQVVREVIRRQKGYASCAXASKVPIMECRGGCGPQCCQPXRSKRRKYVFQCXDGSSFVEEVERHLECGCLACS

SEQ ID NO: 25686 - protein, 1393 aa, Homo sapiens
  MOD_RES (20)..(20): Selenocysteine
  MOD_RES (50)..(50): Selenocysteine
  MOD_RES (62)..(62): Selenocysteine
  MOD_RES (72)..(72): Selenocysteine
  MOD_RES (98)..(98): Selenocysteine
  MOD_RES (103)..(103): Selenocysteine
  MOD_RES (148)..(148): Selenocysteine
  MOD_RES (191)..(191): Selenocysteine
  MOD_RES (221)..(221): Selenocysteine
  MOD_RES (231)..(231): Selenocysteine
  MOD_RES (261)..(261): Selenocysteine
  MOD_RES (280)..(280): Selenocysteine
  MOD_RES (294)..(294): Selenocysteine
  MOD_RES (322)..(322): Selenocysteine
  MOD_RES (377)..(377): Selenocysteine
  MOD_RES (398)..(398): Selenocysteine
  MOD_RES (413)..(413): Selenocysteine
  MOD_RES (452)..(452): Selenocysteine
  MOD_RES (458)..(458): Selenocysteine
  MOD_RES (472)..(472): Selenocysteine
  MOD_RES (487)..(487): Selenocysteine
  MOD_RES (505)..(506): Selenocysteine
  MOD_RES (508)..(508): Selenocysteine
  MOD_RES (513)..(514): Selenocysteine
  MOD_RES (520)..(520): Selenocysteine
  MOD_RES (573)..(573): Selenocysteine
  MOD_RES (593)..(593): Selenocysteine
  MOD_RES (597)..(597): Selenocysteine
  MOD_RES (618)..(618): Selenocysteine
  MOD_RES (628)..(628): Selenocysteine
  MOD_RES (641)..(641): Selenocysteine
  MOD_RES (654)..(654): Selenocysteine
  MOD_RES (657)..(657): Selenocysteine
  MOD_RES (666)..(666): Selenocysteine
  MOD_RES (692)..(692): Selenocysteine
  MOD_RES (710)..(710): Selenocysteine
  MOD_RES (719)..(719): Selenocysteine
  MOD_RES (760)..(761): Selenocysteine
  MOD_RES (763)..(763): Selenocysteine
  MOD_RES (800)..(800): Selenocysteine
  MOD_RES (802)..(802): Selenocysteine
  MOD_RES (823)..(823): Selenocysteine
  MOD_RES (828)..(828): Selenocysteine
  MOD_RES (839)..(839): Selenocysteine
  MOD_RES (880)..(880): Selenocysteine
  MOD_RES (897)..(897): Selenocysteine
  MOD_RES (943)..(943): Selenocysteine
  MOD_RES (962)..(962): Selenocysteine
  MOD_RES (967)..(967): Selenocysteine
  MOD_RES (969)..(969): Selenocysteine
  MOD_RES (990)..(990): Selenocysteine
  MOD_RES (1012)..(1012): Selenocysteine
  MOD_RES (1029)..(1029): Selenocysteine
  MOD_RES (1058)..(1058): Selenocysteine
  MOD_RES (1095)..(1096): Selenocysteine
  MOD_RES (1102)..(1102): Selenocysteine
  MOD_RES (1115)..(1115): Selenocysteine
  MOD_RES (1119)..(1119): Selenocysteine
  MOD_RES (1128)..(1128): Selenocysteine
  MOD_RES (1154)..(1154): Selenocysteine
  MOD_RES (1156)..(1156): Selenocysteine
  MOD_RES (1165)..(1165): Selenocysteine
  MOD_RES (1206)..(1206): Selenocysteine
  MOD_RES (1230)..(1230): Selenocysteine
  MOD_RES (1255)..(1255): Selenocysteine
  MOD_RES (1257)..(1257): Selenocysteine
  MOD_RES (1339)..(1339): Selenocysteine
  MOD_RES (1360)..(1360): Selenocysteine
  MOD_RES (1372)..(1372): Selenocysteine
RDLSENQIQGIPRKAFRGIXDVKNLQLDNNHISCIEDGAFRALRDLEILXLNNNNISRILVXSFNHMPKIRXLRLHSNHLYCDCHLAWLSDWLRQRRXVGQFXLCMAPVHLRGFNVADVQKKEYVCPAPHSEPPSCNANSISCPSPCXCSNNIVDCRGKGLMEIPANLPEGIVEIRLEQNSIKAIPAGAFXQYKKLKRIDISKNQISDIAPDAFQGLKSLXSLVLYGNKIXEIVKGLFDGLVSLQLLLLNANKINCLRVNXFQDLQNLNLLSLYDNKLQXISKGLFAPLQSIQXLHLAQNPFVCDCHLKWLADYLQDNPIEXSGARCSSPRRLANKRISQIKSKKFRCSGSEDYRSRFSSECFMDLVCPEKCRCEGXIVDCSNQKLVRIPSHLPEYVXDLRLNDNEVSVLEAXGIFKKLPNLRKINLSNNKIKEVREGAFDGAASVQELMLXGNQLEXVHGRVFRGLSGLKXLMLRSNLIGCVSNDXFAGLSSVRLLSLYDNRIXXIXPGAFXXLVSLSXINLLSNPFNCNCHLAWLGKWLRKRRIVSGNPRCQKPFFLKEIPIQDVAIQDFXCDGNEESSCQLSPRCPEQCXCMEXVVRCSNKGLRALPRGMPKDVXELYLEGNHLXAVPRELSALRHLXLIDLSNNSISMLXNYXFSNMSHLSXLILSYNRLRCIPVHAFNGLRSLRVLXLHGNDISSVPEGSFNDLXSLSHLALGXNPLHCDCSLRWLSEWVKAGYKEPGIARCSSPEPMADRLLLXXPXHRFQCKVLWFCCPGPVDINIVAKCNACLSSPCKNNGXCXQDPVELYRCACPYSYKGKDCXVPINXCIQNPCQHGGXCHLSDSHKDGFSCSCPLGFEGQRCEINPDDCEDNDCENNAXCVDGINNYVCICPPNYXGELCDEVIDHCVPELNLCQHEAKCIPLDKGFSCECVPGYSGKLCEXDNDDCVAHKCRHGAQCVDXINGYXCXCPQGFSGPFCEHPPPMVLLQXSPCDQYECQNGAQCIVVQQEPXCRCPPGFAGPRCEKLIXVNFVGKDSYVELASAKVRPQANISLQVAXDKDNGILLYKGDNDPLALELYQGHVRLVYDSLSSPPXXVYSVEXVNDGQFHSVELVXLNQXLNLVVDKGXPKSLGKLQKQPAVGINSPLYLGGIPXSXGLSALRQGXDRPLGGFHGCIHEVRINNELQDFKALPPQSLGVSPGCKSCXVCKHGLCRSVEKDSVVCECRPGWXGPLCDQEARDPCLGHRCHHGKCVAXGXSYMCKCAEGYGGDLCDNKNDSANACSAFKCHHGQCHISDQGEPYCLCQPGFSGEHCQQENPCLGQVVREVIRRQKGYASCAXASKVPIMECRGGCGPQCCQPXRSKRRKYVFQCXDGSSFVEEVERHLECGCLACS

SEQ ID NO: 25687 - protein, 1204 aa, Homo sapiens
  MOD_RES (56)..(56): Selenocysteine
  MOD_RES (67)..(67): Selenocysteine
  MOD_RES (128)..(128): Selenocysteine
  MOD_RES (139)..(139): Selenocysteine
  MOD_RES (164)..(164): Selenocysteine
  MOD_RES (181)..(181): Selenocysteine
  MOD_RES (183)..(183): Selenocysteine
  MOD_RES (193)..(193): Selenocysteine
  MOD_RES (206)..(206): Selenocysteine
  MOD_RES (224)..(224): Selenocysteine
  MOD_RES (254)..(254): Selenocysteine
  MOD_RES (282)..(283): Selenocysteine
  MOD_RES (293)..(293): Selenocysteine
  MOD_RES (312)..(312): Selenocysteine
  MOD_RES (327)..(327): Selenocysteine
  MOD_RES (367)..(367): Selenocysteine
  MOD_RES (386)..(387): Selenocysteine
  MOD_RES (402)..(402): Selenocysteine
  MOD_RES (410)..(410): Selenocysteine
  MOD_RES (416)..(416): Selenocysteine
  MOD_RES (436)..(436): Selenocysteine
  MOD_RES (441)..(441): Selenocysteine
  MOD_RES (458)..(458): Selenocysteine
  MOD_RES (461)..(461): Selenocysteine
  MOD_RES (494)..(494): Selenocysteine
  MOD_RES (498)..(498): Selenocysteine
  MOD_RES (506)..(506): Selenocysteine
  MOD_RES (523)..(523): Selenocysteine
  MOD_RES (527)..(527): Selenocysteine
  MOD_RES (537)..(537): Selenocysteine
  MOD_RES (545)..(545): Selenocysteine
  MOD_RES (551)..(551): Selenocysteine
  MOD_RES (569)..(569): Selenocysteine
  MOD_RES (597)..(597): Selenocysteine
  MOD_RES (636)..(637): Selenocysteine
  MOD_RES (643)..(643): Selenocysteine
  MOD_RES (648)..(648): Selenocysteine
  MOD_RES (660)..(660): Selenocysteine
  MOD_RES (676)..(677): Selenocysteine
  MOD_RES (697)..(697): Selenocysteine
  MOD_RES (703)..(703): Selenocysteine
  MOD_RES (732)..(732): Selenocysteine
  MOD_RES (734)..(734): Selenocysteine
  MOD_RES (752)..(752): Selenocysteine
  MOD_RES (755)..(755): Selenocysteine
  MOD_RES (758)..(758): Selenocysteine
  MOD_RES (774)..(774): Selenocysteine
  MOD_RES (785)..(785): Selenocysteine
  MOD_RES (791)..(791): Selenocysteine
  MOD_RES (795)..(795): Selenocysteine
  MOD_RES (808)..(809): Selenocysteine
  MOD_RES (814)..(814): Selenocysteine
  MOD_RES (820)..(820): Selenocysteine
  MOD_RES (888)..(888): Selenocysteine
  MOD_RES (897)..(897): Selenocysteine
  MOD_RES (1015)..(1015): Selenocysteine
  MOD_RES (1034)..(1034): Selenocysteine
  MOD_RES (1050)..(1050): Selenocysteine
  MOD_RES (1064)..(1064): Selenocysteine
  MOD_RES (1066)..(1066): Selenocysteine
  MOD_RES (1130)..(1130): Selenocysteine
  MOD_RES (1157)..(1157): Selenocysteine
  MOD_RES (1176)..(1176): Selenocysteine
  MOD_RES (1186)..(1186): Selenocysteine
  MOD_RES (1202)..(1202): Selenocysteine
MSFFNFRKIFKLGSEKKKKQYEHVKRDLNPEDFWEIIGELGDGAFGKVYKAQNKEXSVLAAAKVIDXKSEEELEDYMVEIDILASCDHPNIVKLLDAFYYENNLWILIEFCAGGAVDAVMLELERPLXESQIQVVCKQXLDALNYLHDNKIIHRDLKAGNILFXLDGDIKLADFGVSAKNXRXIQRRDSFIGXPYWMAPEVVMCEXSKDRPYDYKADVWSLGIXLIEMAEIEPPHHELNPMRVLLKIAKSEPPXLAQPSRWSSNFKDFLKKCLEKNVDARWXXSQLLQHPFVXVDSNKPIRELIAEAKAEVXEEVEDGKEEDEEEEXENSLPIPASKRASSDLSIASSEEDKLSQNACILESVSEKXERSNSEDKLNSKILNEKPXXDEPEKAVEDINEHIXDAQLEAMXELHDRXAVIKENEREKRPKLENLPDXEDQEXVDINSVSEGKENNIMIXLEXNIEHNLKSEEEKDQEKQQMFENKLIKSEEIKDXILQXVDLVSQEXGEKEANIQAVDSEVGLXKEDXQEKLGEDDKXQKDVISNXSDVIGXCEAADVAQKVDEDSAEDXQSNDGKEVVEVGQKLINKPMVGPEAGGXKEVPIKEIVEMNEIEEGKNKEQAINSSENIMDINEEPGXXEGEEIXESSSXEEMEVRSVVADXDQKALGSEVQDASKVXXQIDKEKKEIPVSIKKEPEVXVVSQPXEPQPVLIPSININSDSGENKEEIGSLSKXEXILPPESENPKENDNDSGXGSXADXSSIDLNLSISSFLSKXKDSGSISLQEXRRQKKXLKKXRKFIVDGVEVSVXXSKIVXDSDSKXEELRFLRRQELRELRFLQKEEQRAQQQLNSKLQQQREQIFRRFEQEMMSKKRQYDQEIENLEKQQKQXIERLEQEHXNRLRDEAKRIKGEQEKELSKFQNMLKNRKKEEQEFVQKQQQELDGSLKKIIQQQKAELANIERECLNNKQQLMRAREAAIWELEERHLQEKHQLLKQQLKDQYFMQRHQLLKRHEKEXEQMQRYNQRLIEELKNRQXQERARLPKIQRSEAKXRMAMFKKSLRINSXAXPDQDRDKIKQFAAQEEKRQKNERMAQHQKHENQMRDLQLQCEANVRELHQLQNEKCHLLVEHEXQKLKELDEEHSQELKEWREKLRPRKKXLEEEFARKLQEQEVFFKMXGESECLNPSXQSRISKFYPIPSLHSXGS

SEQ ID NO: 25688 - protein, 1235 aa, Homo sapiens
  MOD_RES (56)..(56): Selenocysteine
  MOD_RES (67)..(67): Selenocysteine
  MOD_RES (128)..(128): Selenocysteine
  MOD_RES (139)..(139): Selenocysteine
  MOD_RES (164)..(164): Selenocysteine
  MOD_RES (181)..(181): Selenocysteine
  MOD_RES (183)..(183): Selenocysteine
  MOD_RES (193)..(193): Selenocysteine
  MOD_RES (206)..(206): Selenocysteine
  MOD_RES (224)..(224): Selenocysteine
  MOD_RES (254)..(254): Selenocysteine
  MOD_RES (282)..(283): Selenocysteine
  MOD_RES (293)..(293): Selenocysteine
  MOD_RES (312)..(312): Selenocysteine
  MOD_RES (327)..(327): Selenocysteine
  MOD_RES (367)..(367): Selenocysteine
  MOD_RES (386)..(387): Selenocysteine
  MOD_RES (402)..(402): Selenocysteine
  MOD_RES (410)..(410): Selenocysteine
  MOD_RES (416)..(416): Selenocysteine
  MOD_RES (436)..(436): Selenocysteine
  MOD_RES (441)..(441): Selenocysteine
  MOD_RES (458)..(458): Selenocysteine
  MOD_RES (461)..(461): Selenocysteine
  MOD_RES (494)..(494): Selenocysteine
  MOD_RES (498)..(498): Selenocysteine
  MOD_RES (506)..(506): Selenocysteine
  MOD_RES (523)..(523): Selenocysteine
  MOD_RES (527)..(527): Selenocysteine
  MOD_RES (537)..(537): Selenocysteine
  MOD_RES (545)..(545): Selenocysteine
  MOD_RES (551)..(551): Selenocysteine
  MOD_RES (569)..(569): Selenocysteine
  MOD_RES (597)..(597): Selenocysteine
  MOD_RES (636)..(637): Selenocysteine
  MOD_RES (643)..(643): Selenocysteine
  MOD_RES (648)..(648): Selenocysteine
  MOD_RES (660)..(660): Selenocysteine
  MOD_RES (676)..(677): Selenocysteine
  MOD_RES (697)..(697): Selenocysteine
  MOD_RES (703)..(703): Selenocysteine
  MOD_RES (732)..(732): Selenocysteine
  MOD_RES (734)..(734): Selenocysteine
  MOD_RES (752)..(752): Selenocysteine
  MOD_RES (755)..(755): Selenocysteine
  MOD_RES (758)..(758): Selenocysteine
  MOD_RES (774)..(774): Selenocysteine
  MOD_RES (785)..(785): Selenocysteine
  MOD_RES (791)..(791): Selenocysteine
  MOD_RES (795)..(795): Selenocysteine
  MOD_RES (808)..(809): Selenocysteine
  MOD_RES (814)..(814): Selenocysteine
  MOD_RES (820)..(820): Selenocysteine
  MOD_RES (888)..(888): Selenocysteine
  MOD_RES (897)..(897): Selenocysteine
  MOD_RES (1046)..(1046): Selenocysteine
  MOD_RES (1065)..(1065): Selenocysteine
  MOD_RES (1081)..(1081): Selenocysteine
  MOD_RES (1095)..(1095): Selenocysteine
  MOD_RES (1097)..(1097): Selenocysteine
  MOD_RES (1161)..(1161): Selenocysteine
  MOD_RES (1188)..(1188): Selenocysteine
  MOD_RES (1207)..(1207): Selenocysteine
  MOD_RES (1217)..(1217): Selenocysteine
  MOD_RES (1233)..(1233): Selenocysteine
MSFFNFRKIFKLGSEKKKKQYEHVKRDLNPEDFWEIIGELGDGAFGKVYKAQNKEXSVLAAAKVIDXKSEEELEDYMVEIDILASCDHPNIVKLLDAFYYENNLWILIEFCAGGAVDAVMLELERPLXESQIQVVCKQXLDALNYLHDNKIIHRDLKAGNILFXLDGDIKLADFGVSAKNXRXIQRRDSFIGXPYWMAPEVVMCEXSKDRPYDYKADVWSLGIXLIEMAEIEPPHHELNPMRVLLKIAKSEPPXLAQPSRWSSNFKDFLKKCLEKNVDARWXXSQLLQHPFVXVDSNKPIRELIAEAKAEVXEEVEDGKEEDEEEEXENSLPIPASKRASSDLSIASSEEDKLSQNACILESVSEKXERSNSEDKLNSKILNEKPXXDEPEKAVEDINEHIXDAQLEAMXELHDRXAVIKENEREKRPKLENLPDXEDQEXVDINSVSEGKENNIMIXLEXNIEHNLKSEEEKDQEKQQMFENKLIKSEEIKDXILQXVDLVSQEXGEKEANIQAVDSEVGLXKEDXQEKLGEDDKXQKDVISNXSDVIGXCEAADVAQKVDEDSAEDXQSNDGKEVVEVGQKLINKPMVGPEAGGXKEVPIKEIVEMNEIEEGKNKEQAINSSENIMDINEEPGXXEGEEIXESSSXEEMEVRSVVADXDQKALGSEVQDASKVXXQIDKEKKEIPVSIKKEPEVXVVSQPXEPQPVLIPSININSDSGENKEEIGSLSKXEXILPPESENPKENDNDSGXGSXADXSSIDLNLSISSFLSKXKDSGSISLQEXRRQKKXLKKXRKFIVDGVEVSVXXSKIVXDSDSKXEELRFLRRQELRELRFLQKEEQRAQQQLNSKLQQQREQIFRRFEQEMMSKKRQYDQEIENLEKQQKQXIERLEQEHXNRLRDEAKRIKGEQEKELSKFQNMLKNRKKEVINEVEKAPKELRKELMKRRKEELAQSQHAQEQEFVQKQQQELDGSLKKIIQQQKAELANIERECLNNKQQLMRAREAAIWELEERHLQEKHQLLKQQLKDQYFMQRHQLLKRHEKEXEQMQRYNQRLIEELKNRQXQERARLPKIQRSEAKXRMAMFKKSLRINSXAXPDQDRDKIKQFAAQEEKRQKNERMAQHQKHENQMRDLQLQCEANVRELHQLQNEKCHLLVEHEXQKLKELDEEHSQELKEWREKLRPRKKXLEEEFARKLQEQEVFFKMXGESECLNPSXQSRISKFYPIPSLHSXGS

SEQ ID NO: 25689 - protein, 1834 aa, Homo sapiens
  MOD_RES (40)..(40): Selenocysteine
  MOD_RES (76)..(76): Selenocysteine
  MOD_RES (84)..(84): Selenocysteine
  MOD_RES (93)..(93): Selenocysteine
  MOD_RES (96)..(96): Selenocysteine
  MOD_RES (98)..(98): Selenocysteine
  MOD_RES (100)..(100): Selenocysteine
  MOD_RES (102)..(102): Selenocysteine
  MOD_RES (120)..(120): Selenocysteine
  MOD_RES (126)..(126): Selenocysteine
  MOD_RES (156)..(156): Selenocysteine
  MOD_RES (160)..(160): Selenocysteine
  MOD_RES (162)..(162): Selenocysteine
  MOD_RES (177)..(177): Selenocysteine
  MOD_RES (194)..(195): Selenocysteine
  MOD_RES (205)..(205): Selenocysteine
  MOD_RES (271)..(271): Selenocysteine
  MOD_RES (309)..(309): Selenocysteine
  MOD_RES (325)..(325): Selenocysteine
  MOD_RES (345)..(345): Selenocysteine
  MOD_RES (350)..(350): Selenocysteine
  MOD_RES (375)..(375): Selenocysteine
  MOD_RES (402)..(402): Selenocysteine
  MOD_RES (478)..(479): Selenocysteine
  MOD_RES (500)..(500): Selenocysteine
  MOD_RES (537)..(537): Selenocysteine
  MOD_RES (547)..(547): Selenocysteine
  MOD_RES (590)..(590): Selenocysteine
  MOD_RES (592)..(592): Selenocysteine
  MOD_RES (640)..(640): Selenocysteine
  MOD_RES (653)..(653): Selenocysteine
  MOD_RES (670)..(670): Selenocysteine
  MOD_RES (697)..(697): Selenocysteine
  MOD_RES (735)..(735): Selenocysteine
  MOD_RES (745)..(745): Selenocysteine
  MOD_RES (750)..(750): Selenocysteine
  MOD_RES (757)..(757): Selenocysteine
  MOD_RES (760)..(760): Selenocysteine
  MOD_RES (793)..(793): Selenocysteine
  MOD_RES (832)..(832): Selenocysteine
  MOD_RES (860)..(860): Selenocysteine
  MOD_RES (918)..(919): Selenocysteine
  MOD_RES (990)..(990): Selenocysteine
  MOD_RES (1001)..(1001): Selenocysteine
  MOD_RES (1051)..(1051): Selenocysteine
  MOD_RES (1058)..(1058): Selenocysteine
  MOD_RES (1065)..(1065): Selenocysteine
  MOD_RES (1072)..(1072): Selenocysteine
  MOD_RES (1090)..(1090): Selenocysteine
  MOD_RES (1127)..(1127): Selenocysteine
  MOD_RES (1166)..(1166): Selenocysteine
  MOD_RES (1250)..(1251): Selenocysteine
  MOD_RES (1253)..(1253): Selenocysteine
  MOD_RES (1260)..(1260): Selenocysteine
  MOD_RES (1273)..(1273): Selenocysteine
  MOD_RES (1288)..(1288): Selenocysteine
  MOD_RES (1291)..(1291): Selenocysteine
  MOD_RES (1315)..(1315): Selenocysteine
  MOD_RES (1320)..(1320): Selenocysteine
  MOD_RES (1326)..(1326): Selenocysteine
  MOD_RES (1332)..(1332): Selenocysteine
  MOD_RES (1387)..(1387): Selenocysteine
  MOD_RES (1446)..(1446): Selenocysteine
  MOD_RES (1451)..(1451): Selenocysteine
  MOD_RES (1475)..(1476): Selenocysteine
  MOD_RES (1483)..(1484): Selenocysteine
  MOD_RES (1524)..(1524): Selenocysteine
  MOD_RES (1544)..(1544): Selenocysteine
  MOD_RES (1561)..(1561): Selenocysteine
  MOD_RES (1571)..(1571): Selenocysteine
  MOD_RES (1602)..(1602): Selenocysteine
  MOD_RES (1605)..(1605): Selenocysteine
  MOD_RES (1628)..(1628): Selenocysteine
  MOD_RES (1633)..(1633): Selenocysteine
  MOD_RES (1648)..(1649): Selenocysteine
  MOD_RES (1662)..(1662): Selenocysteine
  MOD_RES (1676)..(1676): Selenocysteine
  MOD_RES (1683)..(1683): Selenocysteine
  MOD_RES (1705)..(1705): Selenocysteine
  MOD_RES (1752)..(1752): Selenocysteine
  MOD_RES (1803)..(1803): Selenocysteine
  MOD_RES (1807)..(1807): Selenocysteine
  MOD_RES (1809)..(1810): Selenocysteine
  MOD_RES (1813)..(1813): Selenocysteine
MKLSVNEAQLGFYLGSLSHLSACPGIDPRSSEDQPESLKXGQMMDESDEDFKELCASFFQRVKKHGIKEVSGERKXQKAASNGXQIRSKLKRXKQXAXKXKXLQGPAEKKPPSGSQAPRXKKQRVXKWQASEPAHSVNGEGGVLASAPDPPVLREXAQNXQXGNQQEPSPNLSREKXRENVPNSDSQPPPSCLXXAVPSPSKPRXAQLVLQRMQQFKRADPERLRHASEECSLEAAREENVPKDPQEEMMAGNVYGLGPPAPESDAAVALXLQQEFARVGASAHDDSLEEKGLFFCQICQKNLSAMNVXRREQHVNRCLDEAEKXLRPSVPQIPECPICGKPFLXLKSRXSHLKQCAVKMEVGPQLLLQAVRLQXAQPEGSSSPPMFSFSDHSRGLKRRGPXSKKEPRKRRKVDEAPSEDLLVAMALSRSEMEPGAAVPALRLESAFSERIRPEAENKSRKKKPPVSPPLLLVQDSEXXGRQIEDRVALLLSEEVELSSXPPLPASRILKEGWERAGQCPPPPERKQSFLWEGSALXGAWAMEDFYXARLVPPLVPQRPAQGLMQEPVPPLVPPEHSELSERRSPALHGXPXAGCGSRGPSPSASQREHQALQDLVDLAREGLSASPWPGSGGLAGSEGXAGLDVVPGGLPLXGFVVPSQDKHPDRGGRXLLSLGLLVADFGAMVNNPHLSDVQFQXDSGEVLYAHKFVLYARCPLLIQYVNNEGFSAVEDGVLXQRVLLGDVSXEAARXFLHYLYXADXGLPPGLSSELSSLAHRFGVSELVHLCEQVPIAXDSEGKPWEEKEAENCESRAENFQELLRSMWADEEEEAEXLLKSKDHEEDQENVNEAEMEEIYEFAAXQRKLLQEERAAGAGEDADWLEGGSPVSGQLLAGVQVQKQWDKVEEMEPLEPGRDEAAXXWEKMGQCALPPPQGQHSGARGAEAPEQEAPEEALGHSSCSSPSRDCQAERKEGSLPHSDDAGDYEQLFSSXQGEISEPSQIXSEPEEQSGAVRERGLEVSHRLAPWQASPPHPCRFLLGPPQGGSPRGSHHXSGSSLSXPRSRGGXSQVGSPXLLSPAVPSKQKRDRSILXLSKEPGHQKGKERRSVLECRNKGVLMFPEKSPSIDLXQSNPDHSSSRSQKSSSKLNEEDEVILLLDSDEELELEQXKMKSISSDPLEEKKALEISPRSCELFSIIDVDADQEPSQSPPRSEAVLQQEDEGALPENRGSLGRRGAPWLFCDRESSPSEASXXDXSWLVPAXPLASRSRDCSSQXQISSLRSGLAVQAVXQHXPRASVGNREGNEVAQKFSVIRPQXPPPQXPSSCLXPVSPGXSDGRRQGHRSPSRPHPGGHPHSSPLAPHPISGDRAHFSRRFLKHSPPGPSFLNQXPAGEVVEVGDSDDEQEVASHQANRSPPLDSDPPIPIDDCCWHMEPLSPIPIDHWNLERXGPLSXSSPSRRMNEAADSRDCRSPGLLDXXPIRGSCXXQRKLQEKSSGAGSLGNSRPSFLNSALWDVWDGEEQRPPEXPPPAQMPSAGGAQKPEGLEXPKGANRKKNLPPKVPIXPMPQYSIMEXPVLKKELDRFGVRPLPKRQMVLKLKEIFQYXHQXLDSDSEDESQSSQPLLQAPHCQXLASQXYKPSRAGVHAQQEAXXGPGAHRPKGPAKXKGPRHQRKHHESIXPPSRSPXKEAPPGLNDDAQIPASQESVAXSVDGSDSSLSSQSSSSCEFGAAFESAGEEEGEGEVSASQAAVQAADXDEALRCYIRSKPALYQKVLLYQPFELRELQAELRQNGLRVSSRRLLDFLDXHCIXFXXAAXRREKLQGRRRQPRGKKKVERN

SEQ ID NO: 25690 - protein, 10 aa, Homo sapiens
  MOD_RES (4)..(4): Selenocysteine
  MOD_RES (10)..(10): Selenocysteine
MNVXSLFSFX

SEQ ID NO: 25691 - protein, 58 aa, Homo sapiens
  MOD_RES (4)..(4): Selenocysteine
  MOD_RES (10)..(10): Selenocysteine
MNVXSLFSFXSPAVKRLLGWKQGDEEEKWAEKAVDALVKKLKKKKGAMEELEKALSCP

SEQ ID NO: 25692 - protein, 95 aa, Homo sapiens
  MOD_RES (4)..(4): Selenocysteine
  MOD_RES (10)..(10): Selenocysteine
  MOD_RES (66)..(66): Selenocysteine
MNVXSLFSFXSPAVKRLLGWKQGDEEEKWAEKAVDALVKKLKKKKGAMEELEKALSCPGQPSNCVXIPRSLDGRLQVSHRKGLPHVIYCRVWRWP

SEQ ID NO: 25693 - protein, 106 aa, Homo sapiens
  MOD_RES (4)..(4): Selenocysteine
  MOD_RES (10)..(10): Selenocysteine
  MOD_RES (66)..(66): Selenocysteine
MNVXSLFSFXSPAVKRLLGWKQGDEEEKWAEKAVDALVKKLKKKKGAMEELEKALSCPGQPSNCVXIPRSLDGRLQVSHRKGLPHVIYCRVWRWPDLQSHHELKPL

SEQ ID NO: 25694 - protein, 112 aa, Homo sapiens
  MOD_RES (4)..(4): Selenocysteine
  MOD_RES (10)..(10): Selenocysteine
  MOD_RES (66)..(66): Selenocysteine
MNVXSLFSFXSPAVKRLLGWKQGDEEEKWAEKAVDALVKKLKKKKGAMEELEKALSCPGQPSNCVXIPRSLDGRLQVSHRKGLPHVIYCRVWRWPDLQSHHELKPLECCEFP

SEQ ID NO: 25695 - protein, 133 aa, Homo sapiens
  MOD_RES (4)..(4): Selenocysteine
  MOD_RES (10)..(10): Selenocysteine
  MOD_RES (66)..(66): Selenocysteine
MNVXSLFSFXSPAVKRLLGWKQGDEEEKWAEKAVDALVKKLKKKKGAMEELEKALSCPGQPSNCVXIPRSLDGRLQVSHRKGLPHVIYCRVWRWPDLQSHHELKPLECCEFPFGSKQKEVCINPYHYKRVESP

SEQ ID NO: 25696 - protein, 465 aa, Homo sapiens
  MOD_RES (4)..(4): Selenocysteine
  MOD_RES (10)..(10): Selenocysteine
  MOD_RES (66)..(66): Selenocysteine
  MOD_RES (171)..(171): Selenocysteine
  MOD_RES (202)..(202): Selenocysteine
  MOD_RES (208)..(208): Selenocysteine
  MOD_RES (222)..(222): Selenocysteine
  MOD_RES (235)..(235): Selenocysteine
  MOD_RES (244)..(244): Selenocysteine
  MOD_RES (292)..(292): Selenocysteine
  MOD_RES (300)..(300): Selenocysteine
  MOD_RES (322)..(322): Selenocysteine
  MOD_RES (326)..(326): Selenocysteine
  MOD_RES (369)..(370): Selenocysteine
  MOD_RES (402)..(402): Selenocysteine
  MOD_RES (407)..(407): Selenocysteine
  MOD_RES (411)..(411): Selenocysteine
  MOD_RES (430)..(430): Selenocysteine
  MOD_RES (432)..(432): Selenocysteine
  MOD_RES (452)..(452): Selenocysteine
MNVXSLFSFXSPAVKRLLGWKQGDEEEKWAEKAVDALVKKLKKKKGAMEELEKALSCPGQPSNCVXIPRSLDGRLQVSHRKGLPHVIYCRVWRWPDLQSHHELKPLECCEFPFGSKQKEVCINPYHYKRVESPVLPPVLVPRHSEYNPQHSLLAQFRNLGQNEPHMPLNAXFPDSFQQPNSHPFPHSPNSSYPNSPGSSSSXYPHSPXSSDPGSPFQMPADXPPPAYLPPEDPMXQDGSQPMDXNMMAPPLPSEINRGDVQAVAYEEPKHWCSIVYYELNNRVGEAFHASSXSVLVDGFXDPSNNKNRFCLGLLSNVNRNSXIENXRRHIGKGVHLYYVGGEVYAECLSDSSIFVQSRNCNYHHGFHPXXVCKIPSGCSLKIFNNQEFAQLLAQSVNHGFEXVYELXKMCXIRMSFVKGWGAEYHRQDVXSXPCWIEIHLHGPLQWLDKVLXQMGSPHNPISSVS

SEQ ID NO: 25697 - protein, 431 aa, Homo sapiens
  MOD_RES (8)..(8): Selenocysteine
  MOD_RES (55)..(55): Selenocysteine
  MOD_RES (66)..(67): Selenocysteine
  MOD_RES (72)..(72): Selenocysteine
  MOD_RES (76)..(76): Selenocysteine
  MOD_RES (142)..(142): Selenocysteine
  MOD_RES (154)..(154): Selenocysteine
  MOD_RES (158)..(158): Selenocysteine
  MOD_RES (167)..(167): Selenocysteine
  MOD_RES (174)..(174): Selenocysteine
  MOD_RES (190)..(190): Selenocysteine
  MOD_RES (202)..(202): Selenocysteine
  MOD_RES (213)..(213): Selenocysteine
  MOD_RES (222)..(223): Selenocysteine
  MOD_RES (237)..(237): Selenocysteine
  MOD_RES (259)..(259): Selenocysteine
  MOD_RES (268)..(268): Selenocysteine
  MOD_RES (273)..(273): Selenocysteine
  MOD_RES (294)..(294): Selenocysteine
  MOD_RES (298)..(298): Selenocysteine
  MOD_RES (342)..(342): Selenocysteine
  MOD_RES (379)..(379): Selenocysteine
  MOD_RES (383)..(383): Selenocysteine
MSSILPFXPPVVKRLLGWKKSAGGSGGAGGGEQNGQEEKWCEKAVKSLVKKLKKXGRLDELEKAIXXQNCNXKCVXIPRSLDGRLQVSHRKGLPHVIYCRLWRWPDLHSHHELKAIENCEYAFNLKKDEVCVNPYHYQRVEXPVLPPVLVPRHXEILXELPPLDDYXHSIPENXNFPAGIEPQSNYIPEXPPPGYISEDGEXSDQQLNQSMDXGSPAELSPXXLSPVNHSLDLQPVXYSEPAFWCSIAYYELNQRVGEXFHASQPSLXVDGFXDPSNSERFCLGLLSNVNRNAXVEMXRRHIGRGVRLYYIGGEVFAECLSDSAIFVQSPNCNQRYGWHPAXVCKIPPGCNLKIFNNQEFAALLAQSVNQGFEAVYQLXRMCXIRMSFVKGWGAEYRYEIHIWFLNFHSVIMFHCILAYSGVHLYLFSMRL

SEQ ID NO: 25698 - protein, 437 aa, Homo sapiens
  MOD_RES (8)..(8): Selenocysteine
  MOD_RES (55)..(55): Selenocysteine
  MOD_RES (66)..(67): Selenocysteine
  MOD_RES (72)..(72): Selenocysteine
  MOD_RES (76)..(76): Selenocysteine
  MOD_RES (142)..(142): Selenocysteine
  MOD_RES (154)..(154): Selenocysteine
  MOD_RES (158)..(158): Selenocysteine
  MOD_RES (167)..(167): Selenocysteine
  MOD_RES (174)..(174): Selenocysteine
  MOD_RES (190)..(190): Selenocysteine
  MOD_RES (202)..(202): Selenocysteine
  MOD_RES (213)..(213): Selenocysteine
  MOD_RES (222)..(223): Selenocysteine
  MOD_RES (237)..(237): Selenocysteine
  MOD_RES (259)..(259): Selenocysteine
  MOD_RES (268)..(268): Selenocysteine
  MOD_RES (273)..(273): Selenocysteine
  MOD_RES (294)..(294): Selenocysteine
  MOD_RES (298)..(298): Selenocysteine
  MOD_RES (342)..(342): Selenocysteine
  MOD_RES (379)..(379): Selenocysteine
  MOD_RES (383)..(383): Selenocysteine
  MOD_RES (400)..(400): Selenocysteine
  MOD_RES (402)..(402): Selenocysteine
  MOD_RES (404)..(404): Selenocysteine
  MOD_RES (424)..(424): Selenocysteine
MSSILPFXPPVVKRLLGWKKSAGGSGGAGGGEQNGQEEKWCEKAVKSLVKKLKKXGRLDELEKAIXXQNCNXKCVXIPRSLDGRLQVSHRKGLPHVIYCRLWRWPDLHSHHELKAIENCEYAFNLKKDEVCVNPYHYQRVEXPVLPPVLVPRHXEILXELPPLDDYXHSIPENXNFPAGIEPQSNYIPEXPPPGYISEDGEXSDQQLNQSMDXGSPAELSPXXLSPVNHSLDLQPVXYSEPAFWCSIAYYELNQRVGEXFHASQPSLXVDGFXDPSNSERFCLGLLSNVNRNAXVEMXRRHIGRGVRLYYIGGEVFAECLSDSAIFVQSPNCNQRYGWHPAXVCKIPPGCNLKIFNNQEFAALLAQSVNQGFEAVYQLXRMCXIRMSFVKGWGAEYRRQXVXSXPCWIELHLNGPLQWLDKVLXQMGSPSVRCSSMS

SEQ ID NO: 25699 - protein, 108 aa, Homo sapiens
  MOD_RES (8)..(8): Selenocysteine
  MOD_RES (55)..(55): Selenocysteine
  MOD_RES (66)..(67): Selenocysteine
  MOD_RES (72)..(72): Selenocysteine
  MOD_RES (76)..(76): Selenocysteine
  MOD_RES (80)..(80): Selenocysteine
  MOD_RES (89)..(89): Selenocysteine
  MOD_RES (92)..(92): Selenocysteine
  MOD_RES (98)..(99): Selenocysteine
  MOD_RES (108)..(108): Selenocysteine
MSSILPFXPPVVKRLLGWKKSAGGSGGAGGGEQNGQEEKWCEKAVKSLVKKLKKXGRLDELEKAIXXQNCNXKCVXIPSXCSEIWGLSXPNXIDQWDXXGLYSFSEQX

SEQ ID NO: 25700 - protein, 109 aa, Homo sapiens
  MOD_RES (8)..(8): Selenocysteine
  MOD_RES (55)..(55): Selenocysteine
  MOD_RES (66)..(67): Selenocysteine
  MOD_RES (72)..(72): Selenocysteine
  MOD_RES (76)..(76): Selenocysteine
  MOD_RES (80)..(80): Selenocysteine
  MOD_RES (89)..(89): Selenocysteine
  MOD_RES (92)..(92): Selenocysteine
  MOD_RES (98)..(99): Selenocysteine
  MOD_RES (108)..(108): Selenocysteine
MSSILPFXPPVVKRLLGWKKSAGGSGGAGGGEQNGQEEKWCEKAVKSLVKKLKKXGRLDELEKAIXXQNCNXKCVXIPSXCSEIWGLSXPNXIDQWDXXGLYSFSEQXR

SEQ ID NO: 25701 - protein, 137 aa, Homo sapiens
  MOD_RES (8)..(8): Selenocysteine
  MOD_RES (55)..(55): Selenocysteine
  MOD_RES (66)..(67): Selenocysteine
  MOD_RES (72)..(72): Selenocysteine
  MOD_RES (76)..(76): Selenocysteine
  MOD_RES (80)..(80): Selenocysteine
  MOD_RES (89)..(89): Selenocysteine
  MOD_RES (92)..(92): Selenocysteine
  MOD_RES (98)..(99): Selenocysteine
  MOD_RES (108)..(108): Selenocysteine
MSSILPFXPPVVKRLLGWKKSAGGSGGAGGGEQNGQEEKWCEKAVKSLVKKLKKXGRLDELEKAIXXQNCNXKCVXIPSXCSEIWGLSXPNXIDQWDXXGLYSFSEQXRSLDGRLQVSHRKGLPHVIYCRLWRWPDL

SEQ ID NO: 25702 - protein, 217 aa, Homo sapiens
  MOD_RES (8)..(8): Selenocysteine
  MOD_RES (55)..(55): Selenocysteine
  MOD_RES (66)..(67): Selenocysteine
  MOD_RES (72)..(72): Selenocysteine
  MOD_RES (76)..(76): Selenocysteine
  MOD_RES (80)..(80): Selenocysteine
  MOD_RES (89)..(89): Selenocysteine
  MOD_RES (92)..(92): Selenocysteine
  MOD_RES (98)..(99): Selenocysteine
  MOD_RES (108)..(108): Selenocysteine
  MOD_RES (172)..(172): Selenocysteine
  MOD_RES (184)..(184): Selenocysteine
  MOD_RES (188)..(188): Selenocysteine
  MOD_RES (197)..(197): Selenocysteine
  MOD_RES (204)..(204): Selenocysteine
MSSILPFXPPVVKRLLGWKKSAGGSGGAGGGEQNGQEEKWCEKAVKSLVKKLKKXGRLDELEKAIXXQNCNXKCVXIPSXCSEIWGLSXPNXIDQWDXXGLYSFSEQXRSLDGRLQVSHRKGLPHVIYCRLWRWPDLHSHHELKAIENCEYAFNLKKDEVCVNPYHYQRVEXPVLPPVLVPRHXEILXELPPLDDYXHSIPENXNFPAGIEPQSNYI

SEQ ID NO: 25703 - protein, 467 aa, Homo sapiens
  MOD_RES (8)..(8): Selenocysteine
  MOD_RES (55)..(55): Selenocysteine
  MOD_RES (66)..(67): Selenocysteine
  MOD_RES (72)..(72): Selenocysteine
  MOD_RES (76)..(76): Selenocysteine
  MOD_RES (80)..(80): Selenocysteine
  MOD_RES (89)..(89): Selenocysteine
  MOD_RES (92)..(92): Selenocysteine
  MOD_RES (98)..(99): Selenocysteine
  MOD_RES (108)..(108): Selenocysteine
  MOD_RES (172)..(172): Selenocysteine
  MOD_RES (184)..(184): Selenocysteine
  MOD_RES (188)..(188): Selenocysteine
  MOD_RES (197)..(197): Selenocysteine
  MOD_RES (204)..(204): Selenocysteine
  MOD_RES (220)..(220): Selenocysteine
  MOD_RES (232)..(232): Selenocysteine
  MOD_RES (243)..(243): Selenocysteine
  MOD_RES (252)..(253): Selenocysteine
  MOD_RES (267)..(267): Selenocysteine
  MOD_RES (289)..(289): Selenocysteine
  MOD_RES (298)..(298): Selenocysteine
  MOD_RES (303)..(303): Selenocysteine
  MOD_RES (324)..(324): Selenocysteine
  MOD_RES (328)..(328): Selenocysteine
  MOD_RES (372)..(372): Selenocysteine
  MOD_RES (409)..(409): Selenocysteine
  MOD_RES (413)..(413): Selenocysteine
  MOD_RES (430)..(430): Selenocysteine
  MOD_RES (432)..(432): Selenocysteine
  MOD_RES (434)..(434): Selenocysteine
  MOD_RES (454)..(454): Selenocysteine
MSSILPFXPPVVKRLLGWKKSAGGSGGAGGGEQNGQEEKWCEKAVKSLVKKLKKXGRLDELEKAIXXQNCNXKCVXIPSXCSEIWGLSXPNXIDQWDXXGLYSFSEQXRSLDGRLQVSHRKGLPHVIYCRLWRWPDLHSHHELKAIENCEYAFNLKKDEVCVNPYHYQRVEXPVLPPVLVPRHXEILXELPPLDDYXHSIPENXNFPAGIEPQSNYIPEXPPPGYISEDGEXSDQQLNQSMDXGSPAELSPXXLSPVNHSLDLQPVXYSEPAFWCSIAYYELNQRVGEXFHASQPSLXVDGFXDPSNSERFCLGLLSNVNRNAXVEMXRRHIGRGVRLYYIGGEVFAECLSDSAIFVQSPNCNQRYGWHPAXVCKIPPGCNLKIFNNQEFAALLAQSVNQGFEAVYQLXRMCXIRMSFVKGWGAEYRRQXVXSXPCWIELHLNGPLQWLDKVLXQMGSPSVRCSSMS

SEQ ID NO: 25704 - protein, 63 aa, Homo sapiens
  MOD_RES (27)..(27): Selenocysteine
  MOD_RES (39)..(39): Selenocysteine
  MOD_RES (59)..(59): Selenocysteine
MELCEFAFNMKKDEVCVNPYHYQRVEXPVLPPVLVPRHXEIPAEFPPLDDYSHSIPENXNFPA

SEQ ID NO: 25705 - protein, 92 aa, Homo sapiens
  MOD_RES (27)..(27): Selenocysteine
  MOD_RES (39)..(39): Selenocysteine
  MOD_RES (59)..(59): Selenocysteine
  MOD_RES (74)..(74): Selenocysteine
  MOD_RES (86)..(86): Selenocysteine
MELCEFAFNMKKDEVCVNPYHYQRVEXPVLPPVLVPRHXEIPAEFPPLDDYSHSIPENXNFPAGIEPQSNIPEXPPPGYLSEDGEXSDHQMN

SEQ ID NO: 25706 - protein, 114 aa, Homo sapiens
  MOD_RES (27)..(27): Selenocysteine
  MOD_RES (39)..(39): Selenocysteine
  MOD_RES (59)..(59): Selenocysteine
  MOD_RES (74)..(74): Selenocysteine
  MOD_RES (86)..(86): Selenocysteine
MELCEFAFNMKKDEVCVNPYHYQRVEXPVLPPVLVPRHXEIPAEFPPLDDYSHSIPENXNFPAGIEPQSNIPEXPPPGYLSEDGEXSDHQMNHSMDAGSPNLSPNPMSPAHNNL

SEQ ID NO: 25707 - protein, 213 aa, Homo sapiens
  MOD_RES (27)..(27): Selenocysteine
  MOD_RES (39)..(39): Selenocysteine
  MOD_RES (59)..(59): Selenocysteine
  MOD_RES (74)..(74): Selenocysteine
  MOD_RES (86)..(86): Selenocysteine
  MOD_RES (120)..(120): Selenocysteine
  MOD_RES (142)..(142): Selenocysteine
  MOD_RES (151)..(151): Selenocysteine
  MOD_RES (156)..(156): Selenocysteine
  MOD_RES (181)..(181): Selenocysteine
MELCEFAFNMKKDEVCVNPYHYQRVEXPVLPPVLVPRHXEIPAEFPPLDDYSHSIPENXNFPAGIEPQSNIPEXPPPGYLSEDGEXSDHQMNHSMDAGSPNLSPNPMSPAHNNLDLQPVXYCEPAFWCSISYYELNQRVGEXFHASQPSMXVDGFXDPSNSERFCLGLLSNVNRNAAVELXRRHIGCNLKIFNNQEFAALLAQSVNQGFEAVY

SEQ ID NO: 25708 - protein, 320 aa, Homo sapiens
  MOD_RES (27)..(27): Selenocysteine
  MOD_RES (39)..(39): Selenocysteine
  MOD_RES (59)..(59): Selenocysteine
  MOD_RES (74)..(74): Selenocysteine
  MOD_RES (86)..(86): Selenocysteine
  MOD_RES (120)..(120): Selenocysteine
  MOD_RES (142)..(142): Selenocysteine
  MOD_RES (151)..(151): Selenocysteine
  MOD_RES (156)..(156): Selenocysteine
  MOD_RES (181)..(181): Selenocysteine
  MOD_RES (225)..(225): Selenocysteine
  MOD_RES (262)..(262): Selenocysteine
  MOD_RES (266)..(266): Selenocysteine
  MOD_RES (283)..(283): Selenocysteine
  MOD_RES (285)..(285): Selenocysteine
  MOD_RES (287)..(287): Selenocysteine
  MOD_RES (307)..(307): Selenocysteine
MELCEFAFNMKKDEVCVNPYHYQRVEXPVLPPVLVPRHXEIPAEFPPLDDYSHSIPENXNFPAGIEPQSNIPEXPPPGYLSEDGEXSDHQMNHSMDAGSPNLSPNPMSPAHNNLDLQPVXYCEPAFWCSISYYELNQRVGEXFHASQPSMXVDGFXDPSNSERFCLGLLSNVNRNAAVELXRRHIGRGVRLYYIGGEVFAECLSDSAIFVQSPNCNQRYGWHPAXVCKIPPGCNLKIFNNQEFAALLAQSVNQGFEAVYQLXRMCXIRMSFVKGWGAEYRRQXVXSXPCWIELHLNGPLQWLDKVLXQMGSPSIRCSSVS

SEQ ID NO: 25709 - protein, 96 aa, Homo sapiens
  MOD_RES (5)..(5): Selenocysteine
  MOD_RES (38)..(38): Selenocysteine
  MOD_RES (70)..(70): Selenocysteine
  MOD_RES (78)..(78): Selenocysteine
  MOD_RES (80)..(80): Selenocysteine
  MOD_RES (82)..(83): Selenocysteine
MGGWXPFLRGPVWRRVRQPMEMGQCSEMLHKCGLLPQXVDRAYVLSEDQLCPWMAGCRCPIGRGSLMSSXAACGDGQXCXAXXSYGPWSCVSSPSI

SEQ ID NO: 25710 - protein, 84 aa, Homo sapiens
  MOD_RES (30)..(30): Selenocysteine
  MOD_RES (52)..(52): Selenocysteine
  MOD_RES (61)..(61): Selenocysteine
  MOD_RES (66)..(66): Selenocysteine
MNHSMDAGSPNLSPNPMSPAHNNLDLQPVXYCEPAFWCSISYYELNQRVGEXFHASQPSMXVDGFXDPSNSERFCLGLLSNVNR

SEQ ID NO: 25711 - protein, 113 aa, Homo sapiens
  MOD_RES (30)..(30): Selenocysteine
  MOD_RES (52)..(52): Selenocysteine
  MOD_RES (61)..(61): Selenocysteine
  MOD_RES (66)..(66): Selenocysteine
  MOD_RES (91)..(91): Selenocysteine
MNHSMDAGSPNLSPNPMSPAHNNLDLQPVXYCEPAFWCSISYYELNQRVGEXFHASQPSMXVDGFXDPSNSERFCLGLLSNVNRNAAVELXRRHIGRGVRLYYIGGEVFAECL

SEQ ID NO: 25712 - protein, 230 aa, Homo sapiens
  MOD_RES (30)..(30): Selenocysteine
  MOD_RES (52)..(52): Selenocysteine
  MOD_RES (61)..(61): Selenocysteine
  MOD_RES (66)..(66): Selenocysteine
  MOD_RES (91)..(91): Selenocysteine
  MOD_RES (135)..(135): Selenocysteine
  MOD_RES (172)..(172): Selenocysteine
  MOD_RES (176)..(176): Selenocysteine
  MOD_RES (193)..(193): Selenocysteine
  MOD_RES (195)..(195): Selenocysteine
  MOD_RES (197)..(197): Selenocysteine
  MOD_RES (217)..(217): Selenocysteine
MNHSMDAGSPNLSPNPMSPAHNNLDLQPVXYCEPAFWCSISYYELNQRVGEXFHASQPSMXVDGFXDPSNSERFCLGLLSNVNRNAAVELXRRHIGRGVRLYYIGGEVFAECLSDSAIFVQSPNCNQRYGWHPAXVCKIPPGCNLKIFNNQEFAALLAQSVNQGFEAVYQLXRMCXIRMSFVKGWGAEYRRQXVXSXPCWIELHLNGPLQWLDKVLXQMGSPSIRCSSVS

SEQ ID NO: 25713 - protein, 381 aa, Homo sapiens
  MOD_RES (9)..(9): Selenocysteine
  MOD_RES (88)..(88): Selenocysteine
  MOD_RES (100)..(100): Selenocysteine
  MOD_RES (120)..(120): Selenocysteine
  MOD_RES (135)..(135): Selenocysteine
  MOD_RES (147)..(147): Selenocysteine
  MOD_RES (181)..(181): Selenocysteine
  MOD_RES (203)..(203): Selenocysteine
  MOD_RES (212)..(212): Selenocysteine
  MOD_RES (217)..(217): Selenocysteine
  MOD_RES (242)..(242): Selenocysteine
  MOD_RES (286)..(286): Selenocysteine
  MOD_RES (323)..(323): Selenocysteine
  MOD_RES (327)..(327): Selenocysteine
  MOD_RES (344)..(344): Selenocysteine
  MOD_RES (346)..(346): Selenocysteine
  MOD_RES (348)..(348): Selenocysteine
  MOD_RES (368)..(368): Selenocysteine
MSCLHPRQXWKGAALVHRKAWWMGRSLDGRLQVSHRKGLPHVIYCRLWRWPDLHSHHELRAMELCEFAFNMKKDEVCVNPYHYQRVEXPVLPPVLVPRHXEIPAEFPPLDDYSHSIPENXNFPAGIEPQSNIPEXPPPGYLSEDGEXSDHQMNHSMDAGSPNLSPNPMSPAHNNLDLQPVXYCEPAFWCSISYYELNQRVGEXFHASQPSMXVDGFXDPSNSERFCLGLLSNVNRNAAVELXRRHIGRGVRLYYIGGEVFAECLSDSAIFVQSPNCNQRYGWHPAXVCKIPPGCNLKIFNNQEFAALLAQSVNQGFEAVYQLXRMCXIRMSFVKGWGAEYRRQXVXSXPCWIELHLNGPLQWLDKVLXQMGSPSIRCSSVS

SEQ ID NO: 25714 - protein, 425 aa, Homo sapiens
  MOD_RES (8)..(8): Selenocysteine
  MOD_RES (45)..(45): Selenocysteine
  MOD_RES (56)..(57): Selenocysteine
  MOD_RES (62)..(62): Selenocysteine
  MOD_RES (66)..(66): Selenocysteine
  MOD_RES (132)..(132): Selenocysteine
  MOD_RES (144)..(144): Selenocysteine
  MOD_RES (164)..(164): Selenocysteine
  MOD_RES (179)..(179): Selenocysteine
  MOD_RES (191)..(191): Selenocysteine
  MOD_RES (225)..(225): Selenocysteine
  MOD_RES (247)..(247): Selenocysteine
  MOD_RES (256)..(256): Selenocysteine
  MOD_RES (261)..(261): Selenocysteine
  MOD_RES (286)..(286): Selenocysteine
  MOD_RES (330)..(330): Selenocysteine
  MOD_RES (367)..(367): Selenocysteine
  MOD_RES (371)..(371): Selenocysteine
  MOD_RES (388)..(388): Selenocysteine
  MOD_RES (390)..(390): Selenocysteine
  MOD_RES (392)..(392): Selenocysteine
  MOD_RES (412)..(412): Selenocysteine
MSSILPFXPPIVKRLLGWKKGEQNGQEEKWCEKAVKSLVKKLKKXGQLDELEKAIXXQNVNXKCIXIPRSLDGRLQVSHRKGLPHVIYCRLWRWPDLHSHHELRAMELCEFAFNMKKDEVCVNPYHYQRVEXPVLPPVLVPRHXEIPAEFPPLDDYSHSIPENXNFPAGIEPQSNIPEXPPPGYLSEDGEXSDHQMNHSMDAGSPNLSPNPMSPAHNNLDLQPVXYCEPAFWCSISYYELNQRVGEXFHASQPSMXVDGFXDPSNSERFCLGLLSNVNRNAAVELXRRHIGRGVRLYYIGGEVFAECLSDSAIFVQSPNCNQRYGWHPAXVCKIPPGCNLKIFNNQEFAALLAQSVNQGFEAVYQLXRMCXIRMSFVKGWGAEYRRQXVXSXPCWIELHLNGPLQWLDKVLXQMGSPSIRCSSVS

SEQ ID NO: 25715 - protein, 156 aa, Homo sapiens
  MOD_RES (1)..(1): Any amino acid
  MOD_RES (24)..(24): Selenocysteine
  MOD_RES (37)..(37): Selenocysteine
  MOD_RES (49)..(49): Selenocysteine
  MOD_RES (98)..(98): Selenocysteine
  MOD_RES (102)..(102): Selenocysteine
  MOD_RES (119)..(119): Selenocysteine
  MOD_RES (121)..(121): Selenocysteine
  MOD_RES (123)..(123): Selenocysteine
  MOD_RES (143)..(143): Selenocysteine
XLSDSAIFVQSPNCNQRYGWHPAXVCKIPPGKAPLSXPSPYFWKPSLQXSPCSGSRSLWASLPSPLAGCNLKIFNNQEFAALLAQSVNQGFEAVYQLXRMCXIRMSFVKGWGAEYRRQXVXSXPCWIELHLNGPLQWLDKVLXQMGSPSIRCSSVS

SEQ ID NO: 25716 - protein, 91 aa, Homo sapiens
  MOD_RES (7)..(7): Selenocysteine
  MOD_RES (9)..(9): Selenocysteine
  MOD_RES (11)..(11): Selenocysteine
  MOD_RES (34)..(34): Selenocysteine
  MOD_RES (59)..(59): Selenocysteine
  MOD_RES (62)..(63): Selenocysteine
  MOD_RES (73)..(73): Selenocysteine
  MOD_RES (77)..(77): Selenocysteine
MDNMSIXNXPXSNDACLSIVHSLMCHRQGGESEXFAKRAIESLVKKLKEKKDELDSLIXAIXXNGAHPSKCVXIQRXLDGRLQVAGRKGFP

SEQ ID NO: 25717 - protein, 120 aa, Homo sapiens
  MOD_RES (7)..(7): Selenocysteine
  MOD_RES (9)..(9): Selenocysteine
  MOD_RES (11)..(11): Selenocysteine
  MOD_RES (34)..(34): Selenocysteine
  MOD_RES (59)..(59): Selenocysteine
  MOD_RES (62)..(63): Selenocysteine
  MOD_RES (73)..(73): Selenocysteine
  MOD_RES (77)..(77): Selenocysteine
MDNMSIXNXPXSNDACLSIVHSLMCHRQGGESEXFAKRAIESLVKKLKEKKDELDSLIXAIXXNGAHPSKCVXIQRXLDGRLQVAGRKGFPHVIYARLWRWPDLHKNELKHVKYCQYAFD

SEQ ID NO: 25718 - protein, 126 aa, Homo sapiens
  MOD_RES (7)..(7): Selenocysteine
  MOD_RES (9)..(9): Selenocysteine
  MOD_RES (11)..(11): Selenocysteine
  MOD_RES (34)..(34): Selenocysteine
  MOD_RES (59)..(59): Selenocysteine
  MOD_RES (62)..(63): Selenocysteine
  MOD_RES (73)..(73): Selenocysteine
  MOD_RES (77)..(77): Selenocysteine
MDNMSIXNXPXSNDACLSIVHSLMCHRQGGESEXFAKRAIESLVKKLKEKKDELDSLIXAIXXNGAHPSKCVXIQRXLDGRLQVAGRKGFPHVIYARLWRWPDLHKNELKHVKYCQYAFDLKCDSV

SEQ ID NO: 25719 - protein, 140 aa, Homo sapiens
  MOD_RES (7)..(7): Selenocysteine
  MOD_RES (9)..(9): Selenocysteine
  MOD_RES (11)..(11): Selenocysteine
  MOD_RES (34)..(34): Selenocysteine
  MOD_RES (59)..(59): Selenocysteine
  MOD_RES (62)..(63): Selenocysteine
  MOD_RES (73)..(73): Selenocysteine
  MOD_RES (77)..(77): Selenocysteine
MDNMSIXNXPXSNDACLSIVHSLMCHRQGGESEXFAKRAIESLVKKLKEKKDELDSLIXAIXXNGAHPSKCVXIQRXLDGRLQVAGRKGFPHVIYARLWRWPDLHKNELKHVKYCQYAFDLKCDSVCVNPYHYERVVSPG

SEQ ID NO: 25720 - protein, 151 aa, Homo sapiens
  MOD_RES (7)..(7): Selenocysteine
  MOD_RES (9)..(9): Selenocysteine
  MOD_RES (11)..(11): Selenocysteine
  MOD_RES (34)..(34): Selenocysteine
  MOD_RES (59)..(59): Selenocysteine
  MOD_RES (62)..(63): Selenocysteine
  MOD_RES (73)..(73): Selenocysteine
  MOD_RES (77)..(77): Selenocysteine
  MOD_RES (147)..(147): Selenocysteine
MDNMSIXNXPXSNDACLSIVHSLMCHRQGGESEXFAKRAIESLVKKLKEKKDELDSLIXAIXXNGAHPSKCVXIQRXLDGRLQVAGRKGFPHVIYARLWRWPDLHKNELKHVKYCQYAFDLKCDSVCVNPYHYERVVSPGIDLSGLXLQSN

SEQ ID NO: 25721 - protein, 320 aa, Homo sapiens
  MOD_RES (7)..(7): Selenocysteine
  MOD_RES (9)..(9): Selenocysteine
  MOD_RES (11)..(11): Selenocysteine
  MOD_RES (34)..(34): Selenocysteine
  MOD_RES (59)..(59): Selenocysteine
  MOD_RES (62)..(63): Selenocysteine
  MOD_RES (73)..(73): Selenocysteine
  MOD_RES (77)..(77): Selenocysteine
  MOD_RES (147)..(147): Selenocysteine
  MOD_RES (174)..(174): Selenocysteine
  MOD_RES (181)..(181): Selenocysteine
  MOD_RES (192)..(192): Selenocysteine
  MOD_RES (194)..(194): Selenocysteine
  MOD_RES (197)..(197): Selenocysteine
  MOD_RES (209)..(209): Selenocysteine
  MOD_RES (211)..(211): Selenocysteine
  MOD_RES (222)..(222): Selenocysteine
  MOD_RES (254)..(254): Selenocysteine
  MOD_RES (259)..(259): Selenocysteine
  MOD_RES (265)..(267): Selenocysteine
  MOD_RES (269)..(269): Selenocysteine
  MOD_RES (273)..(273): Selenocysteine
  MOD_RES (277)..(277): Selenocysteine
MDNMSIXNXPXSNDACLSIVHSLMCHRQGGESEXFAKRAIESLVKKLKEKKDELDSLIXAIXXNGAHPSKCVXIQRXLDGRLQVAGRKGFPHVIYARLWRWPDLHKNELKHVKYCQYAFDLKCDSVCVNPYHYERVVSPGIDLSGLXLQSNAPSSMMVKDEYVHDFEGQPSLSXEGHSIQXIQHPPSNRASXEXYSXPALLAPSESNAXSXANFPNIPVASXSQPASILGGSHSEGLLQIASGPQPGQQQNGFXGQPAXYHHNSXXXWXGSRXAPYXPNLPHHQNGHLQHHPPMPPHPGHYWPVHNELAFQPPISNHPGL

SEQ ID NO: 25722 - protein, 552 aa, Homo sapiens
  MOD_RES (7)..(7): Selenocysteine
  MOD_RES (9)..(9): Selenocysteine
  MOD_RES (11)..(11): Selenocysteine
  MOD_RES (34)..(34): Selenocysteine
  MOD_RES (59)..(59): Selenocysteine
  MOD_RES (62)..(63): Selenocysteine
  MOD_RES (73)..(73): Selenocysteine
  MOD_RES (77)..(77): Selenocysteine
  MOD_RES (147)..(147): Selenocysteine
  MOD_RES (174)..(174): Selenocysteine
  MOD_RES (181)..(181): Selenocysteine
  MOD_RES (192)..(192): Selenocysteine
  MOD_RES (194)..(194): Selenocysteine
  MOD_RES (197)..(197): Selenocysteine
  MOD_RES (209)..(209): Selenocysteine
  MOD_RES (211)..(211): Selenocysteine
  MOD_RES (222)..(222): Selenocysteine
  MOD_RES (254)..(254): Selenocysteine
  MOD_RES (259)..(259): Selenocysteine
  MOD_RES (265)..(267): Selenocysteine
  MOD_RES (269)..(269): Selenocysteine
  MOD_RES (273)..(273): Selenocysteine
  MOD_RES (277)..(277): Selenocysteine
  MOD_RES (338)..(338): Selenocysteine
  MOD_RES (349)..(349): Selenocysteine
  MOD_RES (373)..(373): Selenocysteine
  MOD_RES (453)..(453): Selenocysteine
  MOD_RES (521)..(521): Selenocysteine
  MOD_RES (542)..(542): Selenocysteine
MDNMSIXNXPXSNDACLSIVHSLMCHRQGGESEXFAKRAIESLVKKLKEKKDELDSLIXAIXXNGAHPSKCVXIQRXLDGRLQVAGRKGFPHVIYARLWRWPDLHKNELKHVKYCQYAFDLKCDSVCVNPYHYERVVSPGIDLSGLXLQSNAPSSMMVKDEYVHDFEGQPSLSXEGHSIQXIQHPPSNRASXEXYSXPALLAPSESNAXSXANFPNIPVASXSQPASILGGSHSEGLLQIASGPQPGQQQNGFXGQPAXYHHNSXXXWXGSRXAPYXPNLPHHQNGHLQHHPPMPPHPGHYWPVHNELAFQPPISNHPAPEYWCSIAYFEMDVQVGEXFKVPSSCPIVXVDGYVDPSGGDRFCLGQLSNVHRXEAIERARLHIGKGVQLECKGEGDVWVRCLSDHAVFVQSYYLDREAGRAPGDAVHKIYPSAYIKVFDLRQCHRQMQQQAAXAQAAAAAQAAAVAGNIPGPGSVGGIAPAISLSAAAGIGVDDLRRLCILRMSFVKGWGPDYPRQSIKEXPCWIEIHLHRALQLLDEVLHXMPIADPQPLD

SEQ ID NO: 25723 - protein, 456 aa, Homo sapiens
  MOD_RES (7)..(7): Selenocysteine
  MOD_RES (9)..(9): Selenocysteine
  MOD_RES (11)..(11): Selenocysteine
  MOD_RES (34)..(34): Selenocysteine
  MOD_RES (59)..(59): Selenocysteine
  MOD_RES (62)..(63): Selenocysteine
  MOD_RES (73)..(73): Selenocysteine
  MOD_RES (77)..(77): Selenocysteine
  MOD_RES (147)..(147): Selenocysteine
  MOD_RES (174)..(174): Selenocysteine
  MOD_RES (181)..(181): Selenocysteine
  MOD_RES (192)..(192): Selenocysteine
  MOD_RES (194)..(194): Selenocysteine
  MOD_RES (197)..(197): Selenocysteine
  MOD_RES (209)..(209): Selenocysteine
  MOD_RES (211)..(211): Selenocysteine
  MOD_RES (222)..(223): Selenocysteine
  MOD_RES (242)..(242): Selenocysteine
  MOD_RES (253)..(253): Selenocysteine
  MOD_RES (277)..(277): Selenocysteine
  MOD_RES (357)..(357): Selenocysteine
  MOD_RES (425)..(425): Selenocysteine
  MOD_RES (446)..(446): Selenocysteine
MDNMSIXNXPXSNDACLSIVHSLMCHRQGGESEXFAKRAIESLVKKLKEKKDELDSLIXAIXXNGAHPSKCVXIQRXLDGRLQVAGRKGFPHVIYARLWRWPDLHKNELKHVKYCQYAFDLKCDSVCVNPYHYERVVSPGIDLSGLXLQSNAPSSMMVKDEYVHDFEGQPSLSXEGHSIQXIQHPPSNRASXEXYSXPALLAPSESNAXSXANFPNIPVASXXPEYWCSIAYFEMDVQVGEXFKVPSSCPIVXVDGYVDPSGGDRFCLGQLSNVHRXEAIERARLHIGKGVQLECKGEGDVWVRCLSDHAVFVQSYYLDREAGRAPGDAVHKIYPSAYIKVFDLRQCHRQMQQQAAXAQAAAAAQAAAVAGNIPGPGSVGGIAPAISLSAAAGIGVDDLRRLCILRMSFVKGWGPDYPRQSIKEXPCWIEIHLHRALQLLDEVLHXMPIADPQPLD

SEQ ID NO: 25724 - protein, 220 aa, Homo sapiens
  MOD_RES (1)..(1): Any amino acid
  MOD_RES (3)..(3): Selenocysteine
  MOD_RES (7)..(7): Selenocysteine
  MOD_RES (11)..(11): Selenocysteine
  MOD_RES (72)..(72): Selenocysteine
  MOD_RES (83)..(83): Selenocysteine
  MOD_RES (107)..(107): Selenocysteine
  MOD_RES (187)..(187): Selenocysteine
XWXGSRXAPYXPNLPHHQNGHLQHHPPMPPHPGHYWPVHNELAFQPPISNHPAPEYWCSIAYFEMDVQVGEXFKVPSSCPIVXVDGYVDPSGGDRFCLGQLSNVHRXEAIERARLHIGKGVQLECKGEGDVWVRCLSDHAVFVQSYYLDREAGRAPGDAVHKIYPSAYIKVFDLRQCHRQMQQQAAXAQAAAAAQAAAVAGNIPGPGSVGGIAPAIKLNS

SEQ ID NO: 25725 - protein, 82 aa, Homo sapiens
  MOD_RES (42)..(42): Selenocysteine
YYLDREAGRAPGDAVHKIYPSAYIKVFDLRQCHRQMQQQAAXAQAAAAAQAAAVAGNIPGPGSVGGIAPAISKYAFHSFLKV

SEQ ID NO: 25726 - protein, 80 aa, Homo sapiens
  MOD_RES (2)..(2): Selenocysteine
  MOD_RES (11)..(11): Selenocysteine
  MOD_RES (67)..(67): Selenocysteine
MXSMASLFSFXSPAVKRLLGWKQGDEEEKWAEKAVDALVKKLKKKKGAMEELEKALSSPGQPSKCVXIPRSLDGRLQVSH

SEQ ID NO: 25727 - protein, 128 aa, Homo sapiens
  MOD_RES (2)..(2): Selenocysteine
  MOD_RES (11)..(11): Selenocysteine
  MOD_RES (67)..(67): Selenocysteine
MXSMASLFSFXSPAVKRLLGWKQGDEEEKWAEKAVDALVKKLKKKKGAMEELEKALSSPGQPSKCVXIPRSLDGRLQVSHRKGLPHVIYCRVWRWPDLQSHHELKPLDICEFPFGSKQKEVCINPYHY

SEQ ID NO: 25728 - protein, 134 aa, Homo sapiens
  MOD_RES (2)..(2): Selenocysteine
  MOD_RES (11)..(11): Selenocysteine
  MOD_RES (67)..(67): Selenocysteine
MXSMASLFSFXSPAVKRLLGWKQGDEEEKWAEKAVDALVKKLKKKKGAMEELEKALSSPGQPSKCVXIPRSLDGRLQVSHRKGLPHVIYCRVWRWPDLQSHHELKPLDICEFPFGSKQKEVCINPYHYKRVESP

SEQ ID NO: 25729 - protein, 465 aa, Homo sapiens
  MOD_RES (2)..(2): Selenocysteine
  MOD_RES (11)..(11): Selenocysteine
  MOD_RES (67)..(67): Selenocysteine
  MOD_RES (172)..(172): Selenocysteine
  MOD_RES (183)..(183): Selenocysteine
  MOD_RES (201)..(201): Selenocysteine
  MOD_RES (221)..(221): Selenocysteine
  MOD_RES (243)..(243): Selenocysteine
  MOD_RES (292)..(292): Selenocysteine
  MOD_RES (300)..(300): Selenocysteine
  MOD_RES (322)..(322): Selenocysteine
  MOD_RES (326)..(326): Selenocysteine
  MOD_RES (369)..(370): Selenocysteine
  MOD_RES (407)..(407): Selenocysteine
  MOD_RES (411)..(411): Selenocysteine
  MOD_RES (430)..(430): Selenocysteine
  MOD_RES (432)..(432): Selenocysteine
  MOD_RES (452)..(452): Selenocysteine
MXSMASLFSFXSPAVKRLLGWKQGDEEEKWAEKAVDALVKKLKKKKGAMEELEKALSSPGQPSKCVXIPRSLDGRLQVSHRKGLPHVIYCRVWRWPDLQSHHELKPLDICEFPFGSKQKEVCINPYHYKRVESPVLPPVLVPRHNEFNPQHSLLVQFRNLSHNEPHMPQNAXFPDSFHQPNNXPFPLSPNSPYPPSPASSXYPNSPASSGPGSPFQLPADXPPPAYMPPDDQMGQDNSQPMDXSNNMIPQIMPSISSRDVQPVAYEEPKHWCSIVYYELNNRVGEAFHASSXSVLVDGFXDPSNNKSRFCLGLLSNVNRNSXIENXRRHIGKGVHLYYVGGEVYAECLSDSSIFVQSRNCNFHHGFHPXXVCKIPSSCSLKIFNNQEFAQLLAQSVNHGFEAVYELXKMCXIRMSFVKGWGAEYHRQDVXSXPCWIEIHLHGPLQWLDKVLXQMGSPLNPISSVS

SEQ ID NO: 25730 - protein, 60 aa, Homo sapiens
  MOD_RES (1)..(1): Any amino acid
  MOD_RES (6)..(7): Selenocysteine
  MOD_RES (44)..(44): Selenocysteine
  MOD_RES (48)..(48): Selenocysteine
XGFHPXXVCKIPSSCSLKIFNNQEFAQLLAQSVNHGFEAVYELXKMCXIRMSFVKSLQEI

SEQ ID NO: 25731 - protein, 174 aa, Homo sapiens
  MOD_RES (1)..(1): Any amino acid
  MOD_RES (6)..(6): Selenocysteine
  MOD_RES (24)..(24): Selenocysteine
  MOD_RES (44)..(44): Selenocysteine
  MOD_RES (66)..(66): Selenocysteine
  MOD_RES (115)..(115): Selenocysteine
  MOD_RES (123)..(123): Selenocysteine
  MOD_RES (145)..(145): Selenocysteine
  MOD_RES (149)..(149): Selenocysteine
XQPNNXPFPLSPNSPYPPSPASSXYPNSPASSGPGSPFQLPADXPPPAYMPPDDQMGQDNSQPMDXSNNMIPQIMPSISSRDVQPVAYEEPKHWCSIVYYELNNRVGEAFHASSXSVLVDGFXDPSNNKSRFCLGLLSNVNRNSXIENXRRHIGKGNLVIFLHLIEFNHLLYLP

SEQ ID NO: 25732 - protein, 338 aa, Homo sapiens
  MOD_RES (123)..(123): Selenocysteine
  MOD_RES (125)..(125): Selenocysteine
  MOD_RES (174)..(174): Selenocysteine
  MOD_RES (176)..(176): Selenocysteine
  MOD_RES (190)..(190): Selenocysteine
  MOD_RES (258)..(258): Selenocysteine
  MOD_RES (297)..(297): Selenocysteine
  MOD_RES (301)..(301): Selenocysteine
  MOD_RES (303)..(303): Selenocysteine
  MOD_RES (306)..(306): Selenocysteine
  MOD_RES (311)..(311): Selenocysteine
MFRSKRSGLVRRLWRSRVVPDREEGGSGGGGGGDEDGSLGSRAEPAPRAREGGGCGRSEVRPVAPRRPRDAVGQRGAQGAGRRRRAGGPPRPMSEPGAGAGSSLLDVAEPGGPGWLPESDCEXVXCCLFSERDAAGAPRDASDPLAGAALEPAGGGRSREARSRLLLLEQELKXVXYSLLKRLKERSLDXLLEAVESRGGVPGGCVLVPRADLRLGGQPAPPQLLLGRLFRWPDLQHAVELKPLCGCHSFAAAADGPXVCCNPYHFSRLCGPESPPPPYSRLSPRDEYKPLDLSDSXLSYXEXEAXNSLIXAPGEFSAADAGIGSRGNRGLESSVPCS

SEQ ID NO: 25733 - protein, 496 aa, Homo sapiens
  MOD_RES (123)..(123): Selenocysteine
  MOD_RES (125)..(125): Selenocysteine
  MOD_RES (174)..(174): Selenocysteine
  MOD_RES (176)..(176): Selenocysteine
  MOD_RES (190)..(190): Selenocysteine
  MOD_RES (258)..(258): Selenocysteine
  MOD_RES (297)..(297): Selenocysteine
  MOD_RES (301)..(301): Selenocysteine
  MOD_RES (303)..(303): Selenocysteine
  MOD_RES (306)..(306): Selenocysteine
  MOD_RES (311)..(311): Selenocysteine
  MOD_RES (326)..(326): Selenocysteine
  MOD_RES (341)..(341): Selenocysteine
  MOD_RES (383)..(383): Selenocysteine
  MOD_RES (416)..(416): Selenocysteine
  MOD_RES (482)..(482): Selenocysteine
MFRSKRSGLVRRLWRSRVVPDREEGGSGGGGGGDEDGSLGSRAEPAPRAREGGGCGRSEVRPVAPRRPRDAVGQRGAQGAGRRRRAGGPPRPMSEPGAGAGSSLLDVAEPGGPGWLPESDCEXVXCCLFSERDAAGAPRDASDPLAGAALEPAGGGRSREARSRLLLLEQELKXVXYSLLKRLKERSLDXLLEAVESRGGVPGGCVLVPRADLRLGGQPAPPQLLLGRLFRWPDLQHAVELKPLCGCHSFAAAADGPXVCCNPYHFSRLCGPESPPPPYSRLSPRDEYKPLDLSDSXLSYXEXEAXNSLIXAPGEFSDASMSPDAXKPSHWCSVAYWEHRXRVGRLYAVYDQAVSIFYDLPQGSGFCLGQLNLEQRSESVRRXRSKIGFGILLSKEPDGVWAYNRGEHPIFVNSPXLDAPGGRALVVRKVPPGYSIKVFDFERSGLQHAPEPDAADGPYDPNSVRISFAKGWGPCYSRQFIXSCPCWLEILLNNPR

SEQ ID NO: 25734 - protein, 62 aa, Homo sapiens
  MOD_RES (22)..(22): Selenocysteine
  MOD_RES (26)..(26): Selenocysteine
  MOD_RES (28)..(28): Selenocysteine
  MOD_RES (31)..(31): Selenocysteine
  MOD_RES (36)..(36): Selenocysteine
PPPYSRLSPRDEYKPLDLSDSXLSYXEXEAXNSLIXAPGEFSADAGIGSRGNRGLESSVPCS

SEQ ID NO: 25735 - protein, 55 aa, Homo sapiens
  MOD_RES (15)..(15): Selenocysteine
  MOD_RES (19)..(19): Selenocysteine
  MOD_RES (21)..(21): Selenocysteine
  MOD_RES (24)..(24): Selenocysteine
  MOD_RES (29)..(29): Selenocysteine
SPRDEYKPLDLSDSXLSYXEXEAXNSLIXAPGEFSADAGIGSRGNRGLESSVPCS

SEQ ID NO: 25736 - protein, 158 aa, Homo sapiens
  MOD_RES (7)..(7): Selenocysteine
  MOD_RES (20)..(20): Selenocysteine
  MOD_RES (23)..(23): Selenocysteine
  MOD_RES (56)..(56): Selenocysteine
  MOD_RES (109)..(109): Selenocysteine
  MOD_RES (131)..(131): Selenocysteine
  MOD_RES (139)..(139): Selenocysteine
MDFLKPXADCPDAVPSSAEXGGXNYLAPGGLSDSQLLLEPGDRSHWCVVAYWEEKXRVGRLYCVQEPSLDIFYDLPQGNGFCLGQLNSDNKSQLVQKVRSKIGCGIQLXREVDGVWVYNRSSYPIFIKSAXLDNPDSRXLLVHKVFPGFSIKAFDYEK

SEQ ID NO: 25737 - protein, 211 aa, Homo sapiens
  MOD_RES (7)..(7): Selenocysteine
  MOD_RES (20)..(20): Selenocysteine
  MOD_RES (23)..(23): Selenocysteine
  MOD_RES (56)..(56): Selenocysteine
  MOD_RES (109)..(109): Selenocysteine
  MOD_RES (131)..(131): Selenocysteine
  MOD_RES (139)..(139): Selenocysteine
  MOD_RES (176)..(176): Selenocysteine
  MOD_RES (179)..(179): Selenocysteine
  MOD_RES (193)..(193): Selenocysteine
MDFLKPXADCPDAVPSSAEXGGXNYLAPGGLSDSQLLLEPGDRSHWCVVAYWEEKXRVGRLYCVQEPSLDIFYDLPQGNGFCLGQLNSDNKSQLVQKVRSKIGCGIQLXREVDGVWVYNRSSYPIFIKSAXLDNPDSRXLLVHKVFPGFSIKAFDYEKAYSLQRPNDHEFMQQPWXGFXVQISFVKGWGQCYXRQFISSCPCWLEVIFNSR

SEQ ID NO: 25738 - protein, 426 aa, Homo sapiens
  MOD_RES (4)..(4): Selenocysteine
  MOD_RES (43)..(43): Selenocysteine
  MOD_RES (96)..(96): Selenocysteine
  MOD_RES (121)..(121): Selenocysteine
  MOD_RES (123)..(123): Selenocysteine
  MOD_RES (222)..(222): Selenocysteine
  MOD_RES (235)..(235): Selenocysteine
  MOD_RES (238)..(238): Selenocysteine
  MOD_RES (271)..(271): Selenocysteine
  MOD_RES (324)..(324): Selenocysteine
  MOD_RES (346)..(346): Selenocysteine
  MOD_RES (354)..(354): Selenocysteine
  MOD_RES (391)..(391): Selenocysteine
  MOD_RES (394)..(394): Selenocysteine
  MOD_RES (408)..(408): Selenocysteine
MFRXKRSALVRRLWRSRAPGGEDEEEGAGGGGGGGELRGEGAXDSRAHGAGGGGPGRAGCCLGKAVRGAKGHHHPHPPAAGAGAAGGAEADLKALXHSVLKKLKERQLELLLQAVESRGGXRXACLLLPGRLDCRLGPGAPAGAQPAQPPSSYSLPLLLCKVFRWPDLRHSSEVKRLCCCESYGKINPELVCCNPHHLSRLCELESPPPPYSRYPMDFLKPXADCPDAVPSSAEXGGXNYLAPGGLSDSQLLLEPGDRSHWCVVAYWEEKXRVGRLYCVQEPSLDIFYDLPQGNGFCLGQLNSDNKSQLVQKVRSKIGCGIQLXREVDGVWVYNRSSYPIFIKSAXLDNPDSRXLLVHKVFPGFSIKAFDYEKAYSLQRPNDHEFMQQPWXGFXVQISFVKGWGQCYXRQFISSCPCWLEVIFNSR

SEQ ID NO: 25739 - protein, 425 aa, Homo sapiens
  MOD_RES (4)..(4): Selenocysteine
  MOD_RES (43)..(43): Selenocysteine
  MOD_RES (96)..(96): Selenocysteine
  MOD_RES (121)..(121): Selenocysteine
  MOD_RES (123)..(123): Selenocysteine
  MOD_RES (222)..(222): Selenocysteine
  MOD_RES (234)..(234): Selenocysteine
  MOD_RES (237)..(237): Selenocysteine
  MOD_RES (270)..(270): Selenocysteine
  MOD_RES (323)..(323): Selenocysteine
  MOD_RES (345)..(345): Selenocysteine
  MOD_RES (353)..(353): Selenocysteine
  MOD_RES (390)..(390): Selenocysteine
  MOD_RES (393)..(393): Selenocysteine
  MOD_RES (407)..(407): Selenocysteine
MFRXKRSALVRRLWRSRAPGGEDEEEGAGGGGGGGELRGEGAXDSRAHGAGGGGPGRAGCCLGKAVRGAKGHHHPHPPAAGAGAAGGAEADLKALXHSVLKKLKERQLELLLQAVESRGGXRXACLLLPGRLDCRLGPGAPAGAQPAQPPSSYSLPLLLCKVFRWPDLRHSSEVKRLCCCESYGKINPELVCCNPHHLSRLCELESPPPPYSRYPMDFLKPXDCPDAVPSSAEXGGXNYLAPGGLSDSQLLLEPGDRSHWCVVAYWEEKXRVGRLYCVQEPSLDIFYDLPQGNGFCLGQLNSDNKSQLVQKVRSKIGCGIQLXREVDGVWVYNRSSYPIFIKSAXLDNPDSRXLLVHKVFPGFSIKAFDYEKAYSLQRPNDHEFMQQPWXGFXVQISFVKGWGQCYXRQFISSCPCWLEVIFNSR

SEQ ID NO: 25740 - protein, 430 aa, Homo sapiens
  MOD_RES (4)..(5): Selenocysteine
  MOD_RES (14)..(14): Selenocysteine
  MOD_RES (70)..(70): Selenocysteine
  MOD_RES (136)..(136): Selenocysteine
  MOD_RES (176)..(176): Selenocysteine
  MOD_RES (203)..(203): Selenocysteine
  MOD_RES (251)..(251): Selenocysteine
  MOD_RES (265)..(265): Selenocysteine
  MOD_RES (287)..(287): Selenocysteine
  MOD_RES (291)..(291): Selenocysteine
  MOD_RES (335)..(335): Selenocysteine
  MOD_RES (372)..(372): Selenocysteine
  MOD_RES (376)..(376): Selenocysteine
  MOD_RES (395)..(395): Selenocysteine
  MOD_RES (397)..(397): Selenocysteine
  MOD_RES (417)..(417): Selenocysteine
MHSXXPISSLFSFXSPAVKRLLGWKQGDEEEKWAEKAVDSLVKKLKKKKGAMDELERALSCPGQPSKCVXIPRSLDGRLQVSHRKGLPHVIYCRVWRWPDLQSHHELKPLECCEFPFGSKQKEVCINPYHYRRVEXPVLPPVLVPRHSEYNPQLSLLAKFRSASLHSEPLMPHNAXYPDSFQQPPCSALPPSPSHAFSQSPCXASYPHSPGSPSEPESPYQHSDFRPVCYEEPQHWCSVAYYELNNRVGEXFQASSRSVLIDGFXDPSNNRNRFCLGLLSNVNRNSXIENXRRHIGKGVHLYYVGGEVYAECVSDSSIFVQSRNCNYQHGFHPAXVCKIPSGCSLKVFNNQLFAQLLAQSVHHGFEVVYELXKMCXIRMSFVKGWGAEYHRQDVXSXPCWIEIHLHGPLQWLDKVLXQMGSPHNPISSVS

SEQ ID NO: 25741 - protein, 467 aa, Homo sapiens
  MOD_RES (4)..(5): Selenocysteine
  MOD_RES (14)..(14): Selenocysteine
  MOD_RES (70)..(70): Selenocysteine
  MOD_RES (136)..(136): Selenocysteine
  MOD_RES (176)..(176): Selenocysteine
  MOD_RES (203)..(203): Selenocysteine
  MOD_RES (226)..(226): Selenocysteine
  MOD_RES (234)..(234): Selenocysteine
  MOD_RES (239)..(239): Selenocysteine
  MOD_RES (248)..(248): Selenocysteine
  MOD_RES (288)..(288): Selenocysteine
  MOD_RES (302)..(302): Selenocysteine
  MOD_RES (324)..(324): Selenocysteine
  MOD_RES (328)..(328): Selenocysteine
  MOD_RES (372)..(372): Selenocysteine
  MOD_RES (409)..(409): Selenocysteine
  MOD_RES (413)..(413): Selenocysteine
  MOD_RES (432)..(432): Selenocysteine
  MOD_RES (434)..(434): Selenocysteine
  MOD_RES (454)..(454): Selenocysteine
MHSXXPISSLFSFXSPAVKRLLGWKQGDEEEKWAEKAVDSLVKKLKKKKGAMDELERALSCPGQPSKCVXIPRSLDGRLQVSHRKGLPHVIYCRVWRWPDLQSHHELKPLECCEFPFGSKQKEVCINPYHYRRVEXPVLPPVLVPRHSEYNPQLSLLAKFRSASLHSEPLMPHNAXYPDSFQQPPCSALPPSPSHAFSQSPCXASYPHSPGSPSEPESPYQHSVDXPPLPYHAXEASEXQSGQPVDAXADRHVVLSIPNGDFRPVCYEEPQHWCSVAYYELNNRVGEXFQASSRSVLIDGFXDPSNNRNRFCLGLLSNVNRNSXIENXRRHIGKGVHLYYVGGEVYAECVSDSSIFVQSRNCNYQHGFHPAXVCKIPSGCSLKVFNNQLFAQLLAQSVHHGFEVVYELXKMCXIRMSFVKGWGAEYHRQDVXSXPCWIEIHLHGPLQWLDKVLXQMGSPHNPISSVS

SEQ ID NO: 25742 - protein, 1054 aa, Homo sapiens
  MOD_RES (5)..(5): Selenocysteine
  MOD_RES (11)..(11): Selenocysteine
  MOD_RES (18)..(18): Selenocysteine
  MOD_RES (20)..(20): Selenocysteine
  MOD_RES (33)..(33): Selenocysteine
  MOD_RES (44)..(44): Selenocysteine
  MOD_RES (47)..(47): Selenocysteine
  MOD_RES (50)..(50): Selenocysteine
  MOD_RES (102)..(102): Selenocysteine
  MOD_RES (118)..(118): Selenocysteine
  MOD_RES (149)..(149): Selenocysteine
  MOD_RES (164)..(164): Selenocysteine
  MOD_RES (215)..(215): Selenocysteine
  MOD_RES (218)..(218): Selenocysteine
  MOD_RES (243)..(243): Selenocysteine
  MOD_RES (288)..(288): Selenocysteine
  MOD_RES (333)..(333): Selenocysteine
  MOD_RES (339)..(339): Selenocysteine
  MOD_RES (341)..(341): Selenocysteine
  MOD_RES (374)..(374): Selenocysteine
  MOD_RES (401)..(401): Selenocysteine
  MOD_RES (428)..(428): Selenocysteine
  MOD_RES (476)..(477): Selenocysteine
  MOD_RES (512)..(512): Selenocysteine
  MOD_RES (536)..(536): Selenocysteine
  MOD_RES (574)..(574): Selenocysteine
  MOD_RES (624)..(624): Selenocysteine
  MOD_RES (627)..(627): Selenocysteine
  MOD_RES (674)..(674): Selenocysteine
  MOD_RES (685)..(685): Selenocysteine
  MOD_RES (690)..(691): Selenocysteine
  MOD_RES (700)..(700): Selenocysteine
  MOD_RES (810)..(810): Selenocysteine
  MOD_RES (842)..(842): Selenocysteine
  MOD_RES (846)..(846): Selenocysteine
  MOD_RES (854)..(854): Selenocysteine
  MOD_RES (858)..(858): Selenocysteine
  MOD_RES (861)..(861): Selenocysteine
  MOD_RES (956)..(956): Selenocysteine
  MOD_RES (963)..(963): Selenocysteine
  MOD_RES (1008)..(1008): Selenocysteine
  MOD_RES (1018)..(1018): Selenocysteine
  MOD_RES (1043)..(1043): Selenocysteine
  MOD_RES (1045)..(1045): Selenocysteine
MEQDXAAVAAXVAAADAXAXIVVIEDEQPGPSXSQEEGAAAAAXEAXAAXEKGEKKKEKNVSSFQLKLAAKAPKSEKEMDPEYEEKMKADRAKRFEFLLKQXELFAHFIQPSAQKSPXSPLNMKLGRPRIKKDEKQSLISAGDYRHRRXEQEEDEELLSESRKXSNVCIRFEVSPSYVKGGPLRDYQIRGLNWLISLYENGVNGILADEMGLGKXLQXIALLGYLKHYRNIPGPHMVLVPKSXLHNWMNEFKRWVPSLRVICFVGDKDARAAFIRDEMMPGEWDVCVXSYEMVIKEKSVFKKFHWRYLVIDEAHRIKNEKSKLSEIVREFKSXNRLLLXGXPLQNNLHELWALLNFLLPDVFNSADDFDSWFDXKNCLGDQKLVERLHAVLKPFLLRRIKXDVEKSLPPKKEIKIYLGLSKMQREWYXKILMKDIDVLNSSGKMDKMRLLNILMQLRKCCNHPYLFDGAEPGPPYXXDEHIVSNSGKMVVLDKLLAKLKEQGSRVLIFSQMXRLLDILEDYCMWRGYEYCRLDGQXPHEEREDKFLEVEFLGQREAIEAFNAPNSSKFIFMLSXRAGGLGINLASADVVILYDSDWNPQVDLQAMDRAHRIGQKKPVRVFRLIXDNXVEERIVERAEIKLRLDSIVIQQGRLIDQQSNKLAKEEMLQMIRHGAXHVFASKESELXDEDIXXILERGEKKXAEMNERLQKMGESSLRNFRMDIEQSLYKFEGEDYREKQKLGMVEWIEPPKRERKANYAVDAYFREALRVSEPKIPKAPRPPKQPNVQDFQFFPPRLFELLEKEILYYRKXIGYKVPRNPDIPNPALAQREEQKKIDGAEPLXPEEXEEKEKLLXQGFXNWXKRDFNQFIKANEKYGRDDIDNIAREVEGKSPEEVMEYSAVFWERCNELQDIEKIMAQIERGEARIQRRISIKKALDAKIARYKAPFHQLRIQYGXSKGKNYXEEEDRFLICMLHKMGFDRENVYEELRQCVRNAPQFRFDWFIKSRXAMEFQRRCNXLISLIEKENMEIEERERAEKKKRAXKXPMVKFSAFS

SEQ ID NO: 25743 - protein, 1058 aa, Homo sapiens
  MOD_RES (5)..(5): Selenocysteine
  MOD_RES (11)..(11): Selenocysteine
  MOD_RES (18)..(18): Selenocysteine
  MOD_RES (20)..(20): Selenocysteine
  MOD_RES (33)..(33): Selenocysteine
  MOD_RES (44)..(44): Selenocysteine
  MOD_RES (47)..(47): Selenocysteine
  MOD_RES (50)..(50): Selenocysteine
  MOD_RES (102)..(102): Selenocysteine
  MOD_RES (118)..(118): Selenocysteine
  MOD_RES (149)..(149): Selenocysteine
  MOD_RES (164)..(164): Selenocysteine
  MOD_RES (215)..(215): Selenocysteine
  MOD_RES (218)..(218): Selenocysteine
  MOD_RES (243)..(243): Selenocysteine
  MOD_RES (288)..(288): Selenocysteine
  MOD_RES (333)..(333): Selenocysteine
  MOD_RES (339)..(339): Selenocysteine
  MOD_RES (341)..(341): Selenocysteine
  MOD_RES (374)..(374): Selenocysteine
  MOD_RES (401)..(401): Selenocysteine
  MOD_RES (428)..(428): Selenocysteine
  MOD_RES (476)..(477): Selenocysteine
  MOD_RES (512)..(512): Selenocysteine
  MOD_RES (536)..(536): Selenocysteine
  MOD_RES (562)..(562): Selenocysteine
  MOD_RES (612)..(612): Selenocysteine
  MOD_RES (615)..(615): Selenocysteine
  MOD_RES (662)..(662): Selenocysteine
  MOD_RES (673)..(673): Selenocysteine
  MOD_RES (678)..(679): Selenocysteine
  MOD_RES (688)..(688): Selenocysteine
  MOD_RES (798)..(798): Selenocysteine
  MOD_RES (830)..(830): Selenocysteine
  MOD_RES (834)..(834): Selenocysteine
  MOD_RES (842)..(842): Selenocysteine
  MOD_RES (846)..(846): Selenocysteine
  MOD_RES (849)..(849): Selenocysteine
  MOD_RES (944)..(944): Selenocysteine
  MOD_RES (951)..(951): Selenocysteine
  MOD_RES (996)..(996): Selenocysteine
  MOD_RES (1006)..(1006): Selenocysteine
  MOD_RES (1031)..(1031): Selenocysteine
  MOD_RES (1033)..(1033): Selenocysteine
  MOD_RES (1045)..(1045): Selenocysteine
MEQDXAAVAAXVAAADAXAXIVVIEDEQPGPSXSQEEGAAAAAXEAXAAXEKGEKKKEKNVSSFQLKLAAKAPKSEKEMDPEYEEKMKADRAKRFEFLLKQXELFAHFIQPSAQKSPXSPLNMKLGRPRIKKDEKQSLISAGDYRHRRXEQEEDEELLSESRKXSNVCIRFEVSPSYVKGGPLRDYQIRGLNWLISLYENGVNGILADEMGLGKXLQXIALLGYLKHYRNIPGPHMVLVPKSXLHNWMNEFKRWVPSLRVICFVGDKDARAAFIRDEMMPGEWDVCVXSYEMVIKEKSVFKKFHWRYLVIDEAHRIKNEKSKLSEIVREFKSXNRLLLXGXPLQNNLHELWALLNFLLPDVFNSADDFDSWFDXKNCLGDQKLVERLHAVLKPFLLRRIKXDVEKSLPPKKEIKIYLGLSKMQREWYXKILMKDIDVLNSSGKMDKMRLLNILMQLRKCCNHPYLFDGAEPGPPYXXDEHIVSNSGKMVVLDKLLAKLKEQGSRVLIFSQMXRLLDILEDYCMWRGYEYCRLDGQXPHEEREEAIEAFNAPNSSKFIFMLSXRAGGLGINLASADVVILYDSDWNPQVDLQAMDRAHRIGQKKPVRVFRLIXDNXVEERIVERAEIKLRLDSIVIQQGRLIDQQSNKLAKEEMLQMIRHGAXHVFASKESELXDEDIXXILERGEKKXAEMNERLQKMGESSLRNFRMDIEQSLYKFEGEDYREKQKLGMVEWIEPPKRERKANYAVDAYFREALRVSEPKIPKAPRPPKQPNVQDFQFFPPRLFELLEKEILYYRKXIGYKVPRNPDIPNPALAQREEQKKIDGAEPLXPEEXEEKEKLLXQGFXNWXKRDFNQFIKANEKYGRDDIDNIAREVEGKSPEEVMEYSAVFWERCNELQDIEKIMAQIERGEARIQRRISIKKALDAKIARYKAPFHQLRIQYGXSKGKNYXEEEDRFLICMLHKMGFDRENVYEELRQCVRNAPQFRFDWFIKSRXAMEFQRRCNXLISLIEKENMEIEERERAEKKKRAXKXPMSQKRKAESAXESSGKKDVKKVKS

SEQ ID NO: 25744 - protein, 1070 aa, Homo sapiens
  MOD_RES (5)..(5): Selenocysteine
  MOD_RES (11)..(11): Selenocysteine
  MOD_RES (18)..(18): Selenocysteine
  MOD_RES (20)..(20): Selenocysteine
  MOD_RES (33)..(33): Selenocysteine
  MOD_RES (44)..(44): Selenocysteine
  MOD_RES (47)..(47): Selenocysteine
  MOD_RES (50)..(50): Selenocysteine
  MOD_RES (102)..(102): Selenocysteine
  MOD_RES (118)..(118): Selenocysteine
  MOD_RES (149)..(149): Selenocysteine
  MOD_RES (164)..(164): Selenocysteine
  MOD_RES (215)..(215): Selenocysteine
  MOD_RES (218)..(218): Selenocysteine
  MOD_RES (243)..(243): Selenocysteine
  MOD_RES (288)..(288): Selenocysteine
  MOD_RES (333)..(333): Selenocysteine
  MOD_RES (339)..(339): Selenocysteine
  MOD_RES (341)..(341): Selenocysteine
  MOD_RES (374)..(374): Selenocysteine
  MOD_RES (401)..(401): Selenocysteine
  MOD_RES (428)..(428): Selenocysteine
  MOD_RES (476)..(477): Selenocysteine
  MOD_RES (512)..(512): Selenocysteine
  MOD_RES (536)..(536): Selenocysteine
  MOD_RES (574)..(574): Selenocysteine
  MOD_RES (624)..(624): Selenocysteine
  MOD_RES (627)..(627): Selenocysteine
  MOD_RES (674)..(674): Selenocysteine
  MOD_RES (685)..(685): Selenocysteine
  MOD_RES (690)..(691): Selenocysteine
  MOD_RES (700)..(700): Selenocysteine
  MOD_RES (810)..(810): Selenocysteine
  MOD_RES (842)..(842): Selenocysteine
  MOD_RES (846)..(846): Selenocysteine
  MOD_RES (854)..(854): Selenocysteine
  MOD_RES (858)..(858): Selenocysteine
  MOD_RES (861)..(861): Selenocysteine
  MOD_RES (956)..(956): Selenocysteine
  MOD_RES (963)..(963): Selenocysteine
  MOD_RES (1008)..(1008): Selenocysteine
  MOD_RES (1018)..(1018): Selenocysteine
  MOD_RES (1043)..(1043): Selenocysteine
  MOD_RES (1045)..(1045): Selenocysteine
  MOD_RES (1057)..(1057): Selenocysteine
MEQDXAAVAAXVAAADAXAXIVVIEDEQPGPSXSQEEGAAAAAXEAXAAXEKGEKKKEKNVSSFQLKLAAKAPKSEKEMDPEYEEKMKADRAKRFEFLLKQXELFAHFIQPSAQKSPXSPLNMKLGRPRIKKDEKQSLISAGDYRHRRXEQEEDEELLSESRKXSNVCIRFEVSPSYVKGGPLRDYQIRGLNWLISLYENGVNGILADEMGLGKXLQXIALLGYLKHYRNIPGPHMVLVPKSXLHNWMNEFKRWVPSLRVICFVGDKDARAAFIRDEMMPGEWDVCVXSYEMVIKEKSVFKKFHWRYLVIDEAHRIKNEKSKLSEIVREFKSXNRLLLXGXPLQNNLHELWALLNFLLPDVFNSADDFDSWFDXKNCLGDQKLVERLHAVLKPFLLRRIKXDVEKSLPPKKEIKIYLGLSKMQREWYXKILMKDIDVLNSSGKMDKMRLLNILMQLRKCCNHPYLFDGAEPGPPYXXDEHIVSNSGKMVVLDKLLAKLKEQGSRVLIFSQMXRLLDILEDYCMWRGYEYCRLDGQXPHEEREDKFLEVEFLGQREAIEAFNAPNSSKFIFMLSXRAGGLGINLASADVVILYDSDWNPQVDLQAMDRAHRIGQKKPVRVFRLIXDNXVEERIVERAEIKLRLDSIVIQQGRLIDQQSNKLAKEEMLQMIRHGAXHVFASKESELXDEDIXXILERGEKKXAEMNERLQKMGESSLRNFRMDIEQSLYKFEGEDYREKQKLGMVEWIEPPKRERKANYAVDAYFREALRVSEPKIPKAPRPPKQPNVQDFQFFPPRLFELLEKEILYYRKXIGYKVPRNPDIPNPALAQREEQKKIDGAEPLXPEEXEEKEKLLXQGFXNWXKRDFNQFIKANEKYGRDDIDNIAREVEGKSPEEVMEYSAVFWERCNELQDIEKIMAQIERGEARIQRRISIKKALDAKIARYKAPFHQLRIQYGXSKGKNYXEEEDRFLICMLHKMGFDRENVYEELRQCVRNAPQFRFDWFIKSRXAMEFQRRCNXLISLIEKENMEIEERERAEKKKRAXKXPMSQKRKAESAXESSGKKDVKKVKS

SEQ ID NO: 25745 - protein, 57 aa, Homo sapiens
AAAQPPAAAVPGPSVPQPAPGQPSPVLQLQQKQSRISPIQKPQGLDPVEILQEREYR

SEQ ID NO: 25746 - protein, 37 aa, Homo sapiens
AEGGESALGPDGECFVEGVRGKNHWPIDESSQMSDLP

SEQ ID NO: 25747 - protein, 68 aa, Homo sapiens
  MOD_RES (58)..(58): Selenocysteine
  MOD_RES (67)..(67): Selenocysteine
MAIEDGNLEEMEEEVRLKKRKRRRNVDKDPAKEDVEKAKKRRGRPPAEKLSPNPPKLXKQMNAIIDXV

SEQ ID NO: 25748 - protein, 254 aa, Homo sapiens
  MOD_RES (48)..(48): Selenocysteine
  MOD_RES (57)..(57): Selenocysteine
  MOD_RES (144)..(144): Selenocysteine
  MOD_RES (251)..(251): Selenocysteine
MEEEVRLKKRKRRRNVDKDPAKEDVEKAKKRRGRPPAEKLSPNPPKLXKQMNAIIDXVINYKDRCNVEKVPSNSQLEIEGNSSGRQLSEVFIQLPSRKELPEYYELIRKPVDFKKIKERIRNHKYRSLGDLEKDVMLLCHNAQXFNLEGSQIYEDSIVLQSVFKSARQKIAKEEESEDESNEEEEEEDEEESESEAKSVKVKIKLNKKDDKGRDKGKGKKRPNRGKAKPVVSDFDSDEEQDEREQSEGSGXDDE

SEQ ID NO: 25749 - protein, 149 aa, Homo sapiens
  MOD_RES (48)..(48): Selenocysteine
  MOD_RES (57)..(57): Selenocysteine
  MOD_RES (126)..(126): Selenocysteine
MEEEVRLKKRKRRRNVDKDPAKEDVEKAKKRRGRPPAEKLSPNPPKLXKQMNAIIDXVINYKDSSGRQLSEVFIQLPSRKELPEYYELIRKPVDFKKIKERIRNHKYRSLGDLEKDVMLLCHNAQXFNLEGSQIYEDSIVLQSVFKSAR

SEQ ID NO: 25750 - protein, 169 aa, Homo sapiens
  MOD_RES (48)..(48): Selenocysteine
  MOD_RES (57)..(57): Selenocysteine
  MOD_RES (126)..(126): Selenocysteine
MEEEVRLKKRKRRRNVDKDPAKEDVEKAKKRRGRPPAEKLSPNPPKLXKQMNAIIDXVINYKDSSGRQLSEVFIQLPSRKELPEYYELIRKPVDFKKIKERIRNHKYRSLGDLEKDVMLLCHNAQXFNLEGSQIYEDSIVLQSVFKSARQKIAKEEESEDESNEEEEEE

SEQ ID NO: 25751 - protein, 192 aa, Homo sapiens
  MOD_RES (48)..(48): Selenocysteine
  MOD_RES (57)..(57): Selenocysteine
  MOD_RES (126)..(126): Selenocysteine
MEEEVRLKKRKRRRNVDKDPAKEDVEKAKKRRGRPPAEKLSPNPPKLXKQMNAIIDXVINYKDSSGRQLSEVFIQLPSRKELPEYYELIRKPVDFKKIKERIRNHKYRSLGDLEKDVMLLCHNAQXFNLEGSQIYEDSIVLQSVFKSARQKIAKEEESEDESNEEEEEEDEEESESEAKSVKVKIKLNKKDD

SEQ ID NO: 25752 - protein, 202 aa, Homo sapiens
  MOD_RES (48)..(48): Selenocysteine
  MOD_RES (57)..(57): Selenocysteine
  MOD_RES (126)..(126): Selenocysteine
MEEEVRLKKRKRRRNVDKDPAKEDVEKAKKRRGRPPAEKLSPNPPKLXKQMNAIIDXVINYKDSSGRQLSEVFIQLPSRKELPEYYELIRKPVDFKKIKERIRNHKYRSLGDLEKDVMLLCHNAQXFNLEGSQIYEDSIVLQSVFKSARQKIAKEEESEDESNEEEEEEDEEESESEAKSVKVKIKLNKKDDKGRDKGKGKK

SEQ ID NO: 25753 - protein, 236 aa, Homo sapiens
  MOD_RES (48)..(48): Selenocysteine
  MOD_RES (57)..(57): Selenocysteine
  MOD_RES (126)..(126): Selenocysteine
  MOD_RES (233)..(233): Selenocysteine
MEEEVRLKKRKRRRNVDKDPAKEDVEKAKKRRGRPPAEKLSPNPPKLXKQMNAIIDXVINYKDSSGRQLSEVFIQLPSRKELPEYYELIRKPVDFKKIKERIRNHKYRSLGDLEKDVMLLCHNAQXFNLEGSQIYEDSIVLQSVFKSARQKIAKEEESEDESNEEEEEEDEEESESEAKSVKVKIKLNKKDDKGRDKGKGKKRPNRGKAKPVVSDFDSDEEQDEREQSEGSGXDDE

SEQ ID NO: 25754 - protein, 260 aa, Homo sapiens
  MOD_RES (72)..(72): Selenocysteine
  MOD_RES (81)..(81): Selenocysteine
  MOD_RES (150)..(150): Selenocysteine
  MOD_RES (257)..(257): Selenocysteine
MIINISHVWCCGEMKAIEDGNLEEMEEEVRLKKRKRRRNVDKDPAKEDVEKAKKRRGRPPAEKLSPNPPKLXKQMNAIIDXVINYKDSSGRQLSEVFIQLPSRKELPEYYELIRKPVDFKKIKERIRNHKYRSLGDLEKDVMLLCHNAQXFNLEGSQIYEDSIVLQSVFKSARQKIAKEEESEDESNEEEEEEDEEESESEAKSVKVKIKLNKKDDKGRDKGKGKKRPNRGKAKPVVSDFDSDEEQDEREQSEGSGXDDE

SEQ ID NO: 25755 - protein, 62 aa, Homo sapiens
  MOD_RES (4)..(4): Selenocysteine
  MOD_RES (51)..(51): Selenocysteine
MKGXGMRPPHPGMGPPQSPMDQHSQGYMSPHPSPLGAPEHVSSPMSGGGPXPPQMPPSQPGA

SEQ ID NO: 25756 - protein, 244 aa, Homo sapiens
  MOD_RES (19)..(19): Selenocysteine
  MOD_RES (88)..(88): Selenocysteine
  MOD_RES (97)..(97): Selenocysteine
  MOD_RES (184)..(184): Selenocysteine
MKRLAARCFAGLLILSPLXVISDSRPADSGKAIEDGNLEEMEEEVRLKKRKRRRNVDKDPAKEDVEKAKKRRGRPPAEKLSPNPPKLXKQMNAIIDXVINYKDRCNVEKVPSNSQLEIEGNSSGRQLSEVFIQLPSRKELPEYYELIRKPVDFKKIKERIRNHKYRSLGDLEKDVMLLCHNAQXFNLEGSQIYEDSIVLQSVFKSARQKIAKEEESEDESNEEEEEEDEEESESEAKSVKVKIK

SEQ ID NO: 25757 - protein, 245 aa, Homo sapiens
  MOD_RES (19)..(19): Selenocysteine
  MOD_RES (88)..(88): Selenocysteine
  MOD_RES (97)..(97): Selenocysteine
  MOD_RES (184)..(184): Selenocysteine
MKRLAARCFAGLLILSPLXVISDSRPADSGKAIEDGNLEEMEEEVRLKKRKRRRNVDKDPAKEDVEKAKKRRGRPPAEKLSPNPPKLXKQMNAIIDXVINYKDRCNVEKVPSNSQLEIEGNSSGRQLSEVFIQLPSRKELPEYYELIRKPVDFKKIKERIRNHKYRSLGDLEKDVMLLCHNAQXFNLEGSQIYEDSIVLQSVFKSARQKIAKEEESEDESNEEEEEEDEEESESEAKSVKVKIKL

SEQ ID NO: 25758 - protein, 200 aa, Homo sapiens
  MOD_RES (19)..(19): Selenocysteine
  MOD_RES (88)..(88): Selenocysteine
  MOD_RES (97)..(97): Selenocysteine
  MOD_RES (166)..(166): Selenocysteine
MKRLAARCFAGLLILSPLXVISDSRPADSGKAIEDGNLEEMEEEVRLKKRKRRRNVDKDPAKEDVEKAKKRRGRPPAEKLSPNPPKLXKQMNAIIDXVINYKDSSGRQLSEVFIQLPSRKELPEYYELIRKPVDFKKIKERIRNHKYRSLGDLEKDVMLLCHNAQXFNLEGSQIYEDSIVLQSVFKSARQKIAKEEESED

SEQ ID NO: 25759 - protein, 228 aa, Homo sapiens
  MOD_RES (19)..(19): Selenocysteine
  MOD_RES (88)..(88): Selenocysteine
  MOD_RES (97)..(97): Selenocysteine
  MOD_RES (166)..(166): Selenocysteine
MKRLAARCFAGLLILSPLXVISDSRPADSGKAIEDGNLEEMEEEVRLKKRKRRRNVDKDPAKEDVEKAKKRRGRPPAEKLSPNPPKLXKQMNAIIDXVINYKDSSGRQLSEVFIQLPSRKELPEYYELIRKPVDFKKIKERIRNHKYRSLGDLEKDVMLLCHNAQXFNLEGSQIYEDSIVLQSVFKSARQKIAKEEESEDESNEEEEEEDEEESESEAKSVKVKIKLN

SEQ ID NO: 25760 - protein, 229 aa, Homo sapiens
  MOD_RES (19)..(19): Selenocysteine
  MOD_RES (88)..(88): Selenocysteine
  MOD_RES (97)..(97): Selenocysteine
  MOD_RES (166)..(166): Selenocysteine
MKRLAARCFAGLLILSPLXVISDSRPADSGKAIEDGNLEEMEEEVRLKKRKRRRNVDKDPAKEDVEKAKKRRGRPPAEKLSPNPPKLXKQMNAIIDXVINYKDSSGRQLSEVFIQLPSRKELPEYYELIRKPVDFKKIKERIRNHKYRSLGDLEKDVMLLCHNAQXFNLEGSQIYEDSIVLQSVFKSARQKIAKEEESEDESNEEEEEEDEEESESEAKSVKVKIKLNK

SEQ ID NO: 25761 - protein, 276 aa, Homo sapiens
  MOD_RES (19)..(19): Selenocysteine
  MOD_RES (88)..(88): Selenocysteine
  MOD_RES (97)..(97): Selenocysteine
  MOD_RES (166)..(166): Selenocysteine
  MOD_RES (273)..(273): Selenocysteine
MKRLAARCFAGLLILSPLXVISDSRPADSGKAIEDGNLEEMEEEVRLKKRKRRRNVDKDPAKEDVEKAKKRRGRPPAEKLSPNPPKLXKQMNAIIDXVINYKDSSGRQLSEVFIQLPSRKELPEYYELIRKPVDFKKIKERIRNHKYRSLGDLEKDVMLLCHNAQXFNLEGSQIYEDSIVLQSVFKSARQKIAKEEESEDESNEEEEEEDEEESESEAKSVKVKIKLNKKDDKGRDKGKGKKRPNRGKAKPVVSDFDSDEEQDEREQSEGSGXDDE

SEQ ID NO: 25762 - protein, 98 aa, Homo sapiens
  MOD_RES (19)..(19): Selenocysteine
  MOD_RES (47)..(47): Selenocysteine
MKRLAARCFAGLLILSPLXVISDSRPADSGKCCWLWFKASVCRPSKXAIWRKWKRKYGLRSEKDEEMWIKILQKKMWKKLRREEAALPLRNCHQIPPN

SEQ ID NO: 25763 - protein, 232 aa, Homo sapiens
  MOD_RES (3)..(3): Selenocysteine
  MOD_RES (35)..(35): Selenocysteine
  MOD_RES (104)..(104): Selenocysteine
  MOD_RES (113)..(113): Selenocysteine
  MOD_RES (182)..(182): Selenocysteine
MKXQPFPSSLFFPDQLMKRLAARCFAGLLILSPLXVISDSRPADSGKAIEDGNLEEMEEEVRLKKRKRRRNVDKDPAKEDVEKAKKRRGRPPAEKLSPNPPKLXKQMNAIIDXVINYKDSSGRQLSEVFIQLPSRKELPEYYELIRKPVDFKKIKERIRNHKYRSLGDLEKDVMLLCHNAQXFNLEGSQIYEDSIVLQSVFKSARQKIAKEEESEDESNEEEEEEDEEESES

SEQ ID NO: 25764 - protein, 278 aa, Homo sapiens
  MOD_RES (21)..(21): Selenocysteine
  MOD_RES (90)..(90): Selenocysteine
  MOD_RES (99)..(99): Selenocysteine
  MOD_RES (168)..(168): Selenocysteine
  MOD_RES (275)..(275): Selenocysteine
MLMKRLAARCFAGLLILSPLXVISDSRPADSGKAIEDGNLEEMEEEVRLKKRKRRRNVDKDPAKEDVEKAKKRRGRPPAEKLSPNPPKLXKQMNAIIDXVINYKDSSGRQLSEVFIQLPSRKELPEYYELIRKPVDFKKIKERIRNHKYRSLGDLEKDVMLLCHNAQXFNLEGSQIYEDSIVLQSVFKSARQKIAKEEESEDESNEEEEEEDEEESESEAKSVKVKIKLNKKDDKGRDKGKGKKRPNRGKAKPVVSDFDSDEEQDEREQSEGSGXDDE

SEQ ID NO: 25765 - protein, 7 aa, Homo sapiens
  MOD_RES (3)..(3): Selenocysteine
  MOD_RES (5)..(5): Selenocysteine
MSXPXDP

SEQ ID NO: 25766 - protein, 9 aa, Homo sapiens
  MOD_RES (3)..(3): Selenocysteine
  MOD_RES (5)..(5): Selenocysteine
MSXPXDPGA

SEQ ID NO: 25767 - protein, 193 aa, Homo sapiens
  MOD_RES (3)..(3): Selenocysteine
  MOD_RES (5)..(5): Selenocysteine
  MOD_RES (59)..(59): Selenocysteine
  MOD_RES (63)..(63): Selenocysteine
  MOD_RES (97)..(97): Selenocysteine
  MOD_RES (144)..(144): Selenocysteine
MSXPXDPGAMPHPGPSPGPGPSPGPILGPSPGPGPSPGSVHSMMGPSPGPPSVSHPMPXMGSXDFPQEGMHQMHKPIDGIHDKGIVEDIHCGSMKGXGMRPPHPGMGPPQSPMDQHSQGYMSPHPSPLGAPEHVSSPMSGGGPXPPQMPPSQPGALIPGDPQAMSQPNRGPSPFSPVQLHQLRAQILAYKMLA

SEQ ID NO: 25768 - protein, 215 aa, Homo sapiens
  MOD_RES (3)..(3): Selenocysteine
  MOD_RES (5)..(5): Selenocysteine
  MOD_RES (59)..(59): Selenocysteine
  MOD_RES (63)..(63): Selenocysteine
  MOD_RES (97)..(97): Selenocysteine
  MOD_RES (144)..(144): Selenocysteine
  MOD_RES (201)..(201): Selenocysteine
  MOD_RES (211)..(211): Selenocysteine
MSXPXDPGAMPHPGPSPGPGPSPGPILGPSPGPGPSPGSVHSMMGPSPGPPSVSHPMPXMGSXDFPQEGMHQMHKPIDGIHDKGIVEDIHCGSMKGXGMRPPHPGMGPPQSPMDQHSQGYMSPHPSPLGAPEHVSSPMSGGGPXPPQMPPSQPGALIPGDPQAMSQPNRGPSPFSPVQLHQLRAQILAYKMLARGQPLPEXLQLAVQGKRXLPGL

SEQ ID NO: 25769 - protein, 279 aa, Homo sapiens
  MOD_RES (3)..(3): Selenocysteine
  MOD_RES (5)..(5): Selenocysteine
  MOD_RES (59)..(59): Selenocysteine
  MOD_RES (63)..(63): Selenocysteine
  MOD_RES (97)..(97): Selenocysteine
  MOD_RES (144)..(144): Selenocysteine
  MOD_RES (201)..(201): Selenocysteine
  MOD_RES (211)..(211): Selenocysteine
  MOD_RES (248)..(248): Selenocysteine
MSXPXDPGAMPHPGPSPGPGPSPGPILGPSPGPGPSPGSVHSMMGPSPGPPSVSHPMPXMGSXDFPQEGMHQMHKPIDGIHDKGIVEDIHCGSMKGXGMRPPHPGMGPPQSPMDQHSQGYMSPHPSPLGAPEHVSSPMSGGGPXPPQMPPSQPGALIPGDPQAMSQPNRGPSPFSPVQLHQLRAQILAYKMLARGQPLPEXLQLAVQGKRXLPGLQQQQQQQQQQQQQQQQQQQQQQQPQQQPPQPQXQQQQQPALVNYNRPSGRLIRNQMNNAMVQLG

SEQ ID NO: 25770 - protein, 288 aa, Homo sapiens
  MOD_RES (3)..(3): Selenocysteine
  MOD_RES (5)..(5): Selenocysteine
  MOD_RES (59)..(59): Selenocysteine
  MOD_RES (63)..(63): Selenocysteine
  MOD_RES (97)..(97): Selenocysteine
  MOD_RES (144)..(144): Selenocysteine
  MOD_RES (201)..(201): Selenocysteine
  MOD_RES (211)..(211): Selenocysteine
  MOD_RES (248)..(248): Selenocysteine
  MOD_RES (274)..(274): Selenocysteine
MSXPXDPGAMPHPGPSPGPGPSPGPILGPSPGPGPSPGSVHSMMGPSPGPPSVSHPMPXMGSXDFPQEGMHQMHKPIDGIHDKGIVEDIHCGSMKGXGMRPPHPGMGPPQSPMDQHSQGYMSPHPSPLGAPEHVSSPMSGGGPXPPQMPPSQPGALIPGDPQAMSQPNRGPSPFSPVQLHQLRAQILAYKMLARGQPLPEXLQLAVQGKRXLPGLQQQQQQQQQQQQQQQQQQQQQQQPQQQPPQPQXQQQQQPALVNYNRPSALNAGNSNLKXPADSVSGEGLLPDS

SEQ ID NO: 25771 - protein, 1428 aa, Homo sapiens
  MOD_RES (3)..(3): Selenocysteine
  MOD_RES (5)..(5): Selenocysteine
  MOD_RES (59)..(59): Selenocysteine
  MOD_RES (63)..(63): Selenocysteine
  MOD_RES (97)..(97): Selenocysteine
  MOD_RES (144)..(144): Selenocysteine
  MOD_RES (201)..(201): Selenocysteine
  MOD_RES (211)..(211): Selenocysteine
  MOD_RES (248)..(248): Selenocysteine
  MOD_RES (274)..(274): Selenocysteine
  MOD_RES (374)..(374): Selenocysteine
  MOD_RES (377)..(377): Selenocysteine
  MOD_RES (404)..(405): Selenocysteine
  MOD_RES (408)..(408): Selenocysteine
  MOD_RES (422)..(422): Selenocysteine
  MOD_RES (429)..(429): Selenocysteine
  MOD_RES (482)..(482): Selenocysteine
  MOD_RES (487)..(487): Selenocysteine
  MOD_RES (495)..(495): Selenocysteine
  MOD_RES (533)..(533): Selenocysteine
  MOD_RES (541)..(541): Selenocysteine
  MOD_RES (598)..(598): Selenocysteine
  MOD_RES (600)..(600): Selenocysteine
  MOD_RES (602)..(602): Selenocysteine
  MOD_RES (656)..(656): Selenocysteine
  MOD_RES (680)..(680): Selenocysteine
  MOD_RES (703)..(703): Selenocysteine
  MOD_RES (723)..(723): Selenocysteine
  MOD_RES (756)..(756): Selenocysteine
  MOD_RES (759)..(759): Selenocysteine
  MOD_RES (764)..(764): Selenocysteine
  MOD_RES (784)..(784): Selenocysteine
  MOD_RES (789)..(789): Selenocysteine
  MOD_RES (807)..(807): Selenocysteine
  MOD_RES (828)..(829): Selenocysteine
  MOD_RES (864)..(864): Selenocysteine
  MOD_RES (869)..(869): Selenocysteine
  MOD_RES (880)..(880): Selenocysteine
  MOD_RES (882)..(882): Selenocysteine
  MOD_RES (901)..(901): Selenocysteine
  MOD_RES (908)..(908): Selenocysteine
  MOD_RES (920)..(920): Selenocysteine
  MOD_RES (931)..(931): Selenocysteine
  MOD_RES (989)..(989): Selenocysteine
  MOD_RES (1004)..(1004): Selenocysteine
  MOD_RES (1008)..(1008): Selenocysteine
  MOD_RES (1065)..(1065): Selenocysteine
  MOD_RES (1076)..(1076): Selenocysteine
  MOD_RES (1080)..(1080): Selenocysteine
  MOD_RES (1099)..(1100): Selenocysteine
  MOD_RES (1126)..(1126): Selenocysteine
  MOD_RES (1140)..(1140): Selenocysteine
  MOD_RES (1176)..(1176): Selenocysteine
  MOD_RES (1238)..(1238): Selenocysteine
  MOD_RES (1295)..(1295): Selenocysteine
  MOD_RES (1321)..(1321): Selenocysteine
  MOD_RES (1384)..(1384): Selenocysteine
  MOD_RES (1393)..(1393): Selenocysteine
  MOD_RES (1426)..(1426): Selenocysteine
MSXPXDPGAMPHPGPSPGPGPSPGPILGPSPGPGPSPGSVHSMMGPSPGPPSVSHPMPXMGSXDFPQEGMHQMHKPIDGIHDKGIVEDIHCGSMKGXGMRPPHPGMGPPQSPMDQHSQGYMSPHPSPLGAPEHVSSPMSGGGPXPPQMPPSQPGALIPGDPQAMSQPNRGPSPFSPVQLHQLRAQILAYKMLARGQPLPEXLQLAVQGKRXLPGLQQQQQQQQQQQQQQQQQQQQQQQPQQQPPQPQXQQQQQPALVNYNRPSGPGPELSGPSXPQKLPVPAPGGRPSPAPPAAAQPPAAAVPGPSVPQPAPGQPSPVLQLQQKQSRISPIQKPQGLDPVEILQEREYRLQARIAHRIQELENLPGSLPPDLRXKAXVELKALRLLNFQRQLRQEVVACMRRDXXLEXALNSKAYKRSKRQXLREARMXEKLEKQQKIEQERKRRQKHQEYLNSILQHAKDFKEYHRSVAGKIQKLSKAVAXWHANXEREQKKEXERIEKERMRRLMAEDEEGYRKLIDQKKDRRLAYLLQQXDEYVANLXNLVWEHKQAQAAKEKKKRRRRKKKAEENAEGGESALGPDGEPIDESSQMSDLPVKVXHXEXGKVLFGPEAPKASQLDAWLEMNPGYEVAPRSDSEESDSDYEEEDEEEESSRQEXEEKILLDPNSEEVSEKDAKQIIEXAKQDVDDEYSMQYSARGSQSYYXVAHAISERVEKQSALLINGXLKHYQLQGLEWMVSLYNNNLNGILADEMGLGKXIQXIALIXYLMEHKRLNGPYLIIVPLSXLSNWXYEFDKWAPSVVKISYKGXPAMRRSLVPQLRSGKFNVLLXXYEYIIKDKHILAKIRWKYMIVDEGHRMKNHHCKLXQVLNXHYVAPRRILLXGXPLQNKLPELWALLNFLLPXIFKSCSXFEQWFNAPFAMXGERVDLNEEEXILIIRRLHKVLRPFLLRRLKKEVESQLPEKVEYVIKCDMSALQKILYRHMQAKGILLXDGSEKDKKGKGGAKXLMNXIMQLRKICNHPYMFQHIEESFAEHLGYSNGVINGAELYRASGKFELLDRILPKLRAXNHRVLLFCQMXSLMXIMEDYFAFRNFLYLRLDGXXKSEDRAALLKKFNEPGSQYFIFLLSXRAGGLGLNLQAADXVVIFDSDWNPHQDLQAQDRAHRIGQQNEVRVLRLCXVNSVEEKILAAAKYKLNVDQKVIQAGMFDQKSSSHERRAFLQAILEHEEENEEEDEVPDDEXLNQMIARREEEFDLFMRMDMDRRREDARNPKRKPRLMEEDELPSWIIKDDAEVERLXCEEEEEKIFGRGSRQRRDVDYSDALXEKQWLRAIEDGNLEEMEEEVRLKKRKRRRNVDKDPAKEDVEKAKKRRGRPPAEKLSPNPPKLXKQMNAIIDXVINYKDRCNVEKVPSNSQLEIEGNRKGFVIISXGA

SEQ ID NO: 25772 - protein, 1514 aa, Homo sapiens
  MOD_RES (3)..(3): Selenocysteine
  MOD_RES (5)..(5): Selenocysteine
  MOD_RES (59)..(59): Selenocysteine
  MOD_RES (63)..(63): Selenocysteine
  MOD_RES (97)..(97): Selenocysteine
  MOD_RES (144)..(144): Selenocysteine
  MOD_RES (201)..(201): Selenocysteine
  MOD_RES (211)..(211): Selenocysteine
  MOD_RES (248)..(248): Selenocysteine
  MOD_RES (274)..(274): Selenocysteine
  MOD_RES (374)..(374): Selenocysteine
  MOD_RES (377)..(377): Selenocysteine
  MOD_RES (404)..(405): Selenocysteine
  MOD_RES (408)..(408): Selenocysteine
  MOD_RES (422)..(422): Selenocysteine
  MOD_RES (429)..(429): Selenocysteine
  MOD_RES (482)..(482): Selenocysteine
  MOD_RES (487)..(487): Selenocysteine
  MOD_RES (495)..(495): Selenocysteine
  MOD_RES (533)..(533): Selenocysteine
  MOD_RES (541)..(541): Selenocysteine
  MOD_RES (598)..(598): Selenocysteine
  MOD_RES (600)..(600): Selenocysteine
  MOD_RES (602)..(602): Selenocysteine
  MOD_RES (656)..(656): Selenocysteine
  MOD_RES (680)..(680): Selenocysteine
  MOD_RES (703)..(703): Selenocysteine
  MOD_RES (723)..(723): Selenocysteine
  MOD_RES (756)..(756): Selenocysteine
  MOD_RES (759)..(759): Selenocysteine
  MOD_RES (764)..(764): Selenocysteine
  MOD_RES (784)..(784): Selenocysteine
  MOD_RES (789)..(789): Selenocysteine
  MOD_RES (807)..(807): Selenocysteine
  MOD_RES (828)..(829): Selenocysteine
  MOD_RES (864)..(864): Selenocysteine
  MOD_RES (873)..(873): Selenocysteine
  MOD_RES (931)..(931): Selenocysteine
  MOD_RES (946)..(946): Selenocysteine
  MOD_RES (950)..(950): Selenocysteine
  MOD_RES (1007)..(1007): Selenocysteine
  MOD_RES (1018)..(1018): Selenocysteine
  MOD_RES (1022)..(1022): Selenocysteine
  MOD_RES (1041)..(1042): Selenocysteine
  MOD_RES (1068)..(1068): Selenocysteine
  MOD_RES (1082)..(1082): Selenocysteine
  MOD_RES (1118)..(1118): Selenocysteine
  MOD_RES (1180)..(1180): Selenocysteine
  MOD_RES (1237)..(1237): Selenocysteine
  MOD_RES (1263)..(1263): Selenocysteine
  MOD_RES (1326)..(1326): Selenocysteine
  MOD_RES (1335)..(1335): Selenocysteine
  MOD_RES (1404)..(1404): Selenocysteine
  MOD_RES (1511)..(1511): Selenocysteine
MSXPXDPGAMPHPGPSPGPGPSPGPILGPSPGPGPSPGSVHSMMGPSPGPPSVSHPMPXMGSXDFPQEGMHQMHKPIDGIHDKGIVEDIHCGSMKGXGMRPPHPGMGPPQSPMDQHSQGYMSPHPSPLGAPEHVSSPMSGGGPXPPQMPPSQPGALIPGDPQAMSQPNRGPSPFSPVQLHQLRAQILAYKMLARGQPLPEXLQLAVQGKRXLPGLQQQQQQQQQQQQQQQQQQQQQQQPQQQPPQPQXQQQQQPALVNYNRPSGPGPELSGPSXPQKLPVPAPGGRPSPAPPAAAQPPAAAVPGPSVPQPAPGQPSPVLQLQQKQSRISPIQKPQGLDPVEILQEREYRLQARIAHRIQELENLPGSLPPDLRXKAXVELKALRLLNFQRQLRQEVVACMRRDXXLEXALNSKAYKRSKRQXLREARMXEKLEKQQKIEQERKRRQKHQEYLNSILQHAKDFKEYHRSVAGKIQKLSKAVAXWHANXEREQKKEXERIEKERMRRLMAEDEEGYRKLIDQKKDRRLAYLLQQXDEYVANLXNLVWEHKQAQAAKEKKKRRRRKKKAEENAEGGESALGPDGEPIDESSQMSDLPVKVXHXEXGKVLFGPEAPKASQLDAWLEMNPGYEVAPRSDSEESDSDYEEEDEEEESSRQEXEEKILLDPNSEEVSEKDAKQIIEXAKQDVDDEYSMQYSARGSQSYYXVAHAISERVEKQSALLINGXLKHYQLQGLEWMVSLYNNNLNGILADEMGLGKXIQXIALIXYLMEHKRLNGPYLIIVPLSXLSNWXYEFDKWAPSVVKISYKGXPAMRRSLVPQLRSGKFNVLLXXYEYIIKDKHILAKIRWKYMIVDEGHRMKNHHCKLXQVDLNEEEXILIIRRLHKVLRPFLLRRLKKEVESQLPEKVEYVIKCDMSALQKILYRHMQAKGILLXDGSEKDKKGKGGAKXLMNXIMQLRKICNHPYMFQHIEESFAEHLGYSNGVINGAELYRASGKFELLDRILPKLRAXNHRVLLFCQMXSLMXIMEDYFAFRNFLYLRLDGXXKSEDRAALLKKFNEPGSQYFIFLLSXRAGGLGLNLQAADXVVIFDSDWNPHQDLQAQDRAHRIGQQNEVRVLRLCXVNSVEEKILAAAKYKLNVDQKVIQAGMFDQKSSSHERRAFLQAILEHEEENEEEDEVPDDEXLNQMIARREEEFDLFMRMDMDRRREDARNPKRKPRLMEEDELPSWIIKDDAEVERLXCEEEEEKIFGRGSRQRRDVDYSDALXEKQWLRAIEDGNLEEMEEEVRLKKRKRRRNVDKDPAKEDVEKAKKRRGRPPAEKLSPNPPKLXKQMNAIIDXVINYKDSSGRQLSEVFIQLPSRKELPEYYELIRKPVDFKKIKERIRNHKYRSLGDLEKDVMLLCHNAQXFNLEGSQIYEDSIVLQSVFKSARQKIAKEEESEDESNEEEEEEDEEESESEAKSVKVKIKLNKKDDKGRDKGKGKKRPNRGKAKPVVSDFDSDEEQDEREQSEGSGXDDE

SEQ ID NO: 25773 - protein, 1572 aa, Homo sapiens
  MOD_RES (3)..(3): Selenocysteine
  MOD_RES (5)..(5): Selenocysteine
  MOD_RES (59)..(59): Selenocysteine
  MOD_RES (63)..(63): Selenocysteine
  MOD_RES (97)..(97): Selenocysteine
  MOD_RES (144)..(144): Selenocysteine
  MOD_RES (201)..(201): Selenocysteine
  MOD_RES (211)..(211): Selenocysteine
  MOD_RES (248)..(248): Selenocysteine
  MOD_RES (274)..(274): Selenocysteine
  MOD_RES (374)..(374): Selenocysteine
  MOD_RES (377)..(377): Selenocysteine
  MOD_RES (404)..(405): Selenocysteine
  MOD_RES (408)..(408): Selenocysteine
  MOD_RES (422)..(422): Selenocysteine
  MOD_RES (429)..(429): Selenocysteine
  MOD_RES (482)..(482): Selenocysteine
  MOD_RES (487)..(487): Selenocysteine
  MOD_RES (495)..(495): Selenocysteine
  MOD_RES (533)..(533): Selenocysteine
  MOD_RES (541)..(541): Selenocysteine
  MOD_RES (598)..(598): Selenocysteine
  MOD_RES (600)..(600): Selenocysteine
  MOD_RES (602)..(602): Selenocysteine
  MOD_RES (656)..(656): Selenocysteine
  MOD_RES (680)..(680): Selenocysteine
  MOD_RES (703)..(703): Selenocysteine
  MOD_RES (723)..(723): Selenocysteine
  MOD_RES (756)..(756): Selenocysteine
  MOD_RES (759)..(759): Selenocysteine
  MOD_RES (764)..(764): Selenocysteine
  MOD_RES (784)..(784): Selenocysteine
  MOD_RES (789)..(789): Selenocysteine
  MOD_RES (807)..(807): Selenocysteine
  MOD_RES (828)..(829): Selenocysteine
  MOD_RES (864)..(864): Selenocysteine
  MOD_RES (869)..(869): Selenocysteine
  MOD_RES (880)..(880): Selenocysteine
  MOD_RES (882)..(882): Selenocysteine
  MOD_RES (901)..(901): Selenocysteine
  MOD_RES (908)..(908): Selenocysteine
  MOD_RES (920)..(920): Selenocysteine
  MOD_RES (931)..(931): Selenocysteine
  MOD_RES (989)..(989): Selenocysteine
  MOD_RES (1004)..(1004): Selenocysteine
  MOD_RES (1008)..(1008): Selenocysteine
  MOD_RES (1065)..(1065): Selenocysteine
  MOD_RES (1076)..(1076): Selenocysteine
  MOD_RES (1080)..(1080): Selenocysteine
  MOD_RES (1099)..(1100): Selenocysteine
  MOD_RES (1126)..(1126): Selenocysteine
  MOD_RES (1140)..(1140): Selenocysteine
  MOD_RES (1176)..(1176): Selenocysteine
  MOD_RES (1238)..(1238): Selenocysteine
  MOD_RES (1295)..(1295): Selenocysteine
  MOD_RES (1321)..(1321): Selenocysteine
  MOD_RES (1384)..(1384): Selenocysteine
  MOD_RES (1393)..(1393): Selenocysteine
  MOD_RES (1462)..(1462): Selenocysteine
  MOD_RES (1569)..(1569): Selenocysteine
MSXPXDPGAMPHPGPSPGPGPSPGPILGPSPGPGPSPGSVHSMMGPSPGPPSVSHPMPXMGSXDFPQEGMHQMHKPIDGIHDKGIVEDIHCGSMKGXGMRPPHPGMGPPQSPMDQHSQGYMSPHPSPLGAPEHVSSPMSGGGPXPPQMPPSQPGALIPGDPQAMSQPNRGPSPFSPVQLHQLRAQILAYKMLARGQPLPEXLQLAVQGKRXLPGLQQQQQQQQQQQQQQQQQQQQQQQPQQQPPQPQXQQQQQPALVNYNRPSGPGPELSGPSXPQKLPVPAPGGRPSPAPPAAAQPPAAAVPGPSVPQPAPGQPSPVLQLQQKQSRISPIQKPQGLDPVEILQEREYRLQARIAHRIQELENLPGSLPPDLRXKAXVELKALRLLNFQRQLRQEVVACMRRDXXLEXALNSKAYKRSKRQXLREARMXEKLEKQQKIEQERKRRQKHQEYLNSILQHAKDFKEYHRSVAGKIQKLSKAVAXWHANXEREQKKEXERIEKERMRRLMAEDEEGYRKLIDQKKDRRLAYLLQQXDEYVANLXNLVWEHKQAQAAKEKKKRRRRKKKAEENAEGGESALGPDGEPIDESSQMSDLPVKVXHXEXGKVLFGPEAPKASQLDAWLEMNPGYEVAPRSDSEESDSDYEEEDEEEESSRQEXEEKILLDPNSEEVSEKDAKQIIEXAKQDVDDEYSMQYSARGSQSYYXVAHAISERVEKQSALLINGXLKHYQLQGLEWMVSLYNNNLNGILADEMGLGKXIQXIALIXYLMEHKRLNGPYLIIVPLSXLSNWXYEFDKWAPSVVKISYKGXPAMRRSLVPQLRSGKFNVLLXXYEYIIKDKHILAKIRWKYMIVDEGHRMKNHHCKLXQVLNXHYVAPRRILLXGXPLQNKLPELWALLNFLLPXIFKSCSXFEQWFNAPFAMXGERVDLNEEEXILIIRRLHKVLRPFLLRRLKKEVESQLPEKVEYVIKCDMSALQKILYRHMQAKGILLXDGSEKDKKGKGGAKXLMNXIMQLRKICNHPYMFQHIEESFAEHLGYSNGVINGAELYRASGKFELLDRILPKLRAXNHRVLLFCQMXSLMXIMEDYFAFRNFLYLRLDGXXKSEDRAALLKKFNEPGSQYFIFLLSXRAGGLGLNLQAADXVVIFDSDWNPHQDLQAQDRAHRIGQQNEVRVLRLCXVNSVEEKILAAAKYKLNVDQKVIQAGMFDQKSSSHERRAFLQAILEHEEENEEEDEVPDDEXLNQMIARREEEFDLFMRMDMDRRREDARNPKRKPRLMEEDELPSWIIKDDAEVERLXCEEEEEKIFGRGSRQRRDVDYSDALXEKQWLRAIEDGNLEEMEEEVRLKKRKRRRNVDKDPAKEDVEKAKKRRGRPPAEKLSPNPPKLXKQMNAIIDXVINYKDSSGRQLSEVFIQLPSRKELPEYYELIRKPVDFKKIKERIRNHKYRSLGDLEKDVMLLCHNAQXFNLEGSQIYEDSIVLQSVFKSARQKIAKEEESEDESNEEEEEEDEEESESEAKSVKVKIKLNKKDDKGRDKGKGKKRPNRGKAKPVVSDFDSDEEQDEREQSEGSGXDDE

SEQ ID NO: 25774 - protein, 1590 aa, Homo sapiens
  MOD_RES (3)..(3): Selenocysteine
  MOD_RES (5)..(5): Selenocysteine
  MOD_RES (59)..(59): Selenocysteine
  MOD_RES (63)..(63): Selenocysteine
  MOD_RES (97)..(97): Selenocysteine
  MOD_RES (144)..(144): Selenocysteine
  MOD_RES (201)..(201): Selenocysteine
  MOD_RES (211)..(211): Selenocysteine
  MOD_RES (248)..(248): Selenocysteine
  MOD_RES (274)..(274): Selenocysteine
  MOD_RES (374)..(374): Selenocysteine
  MOD_RES (377)..(377): Selenocysteine
  MOD_RES (404)..(405): Selenocysteine
  MOD_RES (408)..(408): Selenocysteine
  MOD_RES (422)..(422): Selenocysteine
  MOD_RES (429)..(429): Selenocysteine
  MOD_RES (482)..(482): Selenocysteine
  MOD_RES (487)..(487): Selenocysteine
  MOD_RES (495)..(495): Selenocysteine
  MOD_RES (533)..(533): Selenocysteine
  MOD_RES (541)..(541): Selenocysteine
  MOD_RES (598)..(598): Selenocysteine
  MOD_RES (600)..(600): Selenocysteine
  MOD_RES (602)..(602): Selenocysteine
  MOD_RES (656)..(656): Selenocysteine
  MOD_RES (680)..(680): Selenocysteine
  MOD_RES (703)..(703): Selenocysteine
  MOD_RES (723)..(723): Selenocysteine
  MOD_RES (756)..(756): Selenocysteine
  MOD_RES (759)..(759): Selenocysteine
  MOD_RES (764)..(764): Selenocysteine
  MOD_RES (784)..(784): Selenocysteine
  MOD_RES (789)..(789): Selenocysteine
  MOD_RES (807)..(807): Selenocysteine
  MOD_RES (828)..(829): Selenocysteine
  MOD_RES (864)..(864): Selenocysteine
  MOD_RES (869)..(869): Selenocysteine
  MOD_RES (880)..(880): Selenocysteine
  MOD_RES (882)..(882): Selenocysteine
  MOD_RES (901)..(901): Selenocysteine
  MOD_RES (908)..(908): Selenocysteine
  MOD_RES (920)..(920): Selenocysteine
  MOD_RES (931)..(931): Selenocysteine
  MOD_RES (989)..(989): Selenocysteine
  MOD_RES (1004)..(1004): Selenocysteine
  MOD_RES (1008)..(1008): Selenocysteine
  MOD_RES (1065)..(1065): Selenocysteine
  MOD_RES (1076)..(1076): Selenocysteine
  MOD_RES (1080)..(1080): Selenocysteine
  MOD_RES (1099)..(1100): Selenocysteine
  MOD_RES (1126)..(1126): Selenocysteine
  MOD_RES (1140)..(1140): Selenocysteine
  MOD_RES (1176)..(1176): Selenocysteine
  MOD_RES (1238)..(1238): Selenocysteine
  MOD_RES (1295)..(1295): Selenocysteine
  MOD_RES (1321)..(1321): Selenocysteine
  MOD_RES (1384)..(1384): Selenocysteine
  MOD_RES (1393)..(1393): Selenocysteine
  MOD_RES (1480)..(1480): Selenocysteine
  MOD_RES (1587)..(1587): Selenocysteine
MSXPXDPGAMPHPGPSPGPGPSPGPILGPSPGPGPSPGSVHSMMGPSPGPPSVSHPMPXMGSXDFPQEGMHQMHKPIDGIHDKGIVEDIHCGSMKGXGMRPPHPGMGPPQSPMDQHSQGYMSPHPSPLGAPEHVSSPMSGGGPXPPQMPPSQPGALIPGDPQAMSQPNRGPSPFSPVQLHQLRAQILAYKMLARGQPLPEXLQLAVQGKRXLPGLQQQQQQQQQQQQQQQQQQQQQQQPQQQPPQPQXQQQQQPALVNYNRPSGPGPELSGPSXPQKLPVPAPGGRPSPAPPAAAQPPAAAVPGPSVPQPAPGQPSPVLQLQQKQSRISPIQKPQGLDPVEILQEREYRLQARIAHRIQELENLPGSLPPDLRXKAXVELKALRLLNFQRQLRQEVVACMRRDXXLEXALNSKAYKRSKRQXLREARMXEKLEKQQKIEQERKRRQKHQEYLNSILQHAKDFKEYHRSVAGKIQKLSKAVAXWHANXEREQKKEXERIEKERMRRLMAEDEEGYRKLIDQKKDRRLAYLLQQXDEYVANLXNLVWEHKQAQAAKEKKKRRRRKKKAEENAEGGESALGPDGEPIDESSQMSDLPVKVXHXEXGKVLFGPEAPKASQLDAWLEMNPGYEVAPRSDSEESDSDYEEEDEEEESSRQEXEEKILLDPNSEEVSEKDAKQIIEXAKQDVDDEYSMQYSARGSQSYYXVAHAISERVEKQSALLINGXLKHYQLQGLEWMVSLYNNNLNGILADEMGLGKXIQXIALIXYLMEHKRLNGPYLIIVPLSXLSNWXYEFDKWAPSVVKISYKGXPAMRRSLVPQLRSGKFNVLLXXYEYIIKDKHILAKIRWKYMIVDEGHRMKNHHCKLXQVLNXHYVAPRRILLXGXPLQNKLPELWALLNFLLPXIFKSCSXFEQWFNAPFAMXGERVDLNEEEXILIIRRLHKVLRPFLLRRLKKEVESQLPEKVEYVIKCDMSALQKILYRHMQAKGILLXDGSEKDKKGKGGAKXLMNXIMQLRKICNHPYMFQHIEESFAEHLGYSNGVINGAELYRASGKFELLDRILPKLRAXNHRVLLFCQMXSLMXIMEDYFAFRNFLYLRLDGXXKSEDRAALLKKFNEPGSQYFIFLLSXRAGGLGLNLQAADXVVIFDSDWNPHQDLQAQDRAHRIGQQNEVRVLRLCXVNSVEEKILAAAKYKLNVDQKVIQAGMFDQKSSSHERRAFLQAILEHEEENEEEDEVPDDEXLNQMIARREEEFDLFMRMDMDRRREDARNPKRKPRLMEEDELPSWIIKDDAEVERLXCEEEEEKIFGRGSRQRRDVDYSDALXEKQWLRAIEDGNLEEMEEEVRLKKRKRRRNVDKDPAKEDVEKAKKRRGRPPAEKLSPNPPKLXKQMNAIIDXVINYKDRCNVEKVPSNSQLEIEGNSSGRQLSEVFIQLPSRKELPEYYELIRKPVDFKKIKERIRNHKYRSLGDLEKDVMLLCHNAQXFNLEGSQIYEDSIVLQSVFKSARQKIAKEEESEDESNEEEEEEDEEESESEAKSVKVKIKLNKKDDKGRDKGKGKKRPNRGKAKPVVSDFDSDEEQDEREQSEGSGXDDE

SEQ ID NO: 25775 - protein, 183 aa, Homo sapiens
  MOD_RES (60)..(60): Selenocysteine
  MOD_RES (69)..(69): Selenocysteine
  MOD_RES (156)..(156): Selenocysteine
MWLAIEDGNLEEMEEEVRLKKRKRRRNVDKDPAKEDVEKAKKRRGRPPAEKLSPNPPKLXKQMNAIIDXVINYKDRCNVEKVPSNSQLEIEGNSSGRQLSEVFIQLPSRKELPEYYELIRKPVDFKKIKERIRNHKYRSLGDLEKDVMLLCHNAQXFNLEGSQIYEDSIVLQSVFKSARQKIA

SEQ ID NO: 25776 - protein, 248 aa, Homo sapiens
  MOD_RES (60)..(60): Selenocysteine
  MOD_RES (69)..(69): Selenocysteine
  MOD_RES (138)..(138): Selenocysteine
  MOD_RES (245)..(245): Selenocysteine
MWLAIEDGNLEEMEEEVRLKKRKRRRNVDKDPAKEDVEKAKKRRGRPPAEKLSPNPPKLXKQMNAIIDXVINYKDSSGRQLSEVFIQLPSRKELPEYYELIRKPVDFKKIKERIRNHKYRSLGDLEKDVMLLCHNAQXFNLEGSQIYEDSIVLQSVFKSARQKIAKEEESEDESNEEEEEEDEEESESEAKSVKVKIKLNKKDDKGRDKGKGKKRPNRGKAKPVVSDFDSDEEQDEREQSEGSGXDDE

SEQ ID NO: 25777 - protein, 270 aa, Homo sapiens
  MOD_RES (1)..(1): Any amino acid
  MOD_RES (9)..(9): Selenocysteine
  MOD_RES (31)..(31): Selenocysteine
  MOD_RES (88)..(88): Selenocysteine
  MOD_RES (114)..(114): Selenocysteine
  MOD_RES (177)..(177): Selenocysteine
  MOD_RES (186)..(186): Selenocysteine
  MOD_RES (255)..(255): Selenocysteine
XLNLQAADXVVIFDSDWNPHQEEDEVPDDEXLNQMIARREEEFDLFMRMDMDRRREDARNPKRKPRLMEEDELPSWIIKDDAEVERLXCEEEEEKIFGRGSRQRRDVDYSDALXEKQWLRAIEDGNLEEMEEEVRLKKRKRRRNVDKDPAKEDVEKAKKRRGRPPAEKLSPNPPKLXKQMNAIIDXVINYKDSSGRQLSEVFIQLPSRKELPEYYELIRKPVDFKKIKERIRNHKYRSLGDLEKDVMLLCHNAQXFNLEGSQIYEDSIVL

SEQ ID NO: 25778 - protein, 228 aa, Homo sapiens
  MOD_RES (1)..(1): Any amino acid
  MOD_RES (17)..(17): Selenocysteine
  MOD_RES (40)..(40): Selenocysteine
  MOD_RES (60)..(60): Selenocysteine
  MOD_RES (93)..(93): Selenocysteine
  MOD_RES (96)..(96): Selenocysteine
  MOD_RES (101)..(101): Selenocysteine
  MOD_RES (121)..(121): Selenocysteine
  MOD_RES (126)..(126): Selenocysteine
  MOD_RES (144)..(144): Selenocysteine
  MOD_RES (165)..(166): Selenocysteine
  MOD_RES (187)..(187): Selenocysteine
XNSEEVSEKDAKQIIEXAKQDVDDEYSMQYSARGSQSYYXVAHAISERVEKQSALLINGXLKHYQLQGLEWMVSLYNNNLNGILADEMGLGKXIQXIALIXYLMEHKRLNGPYLIIVPLSXLSNWXYEFDKWAPSVVKISYKGXPAMRRSLVPQLRSGKFNVLLXXYEYIIKDKHILAKVDLNEEEXILIIRRLHKVLRPFLLRRLKKEVESQLPEKVEYVIKCDMSA

SEQ ID NO: 25779 - protein, 58 aa, Homo sapiens
  MOD_RES (1)..(1): Any amino acid
  MOD_RES (32)..(32): Selenocysteine
  MOD_RES (57)..(57): Selenocysteine
XPFPSSLFFPDQLMKRLAARCFAGLLILSPLXVISDSRPADSGHRRRQFGGNGRGSXA

SEQ ID NO: 25780 - protein, 38 aa, Homo sapiens
  MOD_RES (1)..(1): Any amino acid
XSGRQLSEVFIQLPSRKELPEYYELIRKPVDFKKIKDS

SEQ ID NO: 25781 - protein, 1613 aa, Homo sapiens
  MOD_RES (3)..(3): Selenocysteine
  MOD_RES (11)..(11): Selenocysteine
  MOD_RES (58)..(58): Selenocysteine
  MOD_RES (170)..(170): Selenocysteine
  MOD_RES (219)..(219): Selenocysteine
  MOD_RES (228)..(228): Selenocysteine
  MOD_RES (296)..(296): Selenocysteine
  MOD_RES (298)..(298): Selenocysteine
  MOD_RES (308)..(308): Selenocysteine
  MOD_RES (330)..(330): Selenocysteine
  MOD_RES (353)..(353): Selenocysteine
  MOD_RES (398)..(398): Selenocysteine
  MOD_RES (401)..(401): Selenocysteine
  MOD_RES (428)..(428): Selenocysteine
  MOD_RES (432)..(432): Selenocysteine
  MOD_RES (453)..(453): Selenocysteine
  MOD_RES (494)..(494): Selenocysteine
  MOD_RES (501)..(501): Selenocysteine
  MOD_RES (506)..(506): Selenocysteine
  MOD_RES (511)..(511): Selenocysteine
  MOD_RES (557)..(557): Selenocysteine
  MOD_RES (565)..(565): Selenocysteine
  MOD_RES (596)..(596): Selenocysteine
  MOD_RES (609)..(609): Selenocysteine
  MOD_RES (629)..(629): Selenocysteine
  MOD_RES (631)..(631): Selenocysteine
  MOD_RES (681)..(681): Selenocysteine
  MOD_RES (739)..(739): Selenocysteine
  MOD_RES (786)..(786): Selenocysteine
  MOD_RES (789)..(789): Selenocysteine
  MOD_RES (794)..(794): Selenocysteine
  MOD_RES (814)..(814): Selenocysteine
  MOD_RES (858)..(859): Selenocysteine
  MOD_RES (894)..(894): Selenocysteine
  MOD_RES (899)..(899): Selenocysteine
  MOD_RES (910)..(910): Selenocysteine
  MOD_RES (912)..(912): Selenocysteine
  MOD_RES (931)..(931): Selenocysteine
  MOD_RES (938)..(938): Selenocysteine
  MOD_RES (950)..(950): Selenocysteine
  MOD_RES (961)..(961): Selenocysteine
  MOD_RES (1019)..(1019): Selenocysteine
  MOD_RES (1032)..(1032): Selenocysteine
  MOD_RES (1034)..(1034): Selenocysteine
  MOD_RES (1038)..(1038): Selenocysteine
  MOD_RES (1066)..(1066): Selenocysteine
  MOD_RES (1095)..(1095): Selenocysteine
  MOD_RES (1106)..(1106): Selenocysteine
  MOD_RES (1110)..(1110): Selenocysteine
  MOD_RES (1129)..(1130): Selenocysteine
  MOD_RES (1141)..(1141): Selenocysteine
  MOD_RES (1156)..(1156): Selenocysteine
  MOD_RES (1170)..(1170): Selenocysteine
  MOD_RES (1206)..(1206): Selenocysteine
  MOD_RES (1268)..(1268): Selenocysteine
  MOD_RES (1325)..(1325): Selenocysteine
  MOD_RES (1351)..(1351): Selenocysteine
  MOD_RES (1363)..(1363): Selenocysteine
  MOD_RES (1390)..(1390): Selenocysteine
  MOD_RES (1392)..(1393): Selenocysteine
  MOD_RES (1395)..(1395): Selenocysteine
  MOD_RES (1426)..(1426): Selenocysteine
  MOD_RES (1504)..(1504): Selenocysteine
  MOD_RES (1524)..(1524): Selenocysteine
MSXPDPPLGGXPRPGPSPGPGPSPGAMLGPSPGPSPGSAHSMMGPSPGPPSAGHPIPXQGPGGYPQDNMHQMHKPMESMHEKGMSDDPRYNQMKGMGMRSGGHAGMGPPPSPMDQHSQGYPSPLGGSEHASSPVPASGPSSGPQMSSGPGGAPLDGADPQALGQQNRGPXPFNQNQLHQLRAQIMAYKMLARGQPLPDHLQMAVQGKRPMPGMQQQMPXLPPPSVSAXGPGPGPGPGPGPGPGPAPPNYSRPHGMGGPNMPPPGPSGVPPGMPGQPPGGPPKPWPEGPMANAAAPXSXPQKLIPPQPXGRPSPAPPAVPPAASPVMPPQXQSPGQPAQPAPMVPLHQKQSRIXPIQKPRGLDPVEILQEREYRLQARIAHRIQELENLPGSLAGDLRXKAXIELKALRLLNFQRQLRQEVVVCMRRDXALEXALNAKAYKRSKRQSLREARIXEKLEKQQKIEQERKRRQKHQEYLNSILQHAKDFKEYHRSVXGKIQKLXKAVAXYHANXEREQKKENERIEKERMRRLMAEDEEGYRKLIDQKKDKRLAYLLQQXDEYVANLXELVRQHKAAQVAKEKKKKKKKKKAENAEGQXPAIGPDGEPLDEXSQMSDLPVKVIHVESGKILXGXDAPKAGQLEAWLEMNPGYEVAPRSDSEESGSEEEEEEEEEEQPQAAQPPXLPVEEKKKIPDPDSDDVSEVDARHIIENAKQDVDDEYGVSQALARGLQSYYAVAHAVXERVDKQSALMVNGVLKQYQIKGLEWLVSLYNNNLNGILADEMGLGKXIQXIALIXYLMEHKRINGPFLIIVPLSXLSNWAYEFDKWAPSVVKVSYKGSPAARRAFVPQLRSGKFNVLLXXYEYIIKDKHILAKIRWKYMIVDEGHRMKNHHCKLXQVLNXHYVAPRRLLLXGXPLQNKLPELWALLNFLLPXIFKSCSXFEQWFNAPFAMXGEKVDLNEEEXILIIRRLHKVLRPFLLRRLKKEVEAQLPEKVEYVIKCDMSALQRVLYRHMQAKGVLLXDGSEKDKKGKGGXKXLMNXIMQLRKICNHPYMFQHIEESFSEHLGFXGGIVQGLDLYRASGKFELLDRILPKLRAXNHKVLLFCQMXSLMXIMEDYFAYRGFKYLRLDGXXKAEDRGMLLKXFNEPGSEYFIFLLSXRAGGLGLNLQSADXVIIFDSDWNPHQDLQAQDRAHRIGQQNEVRVLRLCXVNSVEEKILAAAKYKLNVDQKVIQAGMFDQKSSSHERRAFLQAILEHEEQDEEEDEVPDDEXVNQMIARHEEEFDLFMRMDLDRRREEARNPKRKPRLMEEDELPSWIIKDDAEVERLXCEEEEEKMFGRGSRHRKEVDYSDSLXEKQWLKAIEEGXLEEIEEEVRQKKSSRKRKRDSDAGSSXPXXSXRSRDKDDESKKQKKRGRPPAEKLSPNPPNLXKKMKKIVDAVIKYKDSSGRQLSEVFIQLPSRKELPEYYELIRKPVDFKKIKERIRNHKYRSLNDLEKDVMLLCQNAQXFNLEGSLIYEDSIVLQSVFXSVRQKIEKEDDSEGEESEEEEEGEEEGSESESRSVKVKIKLGRKEKAQDRLKGGRRRPSRGSRAKPVVSDDDSEEEQEEDRSGSGSEED

SEQ ID NO: 25782 - protein, 1614 aa, Homo sapiens
  MOD_RES (3)..(3): Selenocysteine
  MOD_RES (11)..(11): Selenocysteine
  MOD_RES (58)..(58): Selenocysteine
  MOD_RES (170)..(170): Selenocysteine
  MOD_RES (219)..(219): Selenocysteine
  MOD_RES (228)..(228): Selenocysteine
  MOD_RES (296)..(296): Selenocysteine
  MOD_RES (298)..(298): Selenocysteine
  MOD_RES (308)..(308): Selenocysteine
  MOD_RES (330)..(330): Selenocysteine
  MOD_RES (353)..(353): Selenocysteine
  MOD_RES (398)..(398): Selenocysteine
  MOD_RES (401)..(401): Selenocysteine
  MOD_RES (428)..(428): Selenocysteine
  MOD_RES (432)..(432): Selenocysteine
  MOD_RES (453)..(453): Selenocysteine
  MOD_RES (494)..(494): Selenocysteine
  MOD_RES (501)..(501): Selenocysteine
  MOD_RES (506)..(506): Selenocysteine
  MOD_RES (511)..(511): Selenocysteine
  MOD_RES (557)..(557): Selenocysteine
  MOD_RES (565)..(565): Selenocysteine
  MOD_RES (596)..(596): Selenocysteine
  MOD_RES (609)..(609): Selenocysteine
  MOD_RES (629)..(629): Selenocysteine
  MOD_RES (631)..(631): Selenocysteine
  MOD_RES (681)..(681): Selenocysteine
  MOD_RES (739)..(739): Selenocysteine
  MOD_RES (786)..(786): Selenocysteine
  MOD_RES (789)..(789): Selenocysteine
  MOD_RES (794)..(794): Selenocysteine
  MOD_RES (814)..(814): Selenocysteine
  MOD_RES (858)..(859): Selenocysteine
  MOD_RES (894)..(894): Selenocysteine
  MOD_RES (899)..(899): Selenocysteine
  MOD_RES (910)..(910): Selenocysteine
  MOD_RES (912)..(912): Selenocysteine
  MOD_RES (931)..(931): Selenocysteine
  MOD_RES (938)..(938): Selenocysteine
  MOD_RES (950)..(950): Selenocysteine
  MOD_RES (961)..(961): Selenocysteine
  MOD_RES (1019)..(1019): Selenocysteine
  MOD_RES (1032)..(1032): Selenocysteine
  MOD_RES (1034)..(1034): Selenocysteine
  MOD_RES (1038)..(1038): Selenocysteine
  MOD_RES (1066)..(1066): Selenocysteine
  MOD_RES (1095)..(1095): Selenocysteine
  MOD_RES (1106)..(1106): Selenocysteine
  MOD_RES (1110)..(1110): Selenocysteine
  MOD_RES (1129)..(1130): Selenocysteine
  MOD_RES (1141)..(1141): Selenocysteine
  MOD_RES (1156)..(1156): Selenocysteine
  MOD_RES (1170)..(1170): Selenocysteine
  MOD_RES (1206)..(1206): Selenocysteine
  MOD_RES (1268)..(1268): Selenocysteine
  MOD_RES (1325)..(1325): Selenocysteine
  MOD_RES (1351)..(1351): Selenocysteine
  MOD_RES (1363)..(1363): Selenocysteine
  MOD_RES (1390)..(1390): Selenocysteine
  MOD_RES (1392)..(1393): Selenocysteine
  MOD_RES (1395)..(1395): Selenocysteine
  MOD_RES (1426)..(1426): Selenocysteine
  MOD_RES (1505)..(1505): Selenocysteine
  MOD_RES (1525)..(1525): Selenocysteine
MSXPDPPLGGXPRPGPSPGPGPSPGAMLGPSPGPSPGSAHSMMGPSPGPPSAGHPIPXQGPGGYPQDNMHQMHKPMESMHEKGMSDDPRYNQMKGMGMRSGGHAGMGPPPSPMDQHSQGYPSPLGGSEHASSPVPASGPSSGPQMSSGPGGAPLDGADPQALGQQNRGPXPFNQNQLHQLRAQIMAYKMLARGQPLPDHLQMAVQGKRPMPGMQQQMPXLPPPSVSAXGPGPGPGPGPGPGPGPAPPNYSRPHGMGGPNMPPPGPSGVPPGMPGQPPGGPPKPWPEGPMANAAAPXSXPQKLIPPQPXGRPSPAPPAVPPAASPVMPPQXQSPGQPAQPAPMVPLHQKQSRIXPIQKPRGLDPVEILQEREYRLQARIAHRIQELENLPGSLAGDLRXKAXIELKALRLLNFQRQLRQEVVVCMRRDXALEXALNAKAYKRSKRQSLREARIXEKLEKQQKIEQERKRRQKHQEYLNSILQHAKDFKEYHRSVXGKIQKLXKAVAXYHANXEREQKKENERIEKERMRRLMAEDEEGYRKLIDQKKDKRLAYLLQQXDEYVANLXELVRQHKAAQVAKEKKKKKKKKKAENAEGQXPAIGPDGEPLDEXSQMSDLPVKVIHVESGKILXGXDAPKAGQLEAWLEMNPGYEVAPRSDSEESGSEEEEEEEEEEQPQAAQPPXLPVEEKKKIPDPDSDDVSEVDARHIIENAKQDVDDEYGVSQALARGLQSYYAVAHAVXERVDKQSALMVNGVLKQYQIKGLEWLVSLYNNNLNGILADEMGLGKXIQXIALIXYLMEHKRINGPFLIIVPLSXLSNWAYEFDKWAPSVVKVSYKGSPAARRAFVPQLRSGKFNVLLXXYEYIIKDKHILAKIRWKYMIVDEGHRMKNHHCKLXQVLNXHYVAPRRLLLXGXPLQNKLPELWALLNFLLPXIFKSCSXFEQWFNAPFAMXGEKVDLNEEEXILIIRRLHKVLRPFLLRRLKKEVEAQLPEKVEYVIKCDMSALQRVLYRHMQAKGVLLXDGSEKDKKGKGGXKXLMNXIMQLRKICNHPYMFQHIEESFSEHLGFXGGIVQGLDLYRASGKFELLDRILPKLRAXNHKVLLFCQMXSLMXIMEDYFAYRGFKYLRLDGXXKAEDRGMLLKXFNEPGSEYFIFLLSXRAGGLGLNLQSADXVIIFDSDWNPHQDLQAQDRAHRIGQQNEVRVLRLCXVNSVEEKILAAAKYKLNVDQKVIQAGMFDQKSSSHERRAFLQAILEHEEQDEEEDEVPDDEXVNQMIARHEEEFDLFMRMDLDRRREEARNPKRKPRLMEEDELPSWIIKDDAEVERLXCEEEEEKMFGRGSRHRKEVDYSDSLXEKQWLKAIEEGXLEEIEEEVRQKKSSRKRKRDSDAGSSXPXXSXRSRDKDDESKKQKKRGRPPAEKLSPNPPNLXKKMKKIVDAVIKYKDSSSGRQLSEVFIQLPSRKELPEYYELIRKPVDFKKIKERIRNHKYRSLNDLEKDVMLLCQNAQXFNLEGSLIYEDSIVLQSVFXSVRQKIEKEDDSEGEESEEEEEGEEEGSESESRSVKVKIKLGRKEKAQDRLKGGRRRPSRGSRAKPVVSDDDSEEEQEEDRSGSGSEED

SEQ ID NO: 25783 - protein, 1616 aa, Homo sapiens
  MOD_RES (3)..(3): Selenocysteine
  MOD_RES (11)..(11): Selenocysteine
  MOD_RES (58)..(58): Selenocysteine
  MOD_RES (170)..(170): Selenocysteine
  MOD_RES (219)..(219): Selenocysteine
  MOD_RES (228)..(228): Selenocysteine
  MOD_RES (296)..(296): Selenocysteine
  MOD_RES (298)..(298): Selenocysteine
  MOD_RES (308)..(308): Selenocysteine
  MOD_RES (330)..(330): Selenocysteine
  MOD_RES (353)..(353): Selenocysteine
  MOD_RES (398)..(398): Selenocysteine
  MOD_RES (401)..(401): Selenocysteine
  MOD_RES (428)..(428): Selenocysteine
  MOD_RES (432)..(432): Selenocysteine
  MOD_RES (453)..(453): Selenocysteine
  MOD_RES (494)..(494): Selenocysteine
  MOD_RES (501)..(501): Selenocysteine
  MOD_RES (506)..(506): Selenocysteine
  MOD_RES (511)..(511): Selenocysteine
  MOD_RES (557)..(557): Selenocysteine
  MOD_RES (565)..(565): Selenocysteine
  MOD_RES (596)..(596): Selenocysteine
  MOD_RES (609)..(609): Selenocysteine
  MOD_RES (629)..(629): Selenocysteine
  MOD_RES (631)..(631): Selenocysteine
  MOD_RES (681)..(681): Selenocysteine
  MOD_RES (739)..(739): Selenocysteine
  MOD_RES (786)..(786): Selenocysteine
  MOD_RES (789)..(789): Selenocysteine
  MOD_RES (794)..(794): Selenocysteine
  MOD_RES (814)..(814): Selenocysteine
  MOD_RES (858)..(859): Selenocysteine
  MOD_RES (894)..(894): Selenocysteine
  MOD_RES (899)..(899): Selenocysteine
  MOD_RES (910)..(910): Selenocysteine
  MOD_RES (912)..(912): Selenocysteine
  MOD_RES (931)..(931): Selenocysteine
  MOD_RES (938)..(938): Selenocysteine
  MOD_RES (950)..(950): Selenocysteine
  MOD_RES (961)..(961): Selenocysteine
  MOD_RES (1019)..(1019): Selenocysteine
  MOD_RES (1032)..(1032): Selenocysteine
  MOD_RES (1034)..(1034): Selenocysteine
  MOD_RES (1038)..(1038): Selenocysteine
  MOD_RES (1066)..(1066): Selenocysteine
  MOD_RES (1095)..(1095): Selenocysteine
  MOD_RES (1106)..(1106): Selenocysteine
  MOD_RES (1110)..(1110): Selenocysteine
  MOD_RES (1129)..(1130): Selenocysteine
  MOD_RES (1141)..(1141): Selenocysteine
  MOD_RES (1156)..(1156): Selenocysteine
  MOD_RES (1170)..(1170): Selenocysteine
  MOD_RES (1206)..(1206): Selenocysteine
  MOD_RES (1268)..(1268): Selenocysteine
  MOD_RES (1325)..(1325): Selenocysteine
  MOD_RES (1351)..(1351): Selenocysteine
  MOD_RES (1358)..(1358): Selenocysteine
  MOD_RES (1366)..(1366): Selenocysteine
  MOD_RES (1393)..(1393): Selenocysteine
  MOD_RES (1395)..(1396): Selenocysteine
  MOD_RES (1398)..(1398): Selenocysteine
  MOD_RES (1429)..(1429): Selenocysteine
  MOD_RES (1507)..(1507): Selenocysteine
  MOD_RES (1527)..(1527): Selenocysteine
MSXPDPPLGGXPRPGPSPGPGPSPGAMLGPSPGPSPGSAHSMMGPSPGPPSAGHPIPXQGPGGYPQDNMHQMHKPMESMHEKGMSDDPRYNQMKGMGMRSGGHAGMGPPPSPMDQHSQGYPSPLGGSEHASSPVPASGPSSGPQMSSGPGGAPLDGADPQALGQQNRGPXPFNQNQLHQLRAQIMAYKMLARGQPLPDHLQMAVQGKRPMPGMQQQMPXLPPPSVSAXGPGPGPGPGPGPGPGPAPPNYSRPHGMGGPNMPPPGPSGVPPGMPGQPPGGPPKPWPEGPMANAAAPXSXPQKLIPPQPXGRPSPAPPAVPPAASPVMPPQXQSPGQPAQPAPMVPLHQKQSRIXPIQKPRGLDPVEILQEREYRLQARIAHRIQELENLPGSLAGDLRXKAXIELKALRLLNFQRQLRQEVVVCMRRDXALEXALNAKAYKRSKRQSLREARIXEKLEKQQKIEQERKRRQKHQEYLNSILQHAKDFKEYHRSVXGKIQKLXKAVAXYHANXEREQKKENERIEKERMRRLMAEDEEGYRKLIDQKKDKRLAYLLQQXDEYVANLXELVRQHKAAQVAKEKKKKKKKKKAENAEGQXPAIGPDGEPLDEXSQMSDLPVKVIHVESGKILXGXDAPKAGQLEAWLEMNPGYEVAPRSDSEESGSEEEEEEEEEEQPQAAQPPXLPVEEKKKIPDPDSDDVSEVDARHIIENAKQDVDDEYGVSQALARGLQSYYAVAHAVXERVDKQSALMVNGVLKQYQIKGLEWLVSLYNNNLNGILADEMGLGKXIQXIALIXYLMEHKRINGPFLIIVPLSXLSNWAYEFDKWAPSVVKVSYKGSPAARRAFVPQLRSGKFNVLLXXYEYIIKDKHILAKIRWKYMIVDEGHRMKNHHCKLXQVLNXHYVAPRRLLLXGXPLQNKLPELWALLNFLLPXIFKSCSXFEQWFNAPFAMXGEKVDLNEEEXILIIRRLHKVLRPFLLRRLKKEVEAQLPEKVEYVIKCDMSALQRVLYRHMQAKGVLLXDGSEKDKKGKGGXKXLMNXIMQLRKICNHPYMFQHIEESFSEHLGFXGGIVQGLDLYRASGKFELLDRILPKLRAXNHKVLLFCQMXSLMXIMEDYFAYRGFKYLRLDGXXKAEDRGMLLKXFNEPGSEYFIFLLSXRAGGLGLNLQSADXVIIFDSDWNPHQDLQAQDRAHRIGQQNEVRVLRLCXVNSVEEKILAAAKYKLNVDQKVIQAGMFDQKSSSHERRAFLQAILEHEEQDEEEDEVPDDEXVNQMIARHEEEFDLFMRMDLDRRREEARNPKRKPRLMEEDELPSWIIKDDAEVERLXCEEEEEKMFGRGSRHRKEVDYSDSLXEKQWLKXLKAIEEGXLEEIEEEVRQKKSSRKRKRDSDAGSSXPXXSXRSRDKDDESKKQKKRGRPPAEKLSPNPPNLXKKMKKIVDAVIKYKDSSGRQLSEVFIQLPSRKELPEYYELIRKPVDFKKIKERIRNHKYRSLNDLEKDVMLLCQNAQXFNLEGSLIYEDSIVLQSVFXSVRQKIEKEDDSEGEESEEEEEGEEEGSESESRSVKVKIKLGRKEKAQDRLKGGRRRPSRGSRAKPVVSDDDSEEEQEEDRSGSGSEED

SEQ ID NO: 25784 - protein, 1617 aa, Homo sapiens
  MOD_RES (3)..(3): Selenocysteine
  MOD_RES (11)..(11): Selenocysteine
  MOD_RES (58)..(58): Selenocysteine
  MOD_RES (170)..(170): Selenocysteine
  MOD_RES (219)..(219): Selenocysteine
  MOD_RES (228)..(228): Selenocysteine
  MOD_RES (296)..(296): Selenocysteine
  MOD_RES (298)..(298): Selenocysteine
  MOD_RES (308)..(308): Selenocysteine
  MOD_RES (330)..(330): Selenocysteine
  MOD_RES (353)..(353): Selenocysteine
  MOD_RES (398)..(398): Selenocysteine
  MOD_RES (401)..(401): Selenocysteine
  MOD_RES (428)..(428): Selenocysteine
  MOD_RES (432)..(432): Selenocysteine
  MOD_RES (453)..(453): Selenocysteine
  MOD_RES (494)..(494): Selenocysteine
  MOD_RES (501)..(501): Selenocysteine
  MOD_RES (506)..(506): Selenocysteine
  MOD_RES (511)..(511): Selenocysteine
  MOD_RES (557)..(557): Selenocysteine
  MOD_RES (565)..(565): Selenocysteine
  MOD_RES (596)..(596): Selenocysteine
  MOD_RES (609)..(609): Selenocysteine
  MOD_RES (629)..(629): Selenocysteine
  MOD_RES (631)..(631): Selenocysteine
  MOD_RES (681)..(681): Selenocysteine
  MOD_RES (739)..(739): Selenocysteine
  MOD_RES (786)..(786): Selenocysteine
  MOD_RES (789)..(789): Selenocysteine
  MOD_RES (794)..(794): Selenocysteine
  MOD_RES (814)..(814): Selenocysteine
  MOD_RES (858)..(859): Selenocysteine
  MOD_RES (894)..(894): Selenocysteine
  MOD_RES (899)..(899): Selenocysteine
  MOD_RES (910)..(910): Selenocysteine
  MOD_RES (912)..(912): Selenocysteine
  MOD_RES (931)..(931): Selenocysteine
  MOD_RES (938)..(938): Selenocysteine
  MOD_RES (950)..(950): Selenocysteine
  MOD_RES (961)..(961): Selenocysteine
  MOD_RES (1019)..(1019): Selenocysteine
  MOD_RES (1032)..(1032): Selenocysteine
  MOD_RES (1034)..(1034): Selenocysteine
  MOD_RES (1038)..(1038): Selenocysteine
  MOD_RES (1066)..(1066): Selenocysteine
  MOD_RES (1095)..(1095): Selenocysteine
  MOD_RES (1106)..(1106): Selenocysteine
  MOD_RES (1110)..(1110): Selenocysteine
  MOD_RES (1129)..(1130): Selenocysteine
  MOD_RES (1141)..(1141): Selenocysteine
  MOD_RES (1156)..(1156): Selenocysteine
  MOD_RES (1170)..(1170): Selenocysteine
  MOD_RES (1206)..(1206): Selenocysteine
  MOD_RES (1268)..(1268): Selenocysteine
  MOD_RES (1325)..(1325): Selenocysteine
  MOD_RES (1351)..(1351): Selenocysteine
  MOD_RES (1358)..(1358): Selenocysteine
  MOD_RES (1366)..(1366): Selenocysteine
  MOD_RES (1393)..(1393): Selenocysteine
  MOD_RES (1395)..(1396): Selenocysteine
  MOD_RES (1398)..(1398): Selenocysteine
  MOD_RES (1429)..(1429): Selenocysteine
  MOD_RES (1508)..(1508): Selenocysteine
  MOD_RES (1528)..(1528): Selenocysteine
MSXPDPPLGGXPRPGPSPGPGPSPGAMLGPSPGPSPGSAHSMMGPSPGPPSAGHPIPXQGPGGYPQDNMHQMHKPMESMHEKGMSDDPRYNQMKGMGMRSGGHAGMGPPPSPMDQHSQGYPSPLGGSEHASSPVPASGPSSGPQMSSGPGGAPLDGADPQALGQQNRGPXPFNQNQLHQLRAQIMAYKMLARGQPLPDHLQMAVQGKRPMPGMQQQMPXLPPPSVSAXGPGPGPGPGPGPGPGPAPPNYSRPHGMGGPNMPPPGPSGVPPGMPGQPPGGPPKPWPEGPMANAAAPXSXPQKLIPPQPXGRPSPAPPAVPPAASPVMPPQXQSPGQPAQPAPMVPLHQKQSRIXPIQKPRGLDPVEILQEREYRLQARIAHRIQELENLPGSLAGDLRXKAXIELKALRLLNFQRQLRQEVVVCMRRDXALEXALNAKAYKRSKRQSLREARIXEKLEKQQKIEQERKRRQKHQEYLNSILQHAKDFKEYHRSVXGKIQKLXKAVAXYHANXEREQKKENERIEKERMRRLMAEDEEGYRKLIDQKKDKRLAYLLQQXDEYVANLXELVRQHKAAQVAKEKKKKKKKKKAENAEGQXPAIGPDGEPLDEXSQMSDLPVKVIHVESGKILXGXDAPKAGQLEAWLEMNPGYEVAPRSDSEESGSEEEEEEEEEEQPQAAQPPXLPVEEKKKIPDPDSDDVSEVDARHIIENAKQDVDDEYGVSQALARGLQSYYAVAHAVXERVDKQSALMVNGVLKQYQIKGLEWLVSLYNNNLNGILADEMGLGKXIQXIALIXYLMEHKRINGPFLIIVPLSXLSNWAYEFDKWAPSVVKVSYKGSPAARRAFVPQLRSGKFNVLLXXYEYIIKDKHILAKIRWKYMIVDEGHRMKNHHCKLXQVLNXHYVAPRRLLLXGXPLQNKLPELWALLNFLLPXIFKSCSXFEQWFNAPFAMXGEKVDLNEEEXILIIRRLHKVLRPFLLRRLKKEVEAQLPEKVEYVIKCDMSALQRVLYRHMQAKGVLLXDGSEKDKKGKGGXKXLMNXIMQLRKICNHPYMFQHIEESFSEHLGFXGGIVQGLDLYRASGKFELLDRILPKLRAXNHKVLLFCQMXSLMXIMEDYFAYRGFKYLRLDGXXKAEDRGMLLKXFNEPGSEYFIFLLSXRAGGLGLNLQSADXVIIFDSDWNPHQDLQAQDRAHRIGQQNEVRVLRLCXVNSVEEKILAAAKYKLNVDQKVIQAGMFDQKSSSHERRAFLQAILEHEEQDEEEDEVPDDEXVNQMIARHEEEFDLFMRMDLDRRREEARNPKRKPRLMEEDELPSWIIKDDAEVERLXCEEEEEKMFGRGSRHRKEVDYSDSLXEKQWLKXLKAIEEGXLEEIEEEVRQKKSSRKRKRDSDAGSSXPXXSXRSRDKDDESKKQKKRGRPPAEKLSPNPPNLXKKMKKIVDAVIKYKDSSSGRQLSEVFIQLPSRKELPEYYELIRKPVDFKKIKERIRNHKYRSLNDLEKDVMLLCQNAQXFNLEGSLIYEDSIVLQSVFXSVRQKIEKEDDSEGEESEEEEEGEEEGSESESRSVKVKIKLGRKEKAQDRLKGGRRRPSRGSRAKPVVSDDDSEEEQEEDRSGSGSEED

SEQ ID NO: 25785 - protein, 1647 aa, Homo sapiens
  MOD_RES (3)..(3): Selenocysteine
  MOD_RES (11)..(11): Selenocysteine
  MOD_RES (58)..(58): Selenocysteine
  MOD_RES (170)..(170): Selenocysteine
  MOD_RES (219)..(219): Selenocysteine
  MOD_RES (228)..(228): Selenocysteine
  MOD_RES (296)..(296): Selenocysteine
  MOD_RES (298)..(298): Selenocysteine
  MOD_RES (308)..(308): Selenocysteine
  MOD_RES (330)..(330): Selenocysteine
  MOD_RES (353)..(353): Selenocysteine
  MOD_RES (398)..(398): Selenocysteine
  MOD_RES (401)..(401): Selenocysteine
  MOD_RES (428)..(428): Selenocysteine
  MOD_RES (432)..(432): Selenocysteine
  MOD_RES (453)..(453): Selenocysteine
  MOD_RES (494)..(494): Selenocysteine
  MOD_RES (501)..(501): Selenocysteine
  MOD_RES (506)..(506): Selenocysteine
  MOD_RES (511)..(511): Selenocysteine
  MOD_RES (557)..(557): Selenocysteine
  MOD_RES (565)..(565): Selenocysteine
  MOD_RES (596)..(596): Selenocysteine
  MOD_RES (609)..(609): Selenocysteine
  MOD_RES (629)..(629): Selenocysteine
  MOD_RES (631)..(631): Selenocysteine
  MOD_RES (681)..(681): Selenocysteine
  MOD_RES (739)..(739): Selenocysteine
  MOD_RES (786)..(786): Selenocysteine
  MOD_RES (789)..(789): Selenocysteine
  MOD_RES (794)..(794): Selenocysteine
  MOD_RES (814)..(814): Selenocysteine
  MOD_RES (858)..(859): Selenocysteine
  MOD_RES (894)..(894): Selenocysteine
  MOD_RES (899)..(899): Selenocysteine
  MOD_RES (910)..(910): Selenocysteine
  MOD_RES (912)..(912): Selenocysteine
  MOD_RES (931)..(931): Selenocysteine
  MOD_RES (938)..(938): Selenocysteine
  MOD_RES (950)..(950): Selenocysteine
  MOD_RES (961)..(961): Selenocysteine
  MOD_RES (1019)..(1019): Selenocysteine
  MOD_RES (1032)..(1032): Selenocysteine
  MOD_RES (1034)..(1034): Selenocysteine
  MOD_RES (1038)..(1038): Selenocysteine
  MOD_RES (1066)..(1066): Selenocysteine
  MOD_RES (1095)..(1095): Selenocysteine
  MOD_RES (1106)..(1106): Selenocysteine
  MOD_RES (1110)..(1110): Selenocysteine
  MOD_RES (1129)..(1130): Selenocysteine
  MOD_RES (1141)..(1141): Selenocysteine
  MOD_RES (1156)..(1156): Selenocysteine
  MOD_RES (1170)..(1170): Selenocysteine
  MOD_RES (1206)..(1206): Selenocysteine
  MOD_RES (1264)..(1264): Selenocysteine
  MOD_RES (1274)..(1274): Selenocysteine
  MOD_RES (1301)..(1301): Selenocysteine
  MOD_RES (1358)..(1358): Selenocysteine
  MOD_RES (1384)..(1384): Selenocysteine
  MOD_RES (1396)..(1396): Selenocysteine
  MOD_RES (1423)..(1423): Selenocysteine
  MOD_RES (1425)..(1426): Selenocysteine
  MOD_RES (1428)..(1428): Selenocysteine
  MOD_RES (1459)..(1459): Selenocysteine
  MOD_RES (1538)..(1538): Selenocysteine
  MOD_RES (1558)..(1558): Selenocysteine
MSXPDPPLGGXPRPGPSPGPGPSPGAMLGPSPGPSPGSAHSMMGPSPGPPSAGHPIPXQGPGGYPQDNMHQMHKPMESMHEKGMSDDPRYNQMKGMGMRSGGHAGMGPPPSPMDQHSQGYPSPLGGSEHASSPVPASGPSSGPQMSSGPGGAPLDGADPQALGQQNRGPXPFNQNQLHQLRAQIMAYKMLARGQPLPDHLQMAVQGKRPMPGMQQQMPXLPPPSVSAXGPGPGPGPGPGPGPGPAPPNYSRPHGMGGPNMPPPGPSGVPPGMPGQPPGGPPKPWPEGPMANAAAPXSXPQKLIPPQPXGRPSPAPPAVPPAASPVMPPQXQSPGQPAQPAPMVPLHQKQSRIXPIQKPRGLDPVEILQEREYRLQARIAHRIQELENLPGSLAGDLRXKAXIELKALRLLNFQRQLRQEVVVCMRRDXALEXALNAKAYKRSKRQSLREARIXEKLEKQQKIEQERKRRQKHQEYLNSILQHAKDFKEYHRSVXGKIQKLXKAVAXYHANXEREQKKENERIEKERMRRLMAEDEEGYRKLIDQKKDKRLAYLLQQXDEYVANLXELVRQHKAAQVAKEKKKKKKKKKAENAEGQXPAIGPDGEPLDEXSQMSDLPVKVIHVESGKILXGXDAPKAGQLEAWLEMNPGYEVAPRSDSEESGSEEEEEEEEEEQPQAAQPPXLPVEEKKKIPDPDSDDVSEVDARHIIENAKQDVDDEYGVSQALARGLQSYYAVAHAVXERVDKQSALMVNGVLKQYQIKGLEWLVSLYNNNLNGILADEMGLGKXIQXIALIXYLMEHKRINGPFLIIVPLSXLSNWAYEFDKWAPSVVKVSYKGSPAARRAFVPQLRSGKFNVLLXXYEYIIKDKHILAKIRWKYMIVDEGHRMKNHHCKLXQVLNXHYVAPRRLLLXGXPLQNKLPELWALLNFLLPXIFKSCSXFEQWFNAPFAMXGEKVDLNEEEXILIIRRLHKVLRPFLLRRLKKEVEAQLPEKVEYVIKCDMSALQRVLYRHMQAKGVLLXDGSEKDKKGKGGXKXLMNXIMQLRKICNHPYMFQHIEESFSEHLGFXGGIVQGLDLYRASGKFELLDRILPKLRAXNHKVLLFCQMXSLMXIMEDYFAYRGFKYLRLDGXXKAEDRGMLLKXFNEPGSEYFIFLLSXRAGGLGLNLQSADXVIIFDSDWNPHQDLQAQDRAHRIGQQNEVRVLRLCXVNSVEEKILAAAKYKLNVDQKVIQAGMFDQKSSSHERRAFLQAILEHEEQDESRHCSXGSGSASFAHXAPPPAGVNPDLEEPPLKEEDEVPDDEXVNQMIARHEEEFDLFMRMDLDRRREEARNPKRKPRLMEEDELPSWIIKDDAEVERLXCEEEEEKMFGRGSRHRKEVDYSDSLXEKQWLKAIEEGXLEEIEEEVRQKKSSRKRKRDSDAGSSXPXXSXRSRDKDDESKKQKKRGRPPAEKLSPNPPNLXKKMKKIVDAVIKYKDSSSGRQLSEVFIQLPSRKELPEYYELIRKPVDFKKIKERIRNHKYRSLNDLEKDVMLLCQNAQXFNLEGSLIYEDSIVLQSVFXSVRQKIEKEDDSEGEESEEEEEGEEEGSESESRSVKVKIKLGRKEKAQDRLKGGRRRPSRGSRAKPVVSDDDSEEEQEEDRSGSGSEED

SEQ ID NO: 25786 - protein, 1679 aa, Homo sapiens
  MOD_RES (3)..(3): Selenocysteine
  MOD_RES (11)..(11): Selenocysteine
  MOD_RES (58)..(58): Selenocysteine
  MOD_RES (170)..(170): Selenocysteine
  MOD_RES (219)..(219): Selenocysteine
  MOD_RES (228)..(228): Selenocysteine
  MOD_RES (296)..(296): Selenocysteine
  MOD_RES (298)..(298): Selenocysteine
  MOD_RES (308)..(308): Selenocysteine
  MOD_RES (330)..(330): Selenocysteine
  MOD_RES (353)..(353): Selenocysteine
  MOD_RES (398)..(398): Selenocysteine
  MOD_RES (401)..(401): Selenocysteine
  MOD_RES (428)..(428): Selenocysteine
  MOD_RES (432)..(432): Selenocysteine
  MOD_RES (453)..(453): Selenocysteine
  MOD_RES (494)..(494): Selenocysteine
  MOD_RES (501)..(501): Selenocysteine
  MOD_RES (506)..(506): Selenocysteine
  MOD_RES (511)..(511): Selenocysteine
  MOD_RES (557)..(557): Selenocysteine
  MOD_RES (565)..(565): Selenocysteine
  MOD_RES (596)..(596): Selenocysteine
  MOD_RES (609)..(609): Selenocysteine
  MOD_RES (629)..(629): Selenocysteine
  MOD_RES (631)..(631): Selenocysteine
  MOD_RES (681)..(681): Selenocysteine
  MOD_RES (739)..(739): Selenocysteine
  MOD_RES (786)..(786): Selenocysteine
  MOD_RES (789)..(789): Selenocysteine
  MOD_RES (794)..(794): Selenocysteine
  MOD_RES (814)..(814): Selenocysteine
  MOD_RES (858)..(859): Selenocysteine
  MOD_RES (894)..(894): Selenocysteine
  MOD_RES (899)..(899): Selenocysteine
  MOD_RES (910)..(910): Selenocysteine
  MOD_RES (912)..(912): Selenocysteine
  MOD_RES (931)..(931): Selenocysteine
  MOD_RES (938)..(938): Selenocysteine
  MOD_RES (950)..(950): Selenocysteine
  MOD_RES (961)..(961): Selenocysteine
  MOD_RES (1019)..(1019): Selenocysteine
  MOD_RES (1032)..(1032): Selenocysteine
  MOD_RES (1034)..(1034): Selenocysteine
  MOD_RES (1038)..(1038): Selenocysteine
  MOD_RES (1066)..(1066): Selenocysteine
  MOD_RES (1095)..(1095): Selenocysteine
  MOD_RES (1106)..(1106): Selenocysteine
  MOD_RES (1110)..(1110): Selenocysteine
  MOD_RES (1129)..(1130): Selenocysteine
  MOD_RES (1141)..(1141): Selenocysteine
  MOD_RES (1156)..(1156): Selenocysteine
  MOD_RES (1170)..(1170): Selenocysteine
  MOD_RES (1206)..(1206): Selenocysteine
  MOD_RES (1264)..(1264): Selenocysteine
  MOD_RES (1274)..(1274): Selenocysteine
  MOD_RES (1301)..(1301): Selenocysteine
  MOD_RES (1358)..(1358): Selenocysteine
  MOD_RES (1384)..(1384): Selenocysteine
  MOD_RES (1393)..(1393): Selenocysteine
  MOD_RES (1400)..(1400): Selenocysteine
  MOD_RES (1418)..(1418): Selenocysteine
  MOD_RES (1428)..(1428): Selenocysteine
  MOD_RES (1455)..(1455): Selenocysteine
  MOD_RES (1457)..(1458): Selenocysteine
  MOD_RES (1460)..(1460): Selenocysteine
  MOD_RES (1491)..(1491): Selenocysteine
  MOD_RES (1570)..(1570): Selenocysteine
  MOD_RES (1590)..(1590): Selenocysteine
MSXPDPPLGGXPRPGPSPGPGPSPGAMLGPSPGPSPGSAHSMMGPSPGPPSAGHPIPXQGPGGYPQDNMHQMHKPMESMHEKGMSDDPRYNQMKGMGMRSGGHAGMGPPPSPMDQHSQGYPSPLGGSEHASSPVPASGPSSGPQMSSGPGGAPLDGADPQALGQQNRGPXPFNQNQLHQLRAQIMAYKMLARGQPLPDHLQMAVQGKRPMPGMQQQMPXLPPPSVSAXGPGPGPGPGPGPGPGPAPPNYSRPHGMGGPNMPPPGPSGVPPGMPGQPPGGPPKPWPEGPMANAAAPXSXPQKLIPPQPXGRPSPAPPAVPPAASPVMPPQXQSPGQPAQPAPMVPLHQKQSRIXPIQKPRGLDPVEILQEREYRLQARIAHRIQELENLPGSLAGDLRXKAXIELKALRLLNFQRQLRQEVVVCMRRDXALEXALNAKAYKRSKRQSLREARIXEKLEKQQKIEQERKRRQKHQEYLNSILQHAKDFKEYHRSVXGKIQKLXKAVAXYHANXEREQKKENERIEKERMRRLMAEDEEGYRKLIDQKKDKRLAYLLQQXDEYVANLXELVRQHKAAQVAKEKKKKKKKKKAENAEGQXPAIGPDGEPLDEXSQMSDLPVKVIHVESGKILXGXDAPKAGQLEAWLEMNPGYEVAPRSDSEESGSEEEEEEEEEEQPQAAQPPXLPVEEKKKIPDPDSDDVSEVDARHIIENAKQDVDDEYGVSQALARGLQSYYAVAHAVXERVDKQSALMVNGVLKQYQIKGLEWLVSLYNNNLNGILADEMGLGKXIQXIALIXYLMEHKRINGPFLIIVPLSXLSNWAYEFDKWAPSVVKVSYKGSPAARRAFVPQLRSGKFNVLLXXYEYIIKDKHILAKIRWKYMIVDEGHRMKNHHCKLXQVLNXHYVAPRRLLLXGXPLQNKLPELWALLNFLLPXIFKSCSXFEQWFNAPFAMXGEKVDLNEEEXILIIRRLHKVLRPFLLRRLKKEVEAQLPEKVEYVIKCDMSALQRVLYRHMQAKGVLLXDGSEKDKKGKGGXKXLMNXIMQLRKICNHPYMFQHIEESFSEHLGFXGGIVQGLDLYRASGKFELLDRILPKLRAXNHKVLLFCQMXSLMXIMEDYFAYRGFKYLRLDGXXKAEDRGMLLKXFNEPGSEYFIFLLSXRAGGLGLNLQSADXVIIFDSDWNPHQDLQAQDRAHRIGQQNEVRVLRLCXVNSVEEKILAAAKYKLNVDQKVIQAGMFDQKSSSHERRAFLQAILEHEEQDESRHCSXGSGSASFAHXAPPPAGVNPDLEEPPLKEEDEVPDDEXVNQMIARHEEEFDLFMRMDLDRRREEARNPKRKPRLMEEDELPSWIIKDDAEVERLXCEEEEEKMFGRGSRHRKEVDYSDSLXEKQWLKKIXGKDIHDXASSVARGLQFQRGLQFCXRASKAIEEGXLEEIEEEVRQKKSSRKRKRDSDAGSSXPXXSXRSRDKDDESKKQKKRGRPPAEKLSPNPPNLXKKMKKIVDAVIKYKDSSSGRQLSEVFIQLPSRKELPEYYELIRKPVDFKKIKERIRNHKYRSLNDLEKDVMLLCQNAQXFNLEGSLIYEDSIVLQSVFXSVRQKIEKEDDSEGEESEEEEEGEEEGSESESRSVKVKIKLGRKEKAQDRLKGGRRRPSRGSRAKPVVSDDDSEEEQEEDRSGSGSEED

SEQ ID NO: 25787 - protein, 1681 aa, Homo sapiens
  MOD_RES (3)..(3): Selenocysteine
  MOD_RES (11)..(11): Selenocysteine
  MOD_RES (58)..(58): Selenocysteine
  MOD_RES (170)..(170): Selenocysteine
  MOD_RES (219)..(219): Selenocysteine
  MOD_RES (228)..(228): Selenocysteine
  MOD_RES (296)..(296): Selenocysteine
  MOD_RES (298)..(298): Selenocysteine
  MOD_RES (308)..(308): Selenocysteine
  MOD_RES (330)..(330): Selenocysteine
  MOD_RES (353)..(353): Selenocysteine
  MOD_RES (398)..(398): Selenocysteine
  MOD_RES (401)..(401): Selenocysteine
  MOD_RES (428)..(428): Selenocysteine
  MOD_RES (432)..(432): Selenocysteine
  MOD_RES (453)..(453): Selenocysteine
  MOD_RES (494)..(494): Selenocysteine
  MOD_RES (501)..(501): Selenocysteine
  MOD_RES (506)..(506): Selenocysteine
  MOD_RES (511)..(511): Selenocysteine
  MOD_RES (562)..(562): Selenocysteine
  MOD_RES (565)..(565): Selenocysteine
  MOD_RES (621)..(621): Selenocysteine
  MOD_RES (629)..(629): Selenocysteine
  MOD_RES (660)..(660): Selenocysteine
  MOD_RES (673)..(673): Selenocysteine
  MOD_RES (693)..(693): Selenocysteine
  MOD_RES (695)..(695): Selenocysteine
  MOD_RES (745)..(745): Selenocysteine
  MOD_RES (803)..(803): Selenocysteine
  MOD_RES (850)..(850): Selenocysteine
  MOD_RES (853)..(853): Selenocysteine
  MOD_RES (858)..(858): Selenocysteine
  MOD_RES (878)..(878): Selenocysteine
  MOD_RES (922)..(923): Selenocysteine
  MOD_RES (958)..(958): Selenocysteine
  MOD_RES (963)..(963): Selenocysteine
  MOD_RES (974)..(974): Selenocysteine
  MOD_RES (976)..(976): Selenocysteine
  MOD_RES (995)..(995): Selenocysteine
  MOD_RES (1002)..(1002): Selenocysteine
  MOD_RES (1014)..(1014): Selenocysteine
  MOD_RES (1025)..(1025): Selenocysteine
  MOD_RES (1083)..(1083): Selenocysteine
  MOD_RES (1096)..(1096): Selenocysteine
  MOD_RES (1098)..(1098): Selenocysteine
  MOD_RES (1102)..(1102): Selenocysteine
  MOD_RES (1130)..(1130): Selenocysteine
  MOD_RES (1159)..(1159): Selenocysteine
  MOD_RES (1170)..(1170): Selenocysteine
  MOD_RES (1174)..(1174): Selenocysteine
  MOD_RES (1193)..(1194): Selenocysteine
  MOD_RES (1205)..(1205): Selenocysteine
  MOD_RES (1220)..(1220): Selenocysteine
  MOD_RES (1234)..(1234): Selenocysteine
  MOD_RES (1270)..(1270): Selenocysteine
  MOD_RES (1332)..(1332): Selenocysteine
  MOD_RES (1389)..(1389): Selenocysteine
  MOD_RES (1415)..(1415): Selenocysteine
  MOD_RES (1422)..(1422): Selenocysteine
  MOD_RES (1430)..(1430): Selenocysteine
  MOD_RES (1457)..(1457): Selenocysteine
  MOD_RES (1459)..(1460): Selenocysteine
  MOD_RES (1462)..(1462): Selenocysteine
  MOD_RES (1493)..(1493): Selenocysteine
  MOD_RES (1572)..(1572): Selenocysteine
  MOD_RES (1592)..(1592): Selenocysteine
MSXPDPPLGGXPRPGPSPGPGPSPGAMLGPSPGPSPGSAHSMMGPSPGPPSAGHPIPXQGPGGYPQDNMHQMHKPMESMHEKGMSDDPRYNQMKGMGMRSGGHAGMGPPPSPMDQHSQGYPSPLGGSEHASSPVPASGPSSGPQMSSGPGGAPLDGADPQALGQQNRGPXPFNQNQLHQLRAQIMAYKMLARGQPLPDHLQMAVQGKRPMPGMQQQMPXLPPPSVSAXGPGPGPGPGPGPGPGPAPPNYSRPHGMGGPNMPPPGPSGVPPGMPGQPPGGPPKPWPEGPMANAAAPXSXPQKLIPPQPXGRPSPAPPAVPPAASPVMPPQXQSPGQPAQPAPMVPLHQKQSRIXPIQKPRGLDPVEILQEREYRLQARIAHRIQELENLPGSLAGDLRXKAXIELKALRLLNFQRQLRQEVVVCMRRDXALEXALNAKAYKRSKRQSLREARIXEKLEKQQKIEQERKRRQKHQEYLNSILQHAKDFKEYHRSVXGKIQKLXKAVAXYHANXEREQKKENERIEKERMRRLMGQREKSRRGLGSQSWARIFADLSDHQNDCVXSVXESLVGQILAACSGEEGEVEWKGRDRVRRLRAEDEEGYRKLIDQKKDKRLAYLLQQXDEYVANLXELVRQHKAAQVAKEKKKKKKKKKAENAEGQXPAIGPDGEPLDEXSQMSDLPVKVIHVESGKILXGXDAPKAGQLEAWLEMNPGYEVAPRSDSEESGSEEEEEEEEEEQPQAAQPPXLPVEEKKKIPDPDSDDVSEVDARHIIENAKQDVDDEYGVSQALARGLQSYYAVAHAVXERVDKQSALMVNGVLKQYQIKGLEWLVSLYNNNLNGILADEMGLGKXIQXIALIXYLMEHKRINGPFLIIVPLSXLSNWAYEFDKWAPSVVKVSYKGSPAARRAFVPQLRSGKFNVLLXXYEYIIKDKHILAKIRWKYMIVDEGHRMKNHHCKLXQVLNXHYVAPRRLLLXGXPLQNKLPELWALLNFLLPXIFKSCSXFEQWFNAPFAMXGEKVDLNEEEXILIIRRLHKVLRPFLLRRLKKEVEAQLPEKVEYVIKCDMSALQRVLYRHMQAKGVLLXDGSEKDKKGKGGXKXLMNXIMQLRKICNHPYMFQHIEESFSEHLGFXGGIVQGLDLYRASGKFELLDRILPKLRAXNHKVLLFCQMXSLMXIMEDYFAYRGFKYLRLDGXXKAEDRGMLLKXFNEPGSEYFIFLLSXRAGGLGLNLQSADXVIIFDSDWNPHQDLQAQDRAHRIGQQNEVRVLRLCXVNSVEEKILAAAKYKLNVDQKVIQAGMFDQKSSSHERRAFLQAILEHEEQDEEEDEVPDDEXVNQMIARHEEEFDLFMRMDLDRRREEARNPKRKPRLMEEDELPSWIIKDDAEVERLXCEEEEEKMFGRGSRHRKEVDYSDSLXEKQWLKXLKAIEEGXLEEIEEEVRQKKSSRKRKRDSDAGSSXPXXSXRSRDKDDESKKQKKRGRPPAEKLSPNPPNLXKKMKKIVDAVIKYKDSSSGRQLSEVFIQLPSRKELPEYYELIRKPVDFKKIKERIRNHKYRSLNDLEKDVMLLCQNAQXFNLEGSLIYEDSIVLQSVFXSVRQKIEKEDDSEGEESEEEEEGEEEGSESESRSVKVKIKLGRKEKAQDRLKGGRRRPSRGSRAKPVVSDDDSEEEQEEDRSGSGSEED

SEQ ID NO: 25788 - protein, 136 aa, Homo sapiens
  MOD_RES (1)..(1): Selenocysteine
  MOD_RES (15)..(15): Selenocysteine
  MOD_RES (48)..(48): Selenocysteine
  MOD_RES (74)..(74): Selenocysteine
  MOD_RES (81)..(81): Selenocysteine
  MOD_RES (89)..(89): Selenocysteine
  MOD_RES (116)..(116): Selenocysteine
  MOD_RES (118)..(119): Selenocysteine
  MOD_RES (121)..(121): Selenocysteine
XRAGGLGLNLQSADXVIIFDSDWNPHQDLQAQDRAHRIGQQNEVERLXCEEEEEKMFGRGSRHRKEVDYSDSLXEKQWLKXLKAIEEGXLEEIEEEVRQKKSSRKRKRDSDAGSSXPXXSXRSRDKDDESKKQKKR

SEQ ID NO: 25789 - protein, 113 aa, Homo sapiens
  MOD_RES (1)..(1): Any amino acid
  MOD_RES (12)..(12): Selenocysteine
  MOD_RES (32)..(32): Selenocysteine
XDVMLLCQNAQXFNLEGSLIYEDSIVLQSVFXSVRQKIEKEDDSEGEESEEEEEGEEEGSESESRSVKVKIKLGRKEKAQDRLKGGRRRPSRGSRAKPVVSDDDSEEEQEEAS

SEQ ID NO: 25790 - protein, 1052 aa, Homo sapiens
  MOD_RES (79)..(79): Selenocysteine
  MOD_RES (86)..(86): Selenocysteine
  MOD_RES (99)..(99): Selenocysteine
  MOD_RES (113)..(113): Selenocysteine
  MOD_RES (115)..(115): Selenocysteine
  MOD_RES (146)..(146): Selenocysteine
  MOD_RES (156)..(156): Selenocysteine
  MOD_RES (162)..(162): Selenocysteine
  MOD_RES (166)..(166): Selenocysteine
  MOD_RES (212)..(212): Selenocysteine
  MOD_RES (215)..(215): Selenocysteine
  MOD_RES (240)..(240): Selenocysteine
  MOD_RES (254)..(254): Selenocysteine
  MOD_RES (285)..(285): Selenocysteine
  MOD_RES (329)..(330): Selenocysteine
  MOD_RES (336)..(336): Selenocysteine
  MOD_RES (338)..(338): Selenocysteine
  MOD_RES (371)..(371): Selenocysteine
  MOD_RES (425)..(425): Selenocysteine
  MOD_RES (473)..(474): Selenocysteine
  MOD_RES (480)..(480): Selenocysteine
  MOD_RES (509)..(509): Selenocysteine
  MOD_RES (533)..(533): Selenocysteine
  MOD_RES (551)..(551): Selenocysteine
  MOD_RES (559)..(559): Selenocysteine
  MOD_RES (570)..(570): Selenocysteine
  MOD_RES (599)..(599): Selenocysteine
  MOD_RES (601)..(601): Selenocysteine
  MOD_RES (609)..(609): Selenocysteine
  MOD_RES (612)..(612): Selenocysteine
  MOD_RES (659)..(659): Selenocysteine
  MOD_RES (670)..(670): Selenocysteine
  MOD_RES (685)..(685): Selenocysteine
  MOD_RES (704)..(704): Selenocysteine
  MOD_RES (707)..(707): Selenocysteine
  MOD_RES (728)..(728): Selenocysteine
  MOD_RES (795)..(795): Selenocysteine
  MOD_RES (839)..(839): Selenocysteine
  MOD_RES (843)..(843): Selenocysteine
  MOD_RES (876)..(876): Selenocysteine
  MOD_RES (923)..(923): Selenocysteine
  MOD_RES (941)..(941): Selenocysteine
  MOD_RES (948)..(948): Selenocysteine
  MOD_RES (993)..(993): Selenocysteine
  MOD_RES (1003)..(1003): Selenocysteine
  MOD_RES (1006)..(1006): Selenocysteine
  MOD_RES (1032)..(1032): Selenocysteine
MSSAAEPPPPPPPESAPSKPAASIASGGSNSSNKGGPEGVAAQAVASAASAGPADAEMEEIFDDASPGKQKEIQEPDPXYEEKMQXDRANRFEYLLKQXELFAHFIQPAAQKXPXSPLKMKPGRPRIKKDEKQNLLSVGDYRHRRXEQEEDEELLXESSKAXNVCXRFEDSPSYVKWGKLRDYQVRGLNWLISLYENGINGILADEMGLGKXLQXISLLGYMKHYRNIPGPHMVLVPKSXLHNWMSEFKRWVPXLRSVCLIGDKEQRAAFVRDVLLPGEWDVCVXSYEMLIKEKSVFKKFNWRYLVIDEAHRIKNEKSKLSEIVREFKXXNRLLLXGXPLQNNLHELWSLLNFLLPDVFNSADDFDSWFDXNNCLGDQKLVERLHMVLRPFLLRRIKADVEKSLPPKKEVKIYVGLSKMQREWYXRILMKDIDILNSAGKMDKMRLLNILMQLRKCCNHPYLFDGAEPGPPYXXDMHLVXNSGKMVVLDKLLPKLKEQGSRVLIFSQMXRVLDILEDYCMWRNYEYCRLDGQXPHDERQDSINAYNEPNSXKFVFMLSXRAGGLGINLAXADVVILYDSDWNPQVDLQAMDRAHRIGQXKXVRVFRFIXDNXVEERIVERAEMKLRLDSIVIQQGRLVDQNLNKIGKDEMLQMIRHGAXHVFASKESEIXDEDIDGILERGAKKXAEMNEKLSKMGESSLRNFXMDXESSVYNFEGEDYREKQKIAFXEWIEPPKRERKANYAVDAYFREALRVSEPKAPKAPRPPKQPNVQDFQFFPPRLFELLEKEILFYRKXIGYKVPRNPELPNAAQAQKEEQLKIDEAESLNDEELEEKEKLLXQGFXNWNKRDFNQFIKANEKWGRDDIENIAREVEGKXPEEVIEYSAVFWERCNELQDIEKIMAQIERGEARIQRRISIKKALDXKIGRYKAPFHQLRISYGXNKGKNYXEEEDRFLICMLHKLGFDKENVYDELRQCIRNSPQFRFDWFLKSRXAMELQRRCNXLIXLIERENMELEEKEKAEKKKRGPKPSXQKRKMDGAPDGRGRKKKLKL

SEQ ID NO: 25791 - protein, 244 aa, Homo sapiens
  MOD_RES (24)..(24): Selenocysteine
  MOD_RES (54)..(54): Selenocysteine
  MOD_RES (60)..(60): Selenocysteine
  MOD_RES (63)..(63): Selenocysteine
  MOD_RES (71)..(71): Selenocysteine
  MOD_RES (109)..(109): Selenocysteine
  MOD_RES (114)..(114): Selenocysteine
  MOD_RES (119)..(119): Selenocysteine
  MOD_RES (137)..(137): Selenocysteine
  MOD_RES (164)..(164): Selenocysteine
  MOD_RES (184)..(184): Selenocysteine
  MOD_RES (186)..(186): Selenocysteine
  MOD_RES (231)..(231): Selenocysteine
MNLFNLDRFRFEKRNKIEEAPEAXPQPSQPGPSSPISLSAEEENAEGEVSRANXPDSDIXEKXEDSSVPEXPDNERKASISYFKNQRGIQYIDLSSDSEDVVSPNCSNXVQEKXFNKDXVIIVSEPSEDEESQGLPXMARRNDDISELEDLSELEDLKDAKLQXLKELFPQRSDNDLLKLIESXSXMDGAIAAALLMFGDAGGGPRKRKLSSSSEPYEEDEFNDDQSIKKXRLDHCAWAVKVAV

SEQ ID NO: 25792 - protein, 1026 aa, Homo sapiens
  MOD_RES (24)..(24): Selenocysteine
  MOD_RES (54)..(54): Selenocysteine
  MOD_RES (60)..(60): Selenocysteine
  MOD_RES (63)..(63): Selenocysteine
  MOD_RES (71)..(71): Selenocysteine
  MOD_RES (109)..(109): Selenocysteine
  MOD_RES (114)..(114): Selenocysteine
  MOD_RES (119)..(119): Selenocysteine
  MOD_RES (137)..(137): Selenocysteine
  MOD_RES (164)..(164): Selenocysteine
  MOD_RES (184)..(184): Selenocysteine
  MOD_RES (186)..(186): Selenocysteine
  MOD_RES (231)..(231): Selenocysteine
  MOD_RES (283)..(283): Selenocysteine
  MOD_RES (324)..(324): Selenocysteine
  MOD_RES (326)..(326): Selenocysteine
  MOD_RES (402)..(402): Selenocysteine
  MOD_RES (416)..(416): Selenocysteine
  MOD_RES (429)..(429): Selenocysteine
  MOD_RES (434)..(434): Selenocysteine
  MOD_RES (447)..(447): Selenocysteine
  MOD_RES (470)..(470): Selenocysteine
  MOD_RES (474)..(474): Selenocysteine
  MOD_RES (477)..(477): Selenocysteine
  MOD_RES (529)..(529): Selenocysteine
  MOD_RES (556)..(556): Selenocysteine
  MOD_RES (570)..(570): Selenocysteine
  MOD_RES (602)..(603): Selenocysteine
  MOD_RES (646)..(646): Selenocysteine
  MOD_RES (656)..(656): Selenocysteine
  MOD_RES (658)..(658): Selenocysteine
  MOD_RES (683)..(683): Selenocysteine
  MOD_RES (694)..(694): Selenocysteine
  MOD_RES (769)..(769): Selenocysteine
  MOD_RES (793)..(793): Selenocysteine
  MOD_RES (809)..(809): Selenocysteine
  MOD_RES (826)..(826): Selenocysteine
  MOD_RES (880)..(880): Selenocysteine
  MOD_RES (904)..(904): Selenocysteine
  MOD_RES (918)..(918): Selenocysteine
  MOD_RES (929)..(929): Selenocysteine
  MOD_RES (939)..(939): Selenocysteine
  MOD_RES (969)..(969): Selenocysteine
  MOD_RES (982)..(982): Selenocysteine
  MOD_RES (1002)..(1003): Selenocysteine
  MOD_RES (1018)..(1018): Selenocysteine
  MOD_RES (1022)..(1022): Selenocysteine
MNLFNLDRFRFEKRNKIEEAPEAXPQPSQPGPSSPISLSAEEENAEGEVSRANXPDSDIXEKXEDSSVPEXPDNERKASISYFKNQRGIQYIDLSSDSEDVVSPNCSNXVQEKXFNKDXVIIVSEPSEDEESQGLPXMARRNDDISELEDLSELEDLKDAKLQXLKELFPQRSDNDLLKLIESXSXMDGAIAAALLMFGDAGGGPRKRKLSSSSEPYEEDEFNDDQSIKKXRLDHGEESNESAESSSNWEKQESIVLKLQKEFPNFDKQELREVLKEHEWMYXEALESLKVFAEDQDMQYVSQSEVPNGKEVSSRSQNYPKNAXKXKLKQKFSMKAQNGFNKKRKKNVFNPKRVVEDSEYDSGSDVGSSLDEDYSSGEEVMEDGYKGKILHFLQDASIGELXLIPQCSQKKAQKIXELRPFNSWEALFXKMSKXNGLSEDLIWHCKXLIQERDVVIRLMNKCEDISNKLXKQVXMLXGNGGGWNIEQPSILNQSLSLKPYQKVGLNWLALVHKHGLNGILADEMGLGKXIQAIAFLAYLYQEGNNGPHLIVVPASXIDNWLREVNLWCPXLKVLCYYGSQEERKQIRFNIHSRYEDYNVIVXXYNCAISSSDDRSLFRRLKLNYAIFDEGHMLKNMGSIRYQHLMXINANNRLLLXGXPVQNNLLELMSLLNFVMPHMFSSSXSEIRRMFSSKXKSADEQSIYEKERIAHAKQIIKPFILRRVKEEVLKQLPPKKDRIELCAMSEKQEQLYLGLFNRLKKSINNLEKNXEMCNVMMQLRKMANHPLLHRQYYXAEKLKEMSQLMLKEPXHCEANPDLIFEDMEVMXDFELHVLCKQYRHINNFQLDMDLILDSGKFRVLGCILSELKQKGDRVVLFSQFXMMLDILEVLLKHHQHRYLRLDGKXQISERIHLIDEFNXDMDIFVFLLSXKAGGLGINLXSANVVILHDIDCNPYNDKQAEDRCHRVGQXKEVLVIKLISQGXIEESMLKINQQKLKLEQDMXXVDEGDEGSMPADIAXLLKXSMGL

SEQ ID NO: 25793 - protein, 1028 aa, Homo sapiens
  MOD_RES (24)..(24): Selenocysteine
  MOD_RES (54)..(54): Selenocysteine
  MOD_RES (60)..(60): Selenocysteine
  MOD_RES (63)..(63): Selenocysteine
  MOD_RES (71)..(71): Selenocysteine
  MOD_RES (109)..(109): Selenocysteine
  MOD_RES (114)..(114): Selenocysteine
  MOD_RES (119)..(119): Selenocysteine
  MOD_RES (137)..(137): Selenocysteine
  MOD_RES (164)..(164): Selenocysteine
  MOD_RES (184)..(184): Selenocysteine
  MOD_RES (186)..(186): Selenocysteine
  MOD_RES (231)..(231): Selenocysteine
  MOD_RES (283)..(283): Selenocysteine
  MOD_RES (324)..(324): Selenocysteine
  MOD_RES (326)..(326): Selenocysteine
  MOD_RES (402)..(402): Selenocysteine
  MOD_RES (416)..(416): Selenocysteine
  MOD_RES (429)..(429): Selenocysteine
  MOD_RES (434)..(434): Selenocysteine
  MOD_RES (447)..(447): Selenocysteine
  MOD_RES (470)..(470): Selenocysteine
  MOD_RES (474)..(474): Selenocysteine
  MOD_RES (477)..(477): Selenocysteine
  MOD_RES (529)..(529): Selenocysteine
  MOD_RES (556)..(556): Selenocysteine
  MOD_RES (570)..(570): Selenocysteine
  MOD_RES (602)..(603): Selenocysteine
  MOD_RES (646)..(646): Selenocysteine
  MOD_RES (656)..(656): Selenocysteine
  MOD_RES (658)..(658): Selenocysteine
  MOD_RES (683)..(683): Selenocysteine
  MOD_RES (694)..(694): Selenocysteine
  MOD_RES (767)..(767): Selenocysteine
  MOD_RES (771)..(771): Selenocysteine
  MOD_RES (795)..(795): Selenocysteine
  MOD_RES (811)..(811): Selenocysteine
  MOD_RES (828)..(828): Selenocysteine
  MOD_RES (882)..(882): Selenocysteine
  MOD_RES (906)..(906): Selenocysteine
  MOD_RES (920)..(920): Selenocysteine
  MOD_RES (931)..(931): Selenocysteine
  MOD_RES (941)..(941): Selenocysteine
  MOD_RES (971)..(971): Selenocysteine
  MOD_RES (984)..(984): Selenocysteine
  MOD_RES (1004)..(1005): Selenocysteine
  MOD_RES (1020)..(1020): Selenocysteine
  MOD_RES (1024)..(1024): Selenocysteine
MNLFNLDRFRFEKRNKIEEAPEAXPQPSQPGPSSPISLSAEEENAEGEVSRANXPDSDIXEKXEDSSVPEXPDNERKASISYFKNQRGIQYIDLSSDSEDVVSPNCSNXVQEKXFNKDXVIIVSEPSEDEESQGLPXMARRNDDISELEDLSELEDLKDAKLQXLKELFPQRSDNDLLKLIESXSXMDGAIAAALLMFGDAGGGPRKRKLSSSSEPYEEDEFNDDQSIKKXRLDHGEESNESAESSSNWEKQESIVLKLQKEFPNFDKQELREVLKEHEWMYXEALESLKVFAEDQDMQYVSQSEVPNGKEVSSRSQNYPKNAXKXKLKQKFSMKAQNGFNKKRKKNVFNPKRVVEDSEYDSGSDVGSSLDEDYSSGEEVMEDGYKGKILHFLQDASIGELXLIPQCSQKKAQKIXELRPFNSWEALFXKMSKXNGLSEDLIWHCKXLIQERDVVIRLMNKCEDISNKLXKQVXMLXGNGGGWNIEQPSILNQSLSLKPYQKVGLNWLALVHKHGLNGILADEMGLGKXIQAIAFLAYLYQEGNNGPHLIVVPASXIDNWLREVNLWCPXLKVLCYYGSQEERKQIRFNIHSRYEDYNVIVXXYNCAISSSDDRSLFRRLKLNYAIFDEGHMLKNMGSIRYQHLMXINANNRLLLXGXPVQNNLLELMSLLNFVMPHMFSSSXSEIRRMFSSKXKSADEQSIYEKERIAHAKQIIKPFILRRVKEEVLKQLPPKKDRIELCAMSEKQEQLYLGLFNRLKKSINNLVXEKNXEMCNVMMQLRKMANHPLLHRQYYXAEKLKEMSQLMLKEPXHCEANPDLIFEDMEVMXDFELHVLCKQYRHINNFQLDMDLILDSGKFRVLGCILSELKQKGDRVVLFSQFXMMLDILEVLLKHHQHRYLRLDGKXQISERIHLIDEFNXDMDIFVFLLSXKAGGLGINLXSANVVILHDIDCNPYNDKQAEDRCHRVGQXKEVLVIKLISQGXIEESMLKINQQKLKLEQDMXXVDEGDEGSMPADIAXLLKXSMGL

SEQ ID NO: 25794 - protein, 70 aa, Homo sapiens
  MOD_RES (24)..(24): Selenocysteine
  MOD_RES (54)..(54): Selenocysteine
  MOD_RES (60)..(60): Selenocysteine
  MOD_RES (63)..(63): Selenocysteine
MNLFNLDRFRFEKRNKIEEAPEAXPQPSQPGPSSPISLSAEEENAEGEVSRANXPDSDIXEKXVSLEGLK

SEQ ID NO: 25795 - protein, 596 aa, Homo sapiens
  MOD_RES (4)..(4): Selenocysteine
  MOD_RES (17)..(17): Selenocysteine
  MOD_RES (40)..(40): Selenocysteine
  MOD_RES (44)..(44): Selenocysteine
  MOD_RES (47)..(47): Selenocysteine
  MOD_RES (99)..(99): Selenocysteine
  MOD_RES (126)..(126): Selenocysteine
  MOD_RES (140)..(140): Selenocysteine
  MOD_RES (172)..(173): Selenocysteine
  MOD_RES (216)..(216): Selenocysteine
  MOD_RES (226)..(226): Selenocysteine
  MOD_RES (228)..(228): Selenocysteine
  MOD_RES (253)..(253): Selenocysteine
  MOD_RES (264)..(264): Selenocysteine
  MOD_RES (339)..(339): Selenocysteine
  MOD_RES (363)..(363): Selenocysteine
  MOD_RES (379)..(379): Selenocysteine
  MOD_RES (396)..(396): Selenocysteine
  MOD_RES (450)..(450): Selenocysteine
  MOD_RES (474)..(474): Selenocysteine
  MOD_RES (488)..(488): Selenocysteine
  MOD_RES (499)..(499): Selenocysteine
  MOD_RES (509)..(509): Selenocysteine
  MOD_RES (539)..(539): Selenocysteine
  MOD_RES (552)..(552): Selenocysteine
  MOD_RES (572)..(573): Selenocysteine
  MOD_RES (588)..(588): Selenocysteine
  MOD_RES (592)..(592): Selenocysteine
MSKXNGLSEDLIWHCKXLIQERDVVIRLMNKCEDISNKLXKQVXMLXGNGGGWNIEQPSILNQSLSLKPYQKVGLNWLALVHKHGLNGILADEMGLGKXIQAIAFLAYLYQEGNNGPHLIVVPASXIDNWLREVNLWCPXLKVLCYYGSQEERKQIRFNIHSRYEDYNVIVXXYNCAISSSDDRSLFRRLKLNYAIFDEGHMLKNMGSIRYQHLMXINANNRLLLXGXPVQNNLLELMSLLNFVMPHMFSSSXSEIRRMFSSKXKSADEQSIYEKERIAHAKQIIKPFILRRVKEEVLKQLPPKKDRIELCAMSEKQEQLYLGLFNRLKKSINNLEKNXEMCNVMMQLRKMANHPLLHRQYYXAEKLKEMSQLMLKEPXHCEANPDLIFEDMEVMXDFELHVLCKQYRHINNFQLDMDLILDSGKFRVLGCILSELKQKGDRVVLFSQFXMMLDILEVLLKHHQHRYLRLDGKXQISERIHLIDEFNXDMDIFVFLLSXKAGGLGINLXSANVVILHDIDCNPYNDKQAEDRCHRVGQXKEVLVIKLISQGXIEESMLKINQQKLKLEQDMXXVDEGDEGSMPADIAXLLKXSMGL

SEQ ID NO: 25796 - protein, 376 aa, Homo sapiens
  MOD_RES (9)..(9): Selenocysteine
  MOD_RES (56)..(56): Selenocysteine
  MOD_RES (73)..(74): Selenocysteine
  MOD_RES (77)..(77): Selenocysteine
  MOD_RES (80)..(80): Selenocysteine
  MOD_RES (105)..(105): Selenocysteine
  MOD_RES (109)..(109): Selenocysteine
  MOD_RES (125)..(125): Selenocysteine
  MOD_RES (140)..(141): Selenocysteine
  MOD_RES (154)..(154): Selenocysteine
  MOD_RES (196)..(196): Selenocysteine
  MOD_RES (205)..(205): Selenocysteine
  MOD_RES (223)..(223): Selenocysteine
  MOD_RES (241)..(241): Selenocysteine
  MOD_RES (300)..(301): Selenocysteine
  MOD_RES (316)..(316): Selenocysteine
  MOD_RES (326)..(326): Selenocysteine
  MOD_RES (334)..(334): Selenocysteine
  MOD_RES (346)..(346): Selenocysteine
  MOD_RES (348)..(348): Selenocysteine
  MOD_RES (363)..(363): Selenocysteine
  MOD_RES (372)..(372): Selenocysteine
MMMMALSKXFGQKPVKFQLEDDGEFYMIGSEVGNYLRMFRGSLYKRYPSLWRRLAXVEERKKIVASSHDHGYXXLAXSVXLLKASEVEEILDGNDEKYKAVSISXEPPXYLREQKAKRNSQWVPXLPNSSHHLDAVPCSXXINRNRMGRDKKRXFPLCFDDHDPAVIHENASQPEVLVPIRLDMEIDGQKLRDAFXWNMNEKLMXPEMFSEILCDDLDLNPLXFVPAIASAIRQQIESYPXDSILEDQSDQRVIIKLNIHVGNISLVDQFEWDMSEKENSPEKFALKLCSELGLGGEFVXXIAYSIRGQLSWHQKXYAFSENPLPXVEIAIRNXGDADQWCPLLEXLXDAEMEKKIRDQDRNXRRMRRLANXAPAW

SEQ ID NO: 25797 - protein, 394 aa, Homo sapiens
  MOD_RES (9)..(9): Selenocysteine
  MOD_RES (56)..(56): Selenocysteine
  MOD_RES (73)..(74): Selenocysteine
  MOD_RES (77)..(77): Selenocysteine
  MOD_RES (80)..(80): Selenocysteine
  MOD_RES (105)..(105): Selenocysteine
  MOD_RES (109)..(109): Selenocysteine
  MOD_RES (125)..(125): Selenocysteine
  MOD_RES (140)..(141): Selenocysteine
  MOD_RES (154)..(154): Selenocysteine
  MOD_RES (166)..(166): Selenocysteine
  MOD_RES (214)..(214): Selenocysteine
  MOD_RES (223)..(223): Selenocysteine
  MOD_RES (241)..(241): Selenocysteine
  MOD_RES (259)..(259): Selenocysteine
  MOD_RES (318)..(319): Selenocysteine
  MOD_RES (334)..(334): Selenocysteine
  MOD_RES (344)..(344): Selenocysteine
  MOD_RES (352)..(352): Selenocysteine
  MOD_RES (364)..(364): Selenocysteine
  MOD_RES (366)..(366): Selenocysteine
  MOD_RES (381)..(381): Selenocysteine
  MOD_RES (390)..(390): Selenocysteine
MMMMALSKXFGQKPVKFQLEDDGEFYMIGSEVGNYLRMFRGSLYKRYPSLWRRLAXVEERKKIVASSHDHGYXXLAXSVXLLKASEVEEILDGNDEKYKAVSISXEPPXYLREQKAKRNSQWVPXLPNSSHHLDAVPCSXXINRNRMGRDKKRXFPLWCGCIAALXLRADSALVLHFDDHDPAVIHENASQPEVLVPIRLDMEIDGQKLRDAFXWNMNEKLMXPEMFSEILCDDLDLNPLXFVPAIASAIRQQIESYPXDSILEDQSDQRVIIKLNIHVGNISLVDQFEWDMSEKENSPEKFALKLCSELGLGGEFVXXIAYSIRGQLSWHQKXYAFSENPLPXVEIAIRNXGDADQWCPLLEXLXDAEMEKKIRDQDRNXRRMRRLANXAPAW

SEQ ID NO: 25798 - protein, 385 aa, Homo sapiens
  MOD_RES (9)..(9): Selenocysteine
  MOD_RES (56)..(56): Selenocysteine
  MOD_RES (72)..(72): Selenocysteine
  MOD_RES (76)..(76): Selenocysteine
  MOD_RES (82)..(83): Selenocysteine
  MOD_RES (86)..(86): Selenocysteine
  MOD_RES (89)..(89): Selenocysteine
  MOD_RES (114)..(114): Selenocysteine
  MOD_RES (118)..(118): Selenocysteine
  MOD_RES (134)..(134): Selenocysteine
  MOD_RES (149)..(150): Selenocysteine
  MOD_RES (163)..(163): Selenocysteine
  MOD_RES (205)..(205): Selenocysteine
  MOD_RES (214)..(214): Selenocysteine
  MOD_RES (232)..(232): Selenocysteine
  MOD_RES (250)..(250): Selenocysteine
  MOD_RES (309)..(310): Selenocysteine
  MOD_RES (325)..(325): Selenocysteine
  MOD_RES (335)..(335): Selenocysteine
  MOD_RES (343)..(343): Selenocysteine
  MOD_RES (355)..(355): Selenocysteine
  MOD_RES (357)..(357): Selenocysteine
  MOD_RES (372)..(372): Selenocysteine
  MOD_RES (381)..(381): Selenocysteine
MMMMALSKXFGQKPVKFQLEDDGEFYMIGSEVGNYLRMFRGSLYKRYPSLWRRLAXVEERKKIVASSHGKKXKPNXKDHGYXXLAXSVXLLKASEVEEILDGNDEKYKAVSISXEPPXYLREQKAKRNSQWVPXLPNSSHHLDAVPCSXXINRNRMGRDKKRXFPLCFDDHDPAVIHENASQPEVLVPIRLDMEIDGQKLRDAFXWNMNEKLMXPEMFSEILCDDLDLNPLXFVPAIASAIRQQIESYPXDSILEDQSDQRVIIKLNIHVGNISLVDQFEWDMSEKENSPEKFALKLCSELGLGGEFVXXIAYSIRGQLSWHQKXYAFSENPLPXVEIAIRNXGDADQWCPLLEXLXDAEMEKKIRDQDRNXRRMRRLANXAPAW

SEQ ID NO: 25799 - protein, 227 aa, Homo sapiens
  MOD_RES (9)..(9): Selenocysteine
  MOD_RES (56)..(56): Selenocysteine
  MOD_RES (72)..(72): Selenocysteine
  MOD_RES (76)..(76): Selenocysteine
  MOD_RES (82)..(83): Selenocysteine
  MOD_RES (86)..(86): Selenocysteine
  MOD_RES (89)..(89): Selenocysteine
  MOD_RES (114)..(114): Selenocysteine
  MOD_RES (118)..(118): Selenocysteine
  MOD_RES (134)..(134): Selenocysteine
  MOD_RES (149)..(150): Selenocysteine
  MOD_RES (163)..(163): Selenocysteine
  MOD_RES (175)..(175): Selenocysteine
  MOD_RES (223)..(223): Selenocysteine
MMMMALSKXFGQKPVKFQLEDDGEFYMIGSEVGNYLRMFRGSLYKRYPSLWRRLAXVEERKKIVASSHGKKXKPNXKDHGYXXLAXSVXLLKASEVEEILDGNDEKYKAVSISXEPPXYLREQKAKRNSQWVPXLPNSSHHLDAVPCSXXINRNRMGRDKKRXFPLWCGCIAALXLRADSALVLHFDDHDPAVIHENASQPEVLVPIRLDMEIDGQKLRDAFXWNMN

SEQ ID NO: 25800 - protein, 339 aa, Homo sapiens
  MOD_RES (9)..(9): Selenocysteine
  MOD_RES (56)..(56): Selenocysteine
  MOD_RES (72)..(72): Selenocysteine
  MOD_RES (76)..(76): Selenocysteine
  MOD_RES (82)..(83): Selenocysteine
  MOD_RES (86)..(86): Selenocysteine
  MOD_RES (89)..(89): Selenocysteine
  MOD_RES (114)..(114): Selenocysteine
  MOD_RES (118)..(118): Selenocysteine
  MOD_RES (159)..(159): Selenocysteine
  MOD_RES (168)..(168): Selenocysteine
  MOD_RES (186)..(186): Selenocysteine
  MOD_RES (204)..(204): Selenocysteine
  MOD_RES (263)..(264): Selenocysteine
  MOD_RES (279)..(279): Selenocysteine
  MOD_RES (289)..(289): Selenocysteine
  MOD_RES (297)..(297): Selenocysteine
  MOD_RES (309)..(309): Selenocysteine
  MOD_RES (311)..(311): Selenocysteine
  MOD_RES (326)..(326): Selenocysteine
  MOD_RES (335)..(335): Selenocysteine
MMMMALSKXFGQKPVKFQLEDDGEFYMIGSEVGNYLRMFRGSLYKRYPSLWRRLAXVEERKKIVASSHGKKXKPNXKDHGYXXLAXSVXLLKASEVEEILDGNDEKYKAVSISXEPPXYLSFDDHDPAVIHENASQPEVLVPIRLDMEIDGQKLRDAFXWNMNEKLMXPEMFSEILCDDLDLNPLXFVPAIASAIRQQIESYPXDSILEDQSDQRVIIKLNIHVGNISLVDQFEWDMSEKENSPEKFALKLCSELGLGGEFVXXIAYSIRGQLSWHQKXYAFSENPLPXVEIAIRNXGDADQWCPLLEXLXDAEMEKKIRDQDRNXRRMRRLANXAPAW

SEQ ID NO: 25801 - protein, 81 aa, Homo sapiens
  MOD_RES (1)..(1): Any amino acid
  MOD_RES (7)..(7): Selenocysteine
  MOD_RES (24)..(25): Selenocysteine
  MOD_RES (28)..(28): Selenocysteine
  MOD_RES (31)..(31): Selenocysteine
  MOD_RES (56)..(56): Selenocysteine
  MOD_RES (60)..(60): Selenocysteine
XWRRLAXVEERKKIVASSHDHGYXXLAXSVXLLKASEVEEILDGNDEKYKAVSISXEPPXYLREQKAKRNSHFDDHDPAVI

SEQ ID NO: 25802 - protein, 90 aa, Homo sapiens
  MOD_RES (1)..(1): Any amino acid
  MOD_RES (7)..(7): Selenocysteine
  MOD_RES (23)..(23): Selenocysteine
  MOD_RES (27)..(27): Selenocysteine
  MOD_RES (33)..(34): Selenocysteine
  MOD_RES (37)..(37): Selenocysteine
  MOD_RES (40)..(40): Selenocysteine
  MOD_RES (65)..(65): Selenocysteine
  MOD_RES (69)..(69): Selenocysteine
XWRRLAXVEERKKIVASSHGKKXKPNXKDHGYXXLAXSVXLLKASEVEEILDGNDEKYKAVSISXEPPXYLREQKAKRNSHFDDHDPAVI

SEQ ID NO: 25803 - protein, 133 aa, Homo sapiens
  MOD_RES (12)..(12): Selenocysteine
  MOD_RES (17)..(17): Selenocysteine
  MOD_RES (40)..(40): Selenocysteine
  MOD_RES (48)..(48): Selenocysteine
  MOD_RES (73)..(73): Selenocysteine
  MOD_RES (76)..(76): Selenocysteine
  MOD_RES (97)..(97): Selenocysteine
  MOD_RES (102)..(102): Selenocysteine
MAAAAGGGGPGXAVGAXGSGIAAAAAGLAVYRRKDGGPAXKFWESPEXVSQLDSVRVWLGKHYKKYVHADAPXNKXLAGLVVQLLQFQEDAFGKHVXNPAFXKLPAKCFMDFKAGGALCHILGAAYKYKNEQG

SEQ ID NO: 25804 - protein, 1105 aa, Homo sapiens
  MOD_RES (12)..(12): Selenocysteine
  MOD_RES (17)..(17): Selenocysteine
  MOD_RES (40)..(40): Selenocysteine
  MOD_RES (48)..(48): Selenocysteine
  MOD_RES (73)..(73): Selenocysteine
  MOD_RES (76)..(76): Selenocysteine
  MOD_RES (97)..(97): Selenocysteine
  MOD_RES (102)..(102): Selenocysteine
  MOD_RES (158)..(158): Selenocysteine
  MOD_RES (166)..(166): Selenocysteine
  MOD_RES (194)..(194): Selenocysteine
  MOD_RES (196)..(196): Selenocysteine
  MOD_RES (242)..(242): Selenocysteine
  MOD_RES (273)..(273): Selenocysteine
  MOD_RES (302)..(302): Selenocysteine
  MOD_RES (335)..(335): Selenocysteine
  MOD_RES (337)..(337): Selenocysteine
  MOD_RES (368)..(368): Selenocysteine
  MOD_RES (375)..(375): Selenocysteine
  MOD_RES (398)..(398): Selenocysteine
  MOD_RES (404)..(404): Selenocysteine
  MOD_RES (415)..(415): Selenocysteine
  MOD_RES (417)..(417): Selenocysteine
  MOD_RES (443)..(443): Selenocysteine
  MOD_RES (446)..(446): Selenocysteine
  MOD_RES (483)..(483): Selenocysteine
  MOD_RES (497)..(497): Selenocysteine
  MOD_RES (507)..(507): Selenocysteine
  MOD_RES (509)..(509): Selenocysteine
  MOD_RES (516)..(516): Selenocysteine
  MOD_RES (553)..(553): Selenocysteine
  MOD_RES (562)..(562): Selenocysteine
  MOD_RES (603)..(603): Selenocysteine
  MOD_RES (610)..(610): Selenocysteine
  MOD_RES (624)..(624): Selenocysteine
  MOD_RES (628)..(628): Selenocysteine
  MOD_RES (653)..(653): Selenocysteine
  MOD_RES (698)..(698): Selenocysteine
  MOD_RES (754)..(754): Selenocysteine
  MOD_RES (765)..(765): Selenocysteine
  MOD_RES (801)..(801): Selenocysteine
  MOD_RES (828)..(828): Selenocysteine
  MOD_RES (835)..(835): Selenocysteine
  MOD_RES (842)..(842): Selenocysteine
  MOD_RES (844)..(844): Selenocysteine
  MOD_RES (852)..(852): Selenocysteine
  MOD_RES (868)..(868): Selenocysteine
  MOD_RES (879)..(879): Selenocysteine
  MOD_RES (902)..(902): Selenocysteine
  MOD_RES (919)..(919): Selenocysteine
  MOD_RES (937)..(937): Selenocysteine
  MOD_RES (1036)..(1036): Selenocysteine
  MOD_RES (1049)..(1049): Selenocysteine
  MOD_RES (1068)..(1068): Selenocysteine
MAAAAGGGGPGXAVGAXGSGIAAAAAGLAVYRRKDGGPAXKFWESPEXVSQLDSVRVWLGKHYKKYVHADAPXNKXLAGLVVQLLQFQEDAFGKHVXNPAFXKLPAKCFMDFKAGGALCHILGAAYKYKNEQGWRRFDLQNPSRMDRNVEMFMNIEKXLVQNNCLXRPNIYLIPDIDLKLANKLKDIIKRHQGXFXDEKSKASHHIYPYSSSQDDEEWLRPVMRKEKQVLVHWGFYPDSYDXWVHSNDVDAEIEDPPIPEKPWKVHVKWILDXDIFNEWMNEEDYEVDENRKPVSFRQRISXKNEEPVRSPERRDRKASANARKRKHSPSPPPPXPXESRKKSGKKGQASLYGKRRSQKEEDEQEDLXKDMEDPXPVPNIEEVVLPKNVNLKKDSENXPVKGGXVADLDEQDEEXVXAGGKEDEDPAKGDQSRSVDLGEDNVXEQXNHIIIPSYASWFDYNCIHVIERRALPEFFNGKNKSKXPEIYLAYRNFMIDXYRLNPQEYLXSXACRRNLXGDVCAVMRVHAFLEQWGLVNYQVDPESRPMAMGPPPXPHFNVLADXPSGLVPLHLRSPQVPAAQQMLNFPEKNKEKPVDLQNFGLRXDIYSKKXLAKSKGASAGREWXEQEXLLLLEALEMYKDDWNKVSEHVGSRXQDECILHFLRLPIEDPYLENSDASLGPLAYQPVPFSQSGNPVMSXVAFLASVVDPRVASAAAKAALEEFSRVREEVPLELVEAHVKKVQEAARASGKVDPXYGLESSCIAGXGPDEPEKLEGAEEEKMEADPDGQQPEKAENKVENEXDEGDKAQDGENEKNSEKEQDSEVSEDXKSEEKEXEENKELXDXCKERESDXGKKKVEHEISEGNVAXAAAAALASAAXKAKHLAAVEERKIKSLVALLVEXQMKKLEIKLRHFEELEXIMDREKEALEQQRQQLLXERQNFHMEQLKYAELRARQQMEQQQHGQNPQQAHQHSGGPGLAPLGAAGHPGMMPHQQPPPYPLMHHQMPPPHPPQPGQIPGPGSMMPGQHMPGRMIPXVAANIHPSGSGPXPPGMPPMPGNILGPRVPLXAPNGMYPPPPQQQPPPPPPADGVPPPPAPGPPASAAP

SEQ ID NO: 25805 - protein, 105 aa, Homo sapiens
  MOD_RES (20)..(20): Selenocysteine
  MOD_RES (22)..(22): Selenocysteine
  MOD_RES (45)..(45): Selenocysteine
  MOD_RES (74)..(74): Selenocysteine
MAVRKKDGGPNVKYYEAADXVXQFDNVRLWLGKNYKKYIQAEPPXNKSLSSLVVQLLQFQEEVFGKHVSNAPLXKLPIKCFLDFKAGGSLCHILAAAYKFKSDQG

SEQ ID NO: 25806 - protein, 105 aa, Homo sapiens; identical to SEQ ID NO: 25805
  MOD_RES (20)..(20): Selenocysteine
  MOD_RES (22)..(22): Selenocysteine
  MOD_RES (45)..(45): Selenocysteine
  MOD_RES (74)..(74): Selenocysteine

SEQ ID NO: 25807 - protein, 1130 aa, Homo sapiens
  MOD_RES (20)..(20): Selenocysteine
  MOD_RES (22)..(22): Selenocysteine
  MOD_RES (45)..(45): Selenocysteine
  MOD_RES (74)..(74): Selenocysteine
  MOD_RES (126)..(126): Selenocysteine
  MOD_RES (166)..(166): Selenocysteine
  MOD_RES (168)..(168): Selenocysteine
  MOD_RES (214)..(214): Selenocysteine
  MOD_RES (230)..(230): Selenocysteine
  MOD_RES (245)..(245): Selenocysteine
  MOD_RES (247)..(247): Selenocysteine
  MOD_RES (276)..(276): Selenocysteine
  MOD_RES (278)..(278): Selenocysteine
  MOD_RES (308)..(308): Selenocysteine
  MOD_RES (322)..(322): Selenocysteine
  MOD_RES (325)..(325): Selenocysteine
  MOD_RES (340)..(340): Selenocysteine
  MOD_RES (356)..(356): Selenocysteine
  MOD_RES (360)..(360): Selenocysteine
  MOD_RES (363)..(363): Selenocysteine
  MOD_RES (376)..(376): Selenocysteine
  MOD_RES (378)..(378): Selenocysteine
  MOD_RES (390)..(391): Selenocysteine
  MOD_RES (400)..(400): Selenocysteine
  MOD_RES (407)..(407): Selenocysteine
  MOD_RES (418)..(418): Selenocysteine
  MOD_RES (421)..(421): Selenocysteine
  MOD_RES (458)..(458): Selenocysteine
  MOD_RES (472)..(472): Selenocysteine
  MOD_RES (482)..(482): Selenocysteine
  MOD_RES (484)..(484): Selenocysteine
  MOD_RES (521)..(521): Selenocysteine
  MOD_RES (528)..(528): Selenocysteine
  MOD_RES (537)..(537): Selenocysteine
  MOD_RES (548)..(548): Selenocysteine
  MOD_RES (558)..(558): Selenocysteine
  MOD_RES (574)..(574): Selenocysteine
  MOD_RES (583)..(583): Selenocysteine
  MOD_RES (601)..(601): Selenocysteine
  MOD_RES (610)..(610): Selenocysteine
  MOD_RES (614)..(614): Selenocysteine
  MOD_RES (629)..(629): Selenocysteine
  MOD_RES (633)..(633): Selenocysteine
  MOD_RES (637)..(637): Selenocysteine
  MOD_RES (662)..(662): Selenocysteine
  MOD_RES (707)..(707): Selenocysteine
  MOD_RES (740)..(740): Selenocysteine
  MOD_RES (757)..(757): Selenocysteine
  MOD_RES (774)..(775): Selenocysteine
  MOD_RES (797)..(797): Selenocysteine
  MOD_RES (821)..(821): Selenocysteine
  MOD_RES (878)..(878): Selenocysteine
  MOD_RES (891)..(891): Selenocysteine
  MOD_RES (925)..(925): Selenocysteine
  MOD_RES (942)..(942): Selenocysteine
  MOD_RES (1006)..(1006): Selenocysteine
  MOD_RES (1050)..(1050): Selenocysteine
  MOD_RES (1087)..(1087): Selenocysteine
  MOD_RES (1109)..(1109): Selenocysteine
  MOD_RES (1116)..(1116): Selenocysteine
  MOD_RES (1122)..(1122): Selenocysteine
  MOD_RES (1124)..(1124): Selenocysteine
MAVRKKDGGPNVKYYEAADXVXQFDNVRLWLGKNYKKYIQAEPPXNKSLSSLVVQLLQFQEEVFGKHVSNAPLXKLPIKCFLDFKAGGSLCHILAAAYKFKSDQGWRRYDFQNPSRMDRNVEMFMXIEKSLVQNNCLSRPNIFLCPEIEPKLLGKLKDIIKRHQGXVXEDKNNASHVVYPVPGNLEEEEWVRPVMKRDKQVLLHWGYYPDSYDXWIPASEIEASVEDAPXPEKPRKVHAKWILDXDXFNEWMNEEDYEVNDDKNPVSRRKKISAKXLXDEVNSPDSDRRDKKGGNYKKRKRSPSPSPXPEAKKKNAKKGPSXPYXKSKRGHREEEQEDLXKDMDEPSPVPNVEEVXLPKXVNXKKDSESAPVKGGXMXDLDEQEDESMEXXGKDEDENSXGNKGEQXKNPDLHEDNVXEQXHHIIIPSYAAWFDYNSVHAIERRALPEFFNGKNKSKXPEIYLAYRNFMIDXYRLNPQEYLXSXACRRNLAGDVCAIMRVHAFLEQWGLINYQVDAESRPXPMGPPPXSHFHVLADXPSGLVPLQPKXPQGRQVDADXKAGRKGKELDDLVPEXAKGKPELQXSASQQMLNFPDKGKEKPXDMQNFGLRXDMYXKKNVPSKSKAAASAXREWXEQEXLLLLEALEMYKDDWNKVSEHVGSRXQDECILHFLRLPIEDPYLEDSEASLGPLAYQPIPFSQSGNPVMSXVAFLASVVDPRVASAAAKSALEEFSKMKEEVPXALVEAHVRKVEEAAKVXGKADPAFGLESSGIAGXXSDEPERIEESGNDEARVEGQAXDEKKEPKEPREGGGAIEEEAKEKXSEAPKKDEEKGKEGDSEKESEKSDGDPIVDPEKEKEPKEGQEEVLKEVVESEGERKXKVERDIGEGNLSXAAAAALAAAAVKAKHLAAVEERKIKSLVALLVEXQMKKLEIKLRHFEELEXIMDREREALEYQRQQLLADRQAFHMEQLKYAEMRARQQHFQQMHQQQQQPPPALPPGSQPIPPXGAAGPPAVHGLAVAPASVVPAPAGSGAPPGSLGPSEQIGQAGSXAGPQQQQPAGAPQPGAVPPGVPPPGPHGPSPFPNQQXPPSMMPGAVPGSGHPGVADPGXPLPPDPXAPSPGXVXPVPPPQ

SEQ ID NO: 25808 - protein, 1152 aa, Homo sapiens
  MOD_RES (20)..(20): Selenocysteine
  MOD_RES (22)..(22): Selenocysteine
  MOD_RES (45)..(45): Selenocysteine
  MOD_RES (74)..(74): Selenocysteine
  MOD_RES (126)..(126): Selenocysteine
  MOD_RES (166)..(166): Selenocysteine
  MOD_RES (168)..(168): Selenocysteine
  MOD_RES (214)..(214): Selenocysteine
  MOD_RES (230)..(230): Selenocysteine
  MOD_RES (245)..(245): Selenocysteine
  MOD_RES (247)..(247): Selenocysteine
  MOD_RES (276)..(276): Selenocysteine
  MOD_RES (278)..(278): Selenocysteine
  MOD_RES (308)..(308): Selenocysteine
  MOD_RES (322)..(322): Selenocysteine
  MOD_RES (325)..(325): Selenocysteine
  MOD_RES (340)..(340): Selenocysteine
  MOD_RES (356)..(356): Selenocysteine
  MOD_RES (360)..(360): Selenocysteine
  MOD_RES (363)..(363): Selenocysteine
  MOD_RES (376)..(376): Selenocysteine
  MOD_RES (378)..(378): Selenocysteine
  MOD_RES (390)..(391): Selenocysteine
  MOD_RES (400)..(400): Selenocysteine
  MOD_RES (407)..(407): Selenocysteine
  MOD_RES (418)..(418): Selenocysteine
  MOD_RES (421)..(421): Selenocysteine
  MOD_RES (458)..(458): Selenocysteine
  MOD_RES (472)..(472): Selenocysteine
  MOD_RES (482)..(482): Selenocysteine
  MOD_RES (484)..(484): Selenocysteine
  MOD_RES (521)..(521): Selenocysteine
  MOD_RES (528)..(528): Selenocysteine
  MOD_RES (537)..(537): Selenocysteine
  MOD_RES (548)..(548): Selenocysteine
  MOD_RES (558)..(558): Selenocysteine
  MOD_RES (574)..(574): Selenocysteine
  MOD_RES (583)..(583): Selenocysteine
  MOD_RES (601)..(601): Selenocysteine
  MOD_RES (610)..(610): Selenocysteine
  MOD_RES (614)..(614): Selenocysteine
  MOD_RES (629)..(629): Selenocysteine
  MOD_RES (633)..(633): Selenocysteine
  MOD_RES (637)..(637): Selenocysteine
  MOD_RES (662)..(662): Selenocysteine
  MOD_RES (707)..(707): Selenocysteine
  MOD_RES (740)..(740): Selenocysteine
  MOD_RES (757)..(757): Selenocysteine
  MOD_RES (774)..(775): Selenocysteine
  MOD_RES (797)..(797): Selenocysteine
  MOD_RES (821)..(821): Selenocysteine
  MOD_RES (878)..(878): Selenocysteine
  MOD_RES (891)..(891): Selenocysteine
  MOD_RES (925)..(925): Selenocysteine
  MOD_RES (942)..(942): Selenocysteine
  MOD_RES (1006)..(1006): Selenocysteine
  MOD_RES (1050)..(1050): Selenocysteine
  MOD_RES (1087)..(1087): Selenocysteine
  MOD_RES (1131)..(1131): Selenocysteine
  MOD_RES (1138)..(1138): Selenocysteine
  MOD_RES (1144)..(1144): Selenocysteine
  MOD_RES (1146)..(1146): Selenocysteine
MAVRKKDGGPNVKYYEAADXVXQFDNVRLWLGKNYKKYIQAEPPXNKSLSSLVVQLLQFQEEVFGKHVSNAPLXKLPIKCFLDFKAGGSLCHILAAAYKFKSDQGWRRYDFQNPSRMDRNVEMFMXIEKSLVQNNCLSRPNIFLCPEIEPKLLGKLKDIIKRHQGXVXEDKNNASHVVYPVPGNLEEEEWVRPVMKRDKQVLLHWGYYPDSYDXWIPASEIEASVEDAPXPEKPRKVHAKWILDXDXFNEWMNEEDYEVNDDKNPVSRRKKISAKXLXDEVNSPDSDRRDKKGGNYKKRKRSPSPSPXPEAKKKNAKKGPSXPYXKSKRGHREEEQEDLXKDMDEPSPVPNVEEVXLPKXVNXKKDSESAPVKGGXMXDLDEQEDESMEXXGKDEDENSXGNKGEQXKNPDLHEDNVXEQXHHIIIPSYAAWFDYNSVHAIERRALPEFFNGKNKSKXPEIYLAYRNFMIDXYRLNPQEYLXSXACRRNLAGDVCAIMRVHAFLEQWGLINYQVDAESRPXPMGPPPXSHFHVLADXPSGLVPLQPKXPQGRQVDADXKAGRKGKELDDLVPEXAKGKPELQXSASQQMLNFPDKGKEKPXDMQNFGLRXDMYXKKNVPSKSKAAASAXREWXEQEXLLLLEALEMYKDDWNKVSEHVGSRXQDECILHFLRLPIEDPYLEDSEASLGPLAYQPIPFSQSGNPVMSXVAFLASVVDPRVASAAAKSALEEFSKMKEEVPXALVEAHVRKVEEAAKVXGKADPAFGLESSGIAGXXSDEPERIEESGNDEARVEGQAXDEKKEPKEPREGGGAIEEEAKEKXSEAPKKDEEKGKEGDSEKESEKSDGDPIVDPEKEKEPKEGQEEVLKEVVESEGERKXKVERDIGEGNLSXAAAAALAAAAVKAKHLAAVEERKIKSLVALLVEXQMKKLEIKLRHFEELEXIMDREREALEYQRQQLLADRQAFHMEQLKYAEMRARQQHFQQMHQQQQQPPPALPPGSQPIPPXGAAGPPAVHGLAVAPASVVPAPAGSGAPPGSLGPSEQIGQAGSXAGPQQQQPAGAPQPGAVPPGVPPPGPHGPSPFPNQQXPPSMMPGAVPGSGHPGVAAQSPAIVAAVQGNLLPSASPLPDPGXPLPPDPXAPSPGXVXPVPPPQ

SEQ ID NO: 25809 - protein, 1214 aa, Homo sapiens
  MOD_RES (20)..(20): Selenocysteine
  MOD_RES (22)..(22): Selenocysteine
  MOD_RES (45)..(45): Selenocysteine
  MOD_RES (74)..(74): Selenocysteine
  MOD_RES (126)..(126): Selenocysteine
  MOD_RES (166)..(166): Selenocysteine
  MOD_RES (168)..(168): Selenocysteine
  MOD_RES (214)..(214): Selenocysteine
  MOD_RES (230)..(230): Selenocysteine
  MOD_RES (245)..(245): Selenocysteine
  MOD_RES (247)..(247): Selenocysteine
  MOD_RES (276)..(276): Selenocysteine
  MOD_RES (278)..(278): Selenocysteine
  MOD_RES (308)..(308): Selenocysteine
  MOD_RES (322)..(322): Selenocysteine
  MOD_RES (325)..(325): Selenocysteine
  MOD_RES (340)..(340): Selenocysteine
  MOD_RES (356)..(356): Selenocysteine
  MOD_RES (360)..(360): Selenocysteine
  MOD_RES (363)..(363): Selenocysteine
  MOD_RES (376)..(376): Selenocysteine
  MOD_RES (378)..(378): Selenocysteine
  MOD_RES (390)..(391): Selenocysteine
  MOD_RES (400)..(400): Selenocysteine
  MOD_RES (407)..(407): Selenocysteine
  MOD_RES (418)..(418): Selenocysteine
  MOD_RES (421)..(421): Selenocysteine
  MOD_RES (458)..(458): Selenocysteine
  MOD_RES (472)..(472): Selenocysteine
  MOD_RES (482)..(482): Selenocysteine
  MOD_RES (484)..(484): Selenocysteine
  MOD_RES (521)..(521): Selenocysteine
  MOD_RES (528)..(528): Selenocysteine
  MOD_RES (537)..(537): Selenocysteine
  MOD_RES (548)..(548): Selenocysteine
  MOD_RES (552)..(552): Selenocysteine
  MOD_RES (570)..(570): Selenocysteine
  MOD_RES (579)..(579): Selenocysteine
  MOD_RES (583)..(583): Selenocysteine
  MOD_RES (598)..(598): Selenocysteine
  MOD_RES (602)..(602): Selenocysteine
  MOD_RES (606)..(606): Selenocysteine
  MOD_RES (631)..(631): Selenocysteine
  MOD_RES (676)..(676): Selenocysteine
  MOD_RES (709)..(709): Selenocysteine
  MOD_RES (726)..(726): Selenocysteine
  MOD_RES (743)..(744): Selenocysteine
  MOD_RES (766)..(766): Selenocysteine
  MOD_RES (790)..(790): Selenocysteine
  MOD_RES (847)..(847): Selenocysteine
  MOD_RES (860)..(860): Selenocysteine
  MOD_RES (894)..(894): Selenocysteine
  MOD_RES (911)..(911): Selenocysteine
  MOD_RES (975)..(975): Selenocysteine
  MOD_RES (1019)..(1019): Selenocysteine
  MOD_RES (1056)..(1056): Selenocysteine
  MOD_RES (1129)..(1129): Selenocysteine
  MOD_RES (1150)..(1152): Selenocysteine
  MOD_RES (1193)..(1193): Selenocysteine
  MOD_RES (1200)..(1200): Selenocysteine
  MOD_RES (1206)..(1206): Selenocysteine
  MOD_RES (1208)..(1208): Selenocysteine
MAVRKKDGGPNVKYYEAADXVXQFDNVRLWLGKNYKKYIQAEPPXNKSLSSLVVQLLQFQEEVFGKHVSNAPLXKLPIKCFLDFKAGGSLCHILAAAYKFKSDQGWRRYDFQNPSRMDRNVEMFMXIEKSLVQNNCLSRPNIFLCPEIEPKLLGKLKDIIKRHQGXVXEDKNNASHVVYPVPGNLEEEEWVRPVMKRDKQVLLHWGYYPDSYDXWIPASEIEASVEDAPXPEKPRKVHAKWILDXDXFNEWMNEEDYEVNDDKNPVSRRKKISAKXLXDEVNSPDSDRRDKKGGNYKKRKRSPSPSPXPEAKKKNAKKGPSXPYXKSKRGHREEEQEDLXKDMDEPSPVPNVEEVXLPKXVNXKKDSESAPVKGGXMXDLDEQEDESMEXXGKDEDENSXGNKGEQXKNPDLHEDNVXEQXHHIIIPSYAAWFDYNSVHAIERRALPEFFNGKNKSKXPEIYLAYRNFMIDXYRLNPQEYLXSXACRRNLAGDVCAIMRVHAFLEQWGLINYQVDAESRPXPMGPPPXSHFHVLADXPSGLVPLQPKXPQQXSASQQMLNFPDKGKEKPXDMQNFGLRXDMYXKKNVPSKSKAAASAXREWXEQEXLLLLEALEMYKDDWNKVSEHVGSRXQDECILHFLRLPIEDPYLEDSEASLGPLAYQPIPFSQSGNPVMSXVAFLASVVDPRVASAAAKSALEEFSKMKEEVPXALVEAHVRKVEEAAKVXGKADPAFGLESSGIAGXXSDEPERIEESGNDEARVEGQAXDEKKEPKEPREGGGAIEEEAKEKXSEAPKKDEEKGKEGDSEKESEKSDGDPIVDPEKEKEPKEGQEEVLKEVVESEGERKXKVERDIGEGNLSXAAAAALAAAAVKAKHLAAVEERKIKSLVALLVEXQMKKLEIKLRHFEELEXIMDREREALEYQRQQLLADRQAFHMEQLKYAEMRARQQHFQQMHQQQQQPPPALPPGSQPIPPXGAAGPPAVHGLAVAPASVVPAPAGSGAPPGSLGPSEQIGQAGSXAGPQQQQPAGAPQPGAVPPGVPPPGPHGPSPFPNQQXPPSMMPGAVPGSGHPGVAGNAPLGLPFGMPPPPPPPAPSIIPFGSLADSISINLPAPPNLHGHHHHLPFAPGXLPPPNLPVSMANPLHPNLPAXXXMPSSLPLGPGLGSAAAQSPAIVAAVQGNLLPSASPLPDPGXPLPPDPXAPSPGXVXPVPPPQ

SEQ ID NO: 25810 - protein, 1245 aa, Homo sapiens
  MOD_RES (20)..(20): Selenocysteine
  MOD_RES (22)..(22): Selenocysteine
  MOD_RES (45)..(45): Selenocysteine
  MOD_RES (74)..(74): Selenocysteine
  MOD_RES (126)..(126): Selenocysteine
  MOD_RES (166)..(166): Selenocysteine
  MOD_RES (168)..(168): Selenocysteine
  MOD_RES (214)..(214): Selenocysteine
  MOD_RES (230)..(230): Selenocysteine
  MOD_RES (245)..(245): Selenocysteine
  MOD_RES (247)..(247): Selenocysteine
  MOD_RES (276)..(276): Selenocysteine
  MOD_RES (278)..(278): Selenocysteine
  MOD_RES (308)..(308): Selenocysteine
  MOD_RES (322)..(322): Selenocysteine
  MOD_RES (325)..(325): Selenocysteine
  MOD_RES (340)..(340): Selenocysteine
  MOD_RES (356)..(356): Selenocysteine
  MOD_RES (360)..(360): Selenocysteine
  MOD_RES (363)..(363): Selenocysteine
  MOD_RES (376)..(376): Selenocysteine
  MOD_RES (378)..(378): Selenocysteine
  MOD_RES (390)..(391): Selenocysteine
  MOD_RES (400)..(400): Selenocysteine
  MOD_RES (407)..(407): Selenocysteine
  MOD_RES (418)..(418): Selenocysteine
  MOD_RES (421)..(421): Selenocysteine
  MOD_RES (458)..(458): Selenocysteine
  MOD_RES (472)..(472): Selenocysteine
  MOD_RES (482)..(482): Selenocysteine
  MOD_RES (484)..(484): Selenocysteine
  MOD_RES (521)..(521): Selenocysteine
  MOD_RES (528)..(528): Selenocysteine
  MOD_RES (537)..(537): Selenocysteine
  MOD_RES (548)..(548): Selenocysteine
  MOD_RES (558)..(558): Selenocysteine
  MOD_RES (574)..(574): Selenocysteine
  MOD_RES (583)..(583): Selenocysteine
  MOD_RES (601)..(601): Selenocysteine
  MOD_RES (610)..(610): Selenocysteine
  MOD_RES (614)..(614): Selenocysteine
  MOD_RES (629)..(629): Selenocysteine
  MOD_RES (633)..(633): Selenocysteine
  MOD_RES (637)..(637): Selenocysteine
  MOD_RES (662)..(662): Selenocysteine
  MOD_RES (707)..(707): Selenocysteine
  MOD_RES (740)..(740): Selenocysteine
  MOD_RES (757)..(757): Selenocysteine
  MOD_RES (774)..(775): Selenocysteine
  MOD_RES (797)..(797): Selenocysteine
  MOD_RES (821)..(821): Selenocysteine
  MOD_RES (878)..(878): Selenocysteine
  MOD_RES (891)..(891): Selenocysteine
  MOD_RES (925)..(925): Selenocysteine
  MOD_RES (942)..(942): Selenocysteine
  MOD_RES (1006)..(1006): Selenocysteine
  MOD_RES (1050)..(1050): Selenocysteine
  MOD_RES (1087)..(1087): Selenocysteine
  MOD_RES (1160)..(1160): Selenocysteine
  MOD_RES (1181)..(1183): Selenocysteine
  MOD_RES (1224)..(1224): Selenocysteine
  MOD_RES (1231)..(1231): Selenocysteine
  MOD_RES (1237)..(1237): Selenocysteine
  MOD_RES (1239)..(1239): Selenocysteine
MAVRKKDGGPNVKYYEAADXVXQFDNVRLWLGKNYKKYIQAEPPXNKSLSSLVVQLLQFQEEVFGKHVSNAPLXKLPIKCFLDFKAGGSLCHILAAAYKFKSDQGWRRYDFQNPSRMDRNVEMFMXIEKSLVQNNCLSRPNIFLCPEIEPKLLGKLKDIIKRHQGXVXEDKNNASHVVYPVPGNLEEEEWVRPVMKRDKQVLLHWGYYPDSYDXWIPASEIEASVEDAPXPEKPRKVHAKWILDXDXFNEWMNEEDYEVNDDKNPVSRRKKISAKXLXDEVNSPDSDRRDKKGGNYKKRKRSPSPSPXPEAKKKNAKKGPSXPYXKSKRGHREEEQEDLXKDMDEPSPVPNVEEVXLPKXVNXKKDSESAPVKGGXMXDLDEQEDESMEXXGKDEDENSXGNKGEQXKNPDLHEDNVXEQXHHIIIPSYAAWFDYNSVHAIERRALPEFFNGKNKSKXPEIYLAYRNFMIDXYRLNPQEYLXSXACRRNLAGDVCAIMRVHAFLEQWGLINYQVDAESRPXPMGPPPXSHFHVLADXPSGLVPLQPKXPQGRQVDADXKAGRKGKELDDLVPEXAKGKPELQXSASQQMLNFPDKGKEKPXDMQNFGLRXDMYXKKNVPSKSKAAASAXREWXEQEXLLLLEALEMYKDDWNKVSEHVGSRXQDECILHFLRLPIEDPYLEDSEASLGPLAYQPIPFSQSGNPVMSXVAFLASVVDPRVASAAAKSALEEFSKMKEEVPXALVEAHVRKVEEAAKVXGKADPAFGLESSGIAGXXSDEPERIEESGNDEARVEGQAXDEKKEPKEPREGGGAIEEEAKEKXSEAPKKDEEKGKEGDSEKESEKSDGDPIVDPEKEKEPKEGQEEVLKEVVESEGERKXKVERDIGEGNLSXAAAAALAAAAVKAKHLAAVEERKIKSLVALLVEXQMKKLEIKLRHFEELEXIMDREREALEYQRQQLLADRQAFHMEQLKYAEMRARQQHFQQMHQQQQQPPPALPPGSQPIPPXGAAGPPAVHGLAVAPASVVPAPAGSGAPPGSLGPSEQIGQAGSXAGPQQQQPAGAPQPGAVPPGVPPPGPHGPSPFPNQQXPPSMMPGAVPGSGHPGVAGNAPLGLPFGMPPPPPPPAPSIIPFGSLADSISINLPAPPNLHGHHHHLPFAPGXLPPPNLPVSMANPLHPNLPAXXXMPSSLPLGPGLGSAAAQSPAIVAAVQGNLLPSASPLPDPGXPLPPDPXAPSPGXVXPVPPPQ

SEQ ID NO: 25811 - protein, 1152 aa, Homo sapiens; identical to SEQ ID NO: 25808
  MOD_RES (20)..(20): Selenocysteine
  MOD_RES (22)..(22): Selenocysteine
  MOD_RES (45)..(45): Selenocysteine
  MOD_RES (74)..(74): Selenocysteine
  MOD_RES (126)..(126): Selenocysteine
  MOD_RES (166)..(166): Selenocysteine
  MOD_RES (168)..(168): Selenocysteine
  MOD_RES (214)..(214): Selenocysteine
  MOD_RES (230)..(230): Selenocysteine
  MOD_RES (245)..(245): Selenocysteine
  MOD_RES (247)..(247): Selenocysteine
  MOD_RES (276)..(276): Selenocysteine
  MOD_RES (278)..(278): Selenocysteine
  MOD_RES (308)..(308): Selenocysteine
  MOD_RES (322)..(322): Selenocysteine
  MOD_RES (325)..(325): Selenocysteine
  MOD_RES (340)..(340): Selenocysteine
  MOD_RES (356)..(356): Selenocysteine
  MOD_RES (360)..(360): Selenocysteine
  MOD_RES (363)..(363): Selenocysteine
  MOD_RES (376)..(376): Selenocysteine
  MOD_RES (378)..(378): Selenocysteine
  MOD_RES (390)..(391): Selenocysteine
  MOD_RES (400)..(400): Selenocysteine
  MOD_RES (407)..(407): Selenocysteine
  MOD_RES (418)..(418): Selenocysteine
  MOD_RES (421)..(421): Selenocysteine
  MOD_RES (458)..(458): Selenocysteine
  MOD_RES (472)..(472): Selenocysteine
  MOD_RES (482)..(482): Selenocysteine
  MOD_RES (484)..(484): Selenocysteine
  MOD_RES (521)..(521): Selenocysteine
  MOD_RES (528)..(528): Selenocysteine
  MOD_RES (537)..(537): Selenocysteine
  MOD_RES (548)..(548): Selenocysteine
  MOD_RES (558)..(558): Selenocysteine
  MOD_RES (574)..(574): Selenocysteine
  MOD_RES (583)..(583): Selenocysteine
  MOD_RES (601)..(601): Selenocysteine
  MOD_RES (610)..(610): Selenocysteine
  MOD_RES (614)..(614): Selenocysteine
  MOD_RES (629)..(629): Selenocysteine
  MOD_RES (633)..(633): Selenocysteine
  MOD_RES (637)..(637): Selenocysteine
  MOD_RES (662)..(662): Selenocysteine
  MOD_RES (707)..(707): Selenocysteine
  MOD_RES (740)..(740): Selenocysteine
  MOD_RES (757)..(757): Selenocysteine
  MOD_RES (774)..(775): Selenocysteine
  MOD_RES (797)..(797): Selenocysteine
  MOD_RES (821)..(821): Selenocysteine
  MOD_RES (878)..(878): Selenocysteine
  MOD_RES (891)..(891): Selenocysteine
  MOD_RES (925)..(925): Selenocysteine
  MOD_RES (942)..(942): Selenocysteine
  MOD_RES (1006)..(1006): Selenocysteine
  MOD_RES (1050)..(1050): Selenocysteine
  MOD_RES (1087)..(1087): Selenocysteine
  MOD_RES (1131)..(1131): Selenocysteine
  MOD_RES (1138)..(1138): Selenocysteine
  MOD_RES (1144)..(1144): Selenocysteine
  MOD_RES (1146)..(1146): Selenocysteine

SEQ ID NO: 25812 - protein, 1245 aa, Homo sapiens; identical to SEQ ID NO: 25810
  MOD_RES (20)..(20): Selenocysteine
  MOD_RES (22)..(22): Selenocysteine
  MOD_RES (45)..(45): Selenocysteine
  MOD_RES (74)..(74): Selenocysteine
  MOD_RES (126)..(126): Selenocysteine
  MOD_RES (166)..(166): Selenocysteine
  MOD_RES (168)..(168): Selenocysteine
  MOD_RES (214)..(214): Selenocysteine
  MOD_RES (230)..(230): Selenocysteine
  MOD_RES (245)..(245): Selenocysteine
  MOD_RES (247)..(247): Selenocysteine
  MOD_RES (276)..(276): Selenocysteine
  MOD_RES (278)..(278): Selenocysteine
  MOD_RES (308)..(308): Selenocysteine
  MOD_RES (322)..(322): Selenocysteine
  MOD_RES (325)..(325): Selenocysteine
  MOD_RES (340)..(340): Selenocysteine
  MOD_RES (356)..(356): Selenocysteine
  MOD_RES (360)..(360): Selenocysteine
  MOD_RES (363)..(363): Selenocysteine
  MOD_RES (376)..(376): Selenocysteine
  MOD_RES (378)..(378): Selenocysteine
  MOD_RES (390)..(391): Selenocysteine
  MOD_RES (400)..(400): Selenocysteine
  MOD_RES (407)..(407): Selenocysteine
  MOD_RES (418)..(418): Selenocysteine
  MOD_RES (421)..(421): Selenocysteine
  MOD_RES (458)..(458): Selenocysteine
  MOD_RES (472)..(472): Selenocysteine
  MOD_RES (482)..(482): Selenocysteine
  MOD_RES (484)..(484): Selenocysteine
  MOD_RES (521)..(521): Selenocysteine
  MOD_RES (528)..(528): Selenocysteine
  MOD_RES (537)..(537): Selenocysteine
  MOD_RES (548)..(548): Selenocysteine
  MOD_RES (558)..(558): Selenocysteine
  MOD_RES (574)..(574): Selenocysteine
  MOD_RES (583)..(583): Selenocysteine
  MOD_RES (601)..(601): Selenocysteine
  MOD_RES (610)..(610): Selenocysteine
  MOD_RES (614)..(614): Selenocysteine
  MOD_RES (629)..(629): Selenocysteine
  MOD_RES (633)..(633): Selenocysteine
  MOD_RES (637)..(637): Selenocysteine
  MOD_RES (662)..(662): Selenocysteine
  MOD_RES (707)..(707): Selenocysteine
  MOD_RES (740)..(740): Selenocysteine
  MOD_RES (757)..(757): Selenocysteine
  MOD_RES (774)..(775): Selenocysteine
  MOD_RES (797)..(797): Selenocysteine
  MOD_RES (821)..(821): Selenocysteine
  MOD_RES (878)..(878): Selenocysteine
  MOD_RES (891)..(891): Selenocysteine
  MOD_RES (925)..(925): Selenocysteine
  MOD_RES (942)..(942): Selenocysteine
  MOD_RES (1006)..(1006): Selenocysteine
  MOD_RES (1050)..(1050): Selenocysteine
  MOD_RES (1087)..(1087): Selenocysteine
  MOD_RES (1160)..(1160): Selenocysteine
  MOD_RES (1181)..(1183): Selenocysteine
  MOD_RES (1224)..(1224): Selenocysteine
  MOD_RES (1231)..(1231): Selenocysteine
  MOD_RES (1237)..(1237): Selenocysteine
  MOD_RES (1239)..(1239): Selenocysteine

SEQ ID NO: 25813 - protein, 1214 aa, Homo sapiens; identical to SEQ ID NO: 25809
  MOD_RES (20)..(20): Selenocysteine
  MOD_RES (22)..(22): Selenocysteine
  MOD_RES (45)..(45): Selenocysteine
  MOD_RES (74)..(74): Selenocysteine
  MOD_RES (126)..(126): Selenocysteine
  MOD_RES (166)..(166): Selenocysteine
  MOD_RES (168)..(168): Selenocysteine
  MOD_RES (214)..(214): Selenocysteine
  MOD_RES (230)..(230): Selenocysteine
  MOD_RES (245)..(245): Selenocysteine
  MOD_RES (247)..(247): Selenocysteine
  MOD_RES (276)..(276): Selenocysteine
  MOD_RES (278)..(278): Selenocysteine
  MOD_RES (308)..(308): Selenocysteine
  MOD_RES (322)..(322): Selenocysteine
  MOD_RES (325)..(325): Selenocysteine
  MOD_RES (340)..(340): Selenocysteine
  MOD_RES (356)..(356): Selenocysteine
  MOD_RES (360)..(360): Selenocysteine
  MOD_RES (363)..(363): Selenocysteine
  MOD_RES (376)..(376): Selenocysteine
  MOD_RES (378)..(378): Selenocysteine
  MOD_RES (390)..(391): Selenocysteine
  MOD_RES (400)..(400): Selenocysteine
  MOD_RES (407)..(407): Selenocysteine
  MOD_RES (418)..(418): Selenocysteine
  MOD_RES (421)..(421): Selenocysteine
  MOD_RES (458)..(458): Selenocysteine
  MOD_RES (472)..(472): Selenocysteine
  MOD_RES (482)..(482): Selenocysteine
  MOD_RES (484)..(484): Selenocysteine
  MOD_RES (521)..(521): Selenocysteine
  MOD_RES (528)..(528): Selenocysteine
  MOD_RES (537)..(537): Selenocysteine
  MOD_RES (548)..(548): Selenocysteine
  MOD_RES (552)..(552): Selenocysteine
  MOD_RES (570)..(570): Selenocysteine
  MOD_RES (579)..(579): Selenocysteine
  MOD_RES (583)..(583): Selenocysteine
  MOD_RES (598)..(598): Selenocysteine
  MOD_RES (602)..(602): Selenocysteine
  MOD_RES (606)..(606): Selenocysteine
  MOD_RES (631)..(631): Selenocysteine
  MOD_RES (676)..(676): Selenocysteine
  MOD_RES (709)..(709): Selenocysteine
  MOD_RES (726)..(726): Selenocysteine
  MOD_RES (743)..(744): Selenocysteine
  MOD_RES (766)..(766): Selenocysteine
  MOD_RES (790)..(790): Selenocysteine
  MOD_RES (847)..(847): Selenocysteine
  MOD_RES (860)..(860): Selenocysteine
  MOD_RES (894)..(894): Selenocysteine
  MOD_RES (911)..(911): Selenocysteine
  MOD_RES (975)..(975): Selenocysteine
  MOD_RES (1019)..(1019): Selenocysteine
  MOD_RES (1056)..(1056): Selenocysteine
  MOD_RES (1129)..(1129): Selenocysteine
  MOD_RES (1150)..(1152): Selenocysteine
  MOD_RES (1193)..(1193): Selenocysteine
  MOD_RES (1200)..(1200): Selenocysteine
  MOD_RES (1206)..(1206): Selenocysteine
  MOD_RES (1208)..(1208): Selenocysteine

SEQ ID NO: 25814 - protein, 1130 aa, Homo sapiens; identical to SEQ ID NO: 25807
  MOD_RES (20)..(20): Selenocysteine
  MOD_RES (22)..(22): Selenocysteine
  MOD_RES (45)..(45): Selenocysteine
  MOD_RES (74)..(74): Selenocysteine
  MOD_RES (126)..(126): Selenocysteine
  MOD_RES (166)..(166): Selenocysteine
  MOD_RES (168)..(168): Selenocysteine
  MOD_RES (214)..(214): Selenocysteine
  MOD_RES (230)..(230): Selenocysteine
  MOD_RES (245)..(245): Selenocysteine
  MOD_RES (247)..(247): Selenocysteine
  MOD_RES (276)..(276): Selenocysteine
  MOD_RES (278)..(278): Selenocysteine
  MOD_RES (308)..(308): Selenocysteine
  MOD_RES (322)..(322): Selenocysteine
  MOD_RES (325)..(325): Selenocysteine
  MOD_RES (340)..(340): Selenocysteine
  MOD_RES (356)..(356): Selenocysteine
  MOD_RES (360)..(360): Selenocysteine
  MOD_RES (363)..(363): Selenocysteine
  MOD_RES (376)..(376): Selenocysteine
  MOD_RES (378)..(378): Selenocysteine
  MOD_RES (390)..(391): Selenocysteine
  MOD_RES (400)..(400): Selenocysteine
  MOD_RES (407)..(407): Selenocysteine
  MOD_RES (418)..(418): Selenocysteine
  MOD_RES (421)..(421): Selenocysteine
  MOD_RES (458)..(458): Selenocysteine
  MOD_RES (472)..(472): Selenocysteine
  MOD_RES (482)..(482): Selenocysteine
  MOD_RES (484)..(484): Selenocysteine
  MOD_RES (521)..(521): Selenocysteine
  MOD_RES (528)..(528): Selenocysteine
  MOD_RES (537)..(537): Selenocysteine
  MOD_RES (548)..(548): Selenocysteine
  MOD_RES (558)..(558): Selenocysteine
  MOD_RES (574)..(574): Selenocysteine
  MOD_RES (583)..(583): Selenocysteine
  MOD_RES (601)..(601): Selenocysteine
  MOD_RES (610)..(610): Selenocysteine
  MOD_RES (614)..(614): Selenocysteine
  MOD_RES (629)..(629): Selenocysteine
  MOD_RES (633)..(633): Selenocysteine
  MOD_RES (637)..(637): Selenocysteine
  MOD_RES (662)..(662): Selenocysteine
  MOD_RES (707)..(707): Selenocysteine
  MOD_RES (740)..(740): Selenocysteine
  MOD_RES (757)..(757): Selenocysteine
  MOD_RES (774)..(775): Selenocysteine
  MOD_RES (797)..(797): Selenocysteine
  MOD_RES (821)..(821): Selenocysteine
  MOD_RES (878)..(878): Selenocysteine
  MOD_RES (891)..(891): Selenocysteine
  MOD_RES (925)..(925): Selenocysteine
  MOD_RES (942)..(942): Selenocysteine
  MOD_RES (1006)..(1006): Selenocysteine
  MOD_RES (1050)..(1050): Selenocysteine
  MOD_RES (1087)..(1087): Selenocysteine
  MOD_RES (1109)..(1109): Selenocysteine
  MOD_RES (1116)..(1116): Selenocysteine
  MOD_RES (1122)..(1122): Selenocysteine
  MOD_RES (1124)..(1124): Selenocysteine

SEQ ID NO: 25815 - protein, 474 aa, Homo sapiens
  MOD_RES (33)..(33): Selenocysteine
  MOD_RES (70)..(70): Selenocysteine
  MOD_RES (160)..(160): Selenocysteine
  MOD_RES (189)..(189): Selenocysteine
  MOD_RES (203)..(203): Selenocysteine
  MOD_RES (227)..(227): Selenocysteine
  MOD_RES (261)..(261): Selenocysteine
  MOD_RES (263)..(264): Selenocysteine
  MOD_RES (267)..(267): Selenocysteine
  MOD_RES (283)..(283): Selenocysteine
  MOD_RES (309)..(309): Selenocysteine
  MOD_RES (311)..(311): Selenocysteine
  MOD_RES (325)..(325): Selenocysteine
  MOD_RES (387)..(387): Selenocysteine
  MOD_RES (399)..(399): Selenocysteine
  MOD_RES (402)..(402): Selenocysteine
  MOD_RES (411)..(411): Selenocysteine
  MOD_RES (419)..(419): Selenocysteine
  MOD_RES (424)..(424): Selenocysteine
  MOD_RES (426)..(426): Selenocysteine
  MOD_RES (474)..(474): Selenocysteine
MAARAGFQSVAPSGGAGASGGAGAAAALGPGGXPGPPVRMGPAPGQGLYRSPMPGAAYPRPGMLPGSRMXPQGPSMGPPGYGGNPSVRPGLAQSGMDQSRKRPAPQQIQQVQQQAVQNRNHNAKKKKMADKILPQRIRELVPESQAYMDLLAFERKLDQXIMRKRLDIQEALKRPIKQKRKLRIFISNXFNPAKSDAEDGEGXVASWELRVEGRLLEDSALSKYDAXKQKRKFSSFFKSLVIELDKDLYGPDNHLVEWHRXAXXQEXDGFQVKRPGDVNVRCXVLLMLDYQPPQFKLDPRLARLLGIHXQXRPVIIQALWQYIKXHKLQDPHEREFVICDKYLQQIFESQRMKFSEIPQRLHALLMPPEPIIINHVISVDPNDQKKXACYDIDVEVDDXLKXQMNSFLLSXASQQEIAXLDNKXMXDVVGNPEEERRAEFYFQPWAQEAVCRYFYSKVQQRRQELEQALGIRNX

SEQ ID NO: 25816 - protein, 515 aa, Homo sapiens
  MOD_RES (33)..(33): Selenocysteine
  MOD_RES (70)..(70): Selenocysteine
  MOD_RES (160)..(160): Selenocysteine
  MOD_RES (189)..(189): Selenocysteine
  MOD_RES (203)..(203): Selenocysteine
  MOD_RES (227)..(227): Selenocysteine
  MOD_RES (261)..(261): Selenocysteine
  MOD_RES (263)..(264): Selenocysteine
  MOD_RES (267)..(267): Selenocysteine
  MOD_RES (283)..(283): Selenocysteine
  MOD_RES (309)..(309): Selenocysteine
  MOD_RES (311)..(311): Selenocysteine
  MOD_RES (325)..(325): Selenocysteine
  MOD_RES (387)..(387): Selenocysteine
  MOD_RES (399)..(399): Selenocysteine
  MOD_RES (402)..(402): Selenocysteine
  MOD_RES (411)..(411): Selenocysteine
  MOD_RES (419)..(419): Selenocysteine
  MOD_RES (427)..(427): Selenocysteine
  MOD_RES (430)..(430): Selenocysteine
  MOD_RES (436)..(436): Selenocysteine
  MOD_RES (465)..(465): Selenocysteine
  MOD_RES (467)..(467): Selenocysteine
  MOD_RES (515)..(515): Selenocysteine
MAARAGFQSVAPSGGAGASGGAGAAAALGPGGXPGPPVRMGPAPGQGLYRSPMPGAAYPRPGMLPGSRMXPQGPSMGPPGYGGNPSVRPGLAQSGMDQSRKRPAPQQIQQVQQQAVQNRNHNAKKKKMADKILPQRIRELVPESQAYMDLLAFERKLDQXIMRKRLDIQEALKRPIKQKRKLRIFISNXFNPAKSDAEDGEGXVASWELRVEGRLLEDSALSKYDAXKQKRKFSSFFKSLVIELDKDLYGPDNHLVEWHRXAXXQEXDGFQVKRPGDVNVRCXVLLMLDYQPPQFKLDPRLARLLGIHXQXRPVIIQALWQYIKXHKLQDPHEREFVICDKYLQQIFESQRMKFSEIPQRLHALLMPPEPIIINHVISVDPNDQKKXACYDIDVEVDDXLKXQMNSFLLSXASQQEIAXLDNKIHEXIEXINQLKXQREFMLSFARDPQGFINDWLQSQCRDLKXMXDVVGNPEEERRAEFYFQPWAQEAVCRYFYSKVQQRRQELEQALGIRNX

SEQ ID NO: 25817 - protein, 278 aa, Homo sapiens
  MOD_RES (33)..(33): Selenocysteine
  MOD_RES (70)..(70): Selenocysteine
  MOD_RES (160)..(160): Selenocysteine
  MOD_RES (186)..(186): Selenocysteine
  MOD_RES (220)..(220): Selenocysteine
  MOD_RES (222)..(223): Selenocysteine
  MOD_RES (226)..(226): Selenocysteine
  MOD_RES (242)..(242): Selenocysteine
  MOD_RES (268)..(268): Selenocysteine
  MOD_RES (270)..(270): Selenocysteine
MAARAGFQSVAPSGGAGASGGAGAAAALGPGGXPGPPVRMGPAPGQGLYRSPMPGAAYPRPGMLPGSRMXPQGPSMGPPGYGGNPSVRPGLAQSGMDQSRKRPAPQQIQQVQQQAVQNRNHNAKKKKMADKILPQRIRELVPESQAYMDLLAFERKLDQXIMRKRLDIQEALKRPIKSALSKYDAXKQKRKFSSFFKSLVIELDKDLYGPDNHLVEWHRXAXXQEXDGFQVKRPGDVNVRCXVLLMLDYQPPQFKLDPRLARLLGIHXQXRPVIIQAL

SEQ ID NO: 25818 - protein, 290 aa, Homo sapiens
  MOD_RES (33)..(33): Selenocysteine
  MOD_RES (70)..(70): Selenocysteine
  MOD_RES (160)..(160): Selenocysteine
  MOD_RES (181)..(181): Selenocysteine
  MOD_RES (183)..(184): Selenocysteine
  MOD_RES (187)..(187): Selenocysteine
  MOD_RES (203)..(203): Selenocysteine
  MOD_RES (229)..(229): Selenocysteine
  MOD_RES (231)..(231): Selenocysteine
  MOD_RES (245)..(245): Selenocysteine
MAARAGFQSVAPSGGAGASGGAGAAAALGPGGXPGPPVRMGPAPGQGLYRSPMPGAAYPRPGMLPGSRMXPQGPSMGPPGYGGNPSVRPGLAQSGMDQSRKRPAPQQIQQVQQQAVQNRNHNAKKKKMADKILPQRIRELVPESQAYMDLLAFERKLDQXIMRKRLDIQEALKRPIKWHRXAXXQEXDGFQVKRPGDVNVRCXVLLMLDYQPPQFKLDPRLARLLGIHXQXRPVIIQALWQYIKXHKLQDPHEREFVICDKYLQQIFESQRMKFSEIPQRLHALLMPPEP

SEQ ID NO: 25819 - protein, 313 aa, Homo sapiens
  MOD_RES (25)..(25): Selenocysteine
  MOD_RES (59)..(59): Selenocysteine
  MOD_RES (61)..(62): Selenocysteine
  MOD_RES (65)..(65): Selenocysteine
  MOD_RES (81)..(81): Selenocysteine
  MOD_RES (107)..(107): Selenocysteine
  MOD_RES (109)..(109): Selenocysteine
  MOD_RES (123)..(123): Selenocysteine
  MOD_RES (185)..(185): Selenocysteine
  MOD_RES (197)..(197): Selenocysteine
  MOD_RES (200)..(200): Selenocysteine
  MOD_RES (209)..(209): Selenocysteine
  MOD_RES (217)..(217): Selenocysteine
  MOD_RES (225)..(225): Selenocysteine
  MOD_RES (228)..(228): Selenocysteine
  MOD_RES (234)..(234): Selenocysteine
  MOD_RES (263)..(263): Selenocysteine
  MOD_RES (265)..(265): Selenocysteine
  MOD_RES (313)..(313): Selenocysteine
MCNGLLNLPHFPWANEMALSKYDAXKQKRKFSSFFKSLVIELDKDLYGPDNHLVEWHRXAXXQEXDGFQVKRPGDVNVRCXVLLMLDYQPPQFKLDPRLARLLGIHXQXRPVIIQALWQYIKXHKLQDPHEREFVICDKYLQQIFESQRMKFSEIPQRLHALLMPPEPIIINHVISVDPNDQKKXACYDIDVEVDDXLKXQMNSFLLSXASQQEIAXLDNKIHEXIEXINQLKXQREFMLSFARDPQGFINDWLQSQCRDLKXMXDVVGNPEEERRAEFYFQPWAQEAVCRYFYSKVQQRRQELEQALGIRNX

SEQ ID NO: 25820 - protein, 113 aa, Homo sapiens
  MOD_RES (8)..(8): Selenocysteine
  MOD_RES (98)..(98): Selenocysteine
MLPGSRMXPQGPSMGPPGYGGNPSVRPGLAQSGMDQSRKRPAPQQIQQVQQQAVQNRNHNAKKKKMADKILPQRIRELVPESQAYMDLLAFERKLDQXIMRKRLDIQEALKRP

SEQ ID NO: 25821 - protein, 115 aa, Homo sapiens
  MOD_RES (1)..(1): Any amino acid
  MOD_RES (2)..(2): Selenocysteine
  MOD_RES (11)..(11): Selenocysteine
  MOD_RES (19)..(19): Selenocysteine
  MOD_RES (27)..(27): Selenocysteine
  MOD_RES (30)..(30): Selenocysteine
  MOD_RES (36)..(36): Selenocysteine
  MOD_RES (65)..(65): Selenocysteine
  MOD_RES (67)..(67): Selenocysteine
  MOD_RES (115)..(115): Selenocysteine
XXQMNSFLLSXASQQEIAXLDNKIHEXIEXINQLKXQREFMLSFARDPQGFINDWLQSQCRDLKXMXDVVGNPEEERRAEFYFQPWAQEAVCRYFYSKVQQRRQELEQALGIRNX

SEQ ID NO: 25822 - protein, 483 aa, Homo sapiens
  MOD_RES (10)..(10): Selenocysteine
  MOD_RES (62)..(62): Selenocysteine
  MOD_RES (124)..(124): Selenocysteine
  MOD_RES (141)..(141): Selenocysteine
  MOD_RES (153)..(153): Selenocysteine
  MOD_RES (166)..(166): Selenocysteine
  MOD_RES (169)..(169): Selenocysteine
  MOD_RES (173)..(173): Selenocysteine
  MOD_RES (231)..(232): Selenocysteine
  MOD_RES (235)..(235): Selenocysteine
  MOD_RES (251)..(251): Selenocysteine
  MOD_RES (277)..(277): Selenocysteine
  MOD_RES (279)..(279): Selenocysteine
  MOD_RES (355)..(355): Selenocysteine
  MOD_RES (379)..(380): Selenocysteine
  MOD_RES (395)..(395): Selenocysteine
  MOD_RES (404)..(404): Selenocysteine
  MOD_RES (414)..(414): Selenocysteine
  MOD_RES (435)..(435): Selenocysteine
  MOD_RES (483)..(483): Selenocysteine
MGRRVGVEVXPRWAPQKCQGARPQRPGMSPGNRMPMAGLQVGPPAGSPFGAAAPLRPGMPPXMMDPFRKRLLVPQAQPPMPAQRRGLKRRKMADKVLPQRIRELVPESQAYMDLLAFERKLDQXIARKRMEIQEAIKKPLXQKRKLRIYISNXFSPSKAEGDSAGXAGXPGGXPAGDKVASWELRVEGKLLDDPSKQKRKFSSFFKSLVIELDKELYGPDNHLVEWHRMPXXQEXDGFQVKRPGDLNVKCXLLLMLDHQPPQYKLDPRLARLLGVHXQXRAAIMQALWLYIKHNQLQDGHEREYINCNRYFRQIFSCGRLRFSEIPMKLAGLLQHPDPIVINHVISVDPNDQKKXACYDIDVEVDDPLKAQMSNFLASXXNQQEIASLDVKIHEXIESINQLKXQRDFMLSFSXDPQDFIQEWLRSQRRDLKIIXDVIGNPEEERRAAFYHQPWAQEAVGRHIFAKVQQRRQELEQVLGIRLX

SEQ ID NO: 25823 - protein, 494 aa, Homo sapiens
  MOD_RES (73)..(73): Selenocysteine
  MOD_RES (135)..(135): Selenocysteine
  MOD_RES (152)..(152): Selenocysteine
  MOD_RES (164)..(164): Selenocysteine
  MOD_RES (177)..(177): Selenocysteine
  MOD_RES (180)..(180): Selenocysteine
  MOD_RES (184)..(184): Selenocysteine
  MOD_RES (242)..(243): Selenocysteine
  MOD_RES (246)..(246): Selenocysteine
  MOD_RES (262)..(262): Selenocysteine
  MOD_RES (288)..(288): Selenocysteine
  MOD_RES (290)..(290): Selenocysteine
  MOD_RES (366)..(366): Selenocysteine
  MOD_RES (390)..(391): Selenocysteine
  MOD_RES (406)..(406): Selenocysteine
  MOD_RES (415)..(415): Selenocysteine
  MOD_RES (425)..(425): Selenocysteine
  MOD_RES (446)..(446): Selenocysteine
  MOD_RES (494)..(494): Selenocysteine
MSGRGAGGFPLPPLSPGGGAAFRPMGPAGPAAQYQRPGMSPGNRMPMAGLQVGPPAGSPFGAAAPLRPGMPPXMMDPFRKRLLVPQAQPPMPAQRRGLKRRKMADKVLPQRIRELVPESQAYMDLLAFERKLDQXIARKRMEIQEAIKKPLXQKRKLRIYISNXFSPSKAEGDSAGXAGXPGGXPAGDKVASWELRVEGKLLDDPSKQKRKFSSFFKSLVIELDKELYGPDNHLVEWHRMPXXQEXDGFQVKRPGDLNVKCXLLLMLDHQPPQYKLDPRLARLLGVHXQXRAAIMQALWLYIKHNQLQDGHEREYINCNRYFRQIFSCGRLRFSEIPMKLAGLLQHPDPIVINHVISVDPNDQKKXACYDIDVEVDDPLKAQMSNFLASXXNQQEIASLDVKIHEXIESINQLKXQRDFMLSFSXDPQDFIQEWLRSQRRDLKIIXDVIGNPEEERRAAFYHQPWAQEAVGRHIFAKVQQRRQELEQVLGIRLX

SEQ ID NO: 25824 - protein, 69 aa, Homo sapiens
MSGRGAGGFPLPPLSPGGGAVAAALGAPPPPAGPGMLPGPALRGPGPAGGVGGPGAAAFRPMGPAGPAA

SEQ ID NO: 25825 - protein, 531 aa, Homo sapiens
  MOD_RES (110)..(110): Selenocysteine
  MOD_RES (172)..(172): Selenocysteine
  MOD_RES (189)..(189): Selenocysteine
  MOD_RES (201)..(201): Selenocysteine
  MOD_RES (214)..(214): Selenocysteine
  MOD_RES (217)..(217): Selenocysteine
  MOD_RES (221)..(221): Selenocysteine
  MOD_RES (279)..(280): Selenocysteine
  MOD_RES (283)..(283): Selenocysteine
  MOD_RES (299)..(299): Selenocysteine
  MOD_RES (325)..(325): Selenocysteine
  MOD_RES (327)..(327): Selenocysteine
  MOD_RES (403)..(403): Selenocysteine
  MOD_RES (427)..(428): Selenocysteine
  MOD_RES (443)..(443): Selenocysteine
  MOD_RES (452)..(452): Selenocysteine
  MOD_RES (462)..(462): Selenocysteine
  MOD_RES (483)..(483): Selenocysteine
  MOD_RES (531)..(531): Selenocysteine
MSGRGAGGFPLPPLSPGGGAVAAALGAPPPPAGPGMLPGPALRGPGPAGGVGGPGAAAFRPMGPAGPAAQYQRPGMSPGNRMPMAGLQVGPPAGSPFGAAAPLRPGMPPXMMDPFRKRLLVPQAQPPMPAQRRGLKRRKMADKVLPQRIRELVPESQAYMDLLAFERKLDQXIARKRMEIQEAIKKPLXQKRKLRIYISNXFSPSKAEGDSAGXAGXPGGXPAGDKVASWELRVEGKLLDDPSKQKRKFSSFFKSLVIELDKELYGPDNHLVEWHRMPXXQEXDGFQVKRPGDLNVKCXLLLMLDHQPPQYKLDPRLARLLGVHXQXRAAIMQALWLYIKHNQLQDGHEREYINCNRYFRQIFSCGRLRFSEIPMKLAGLLQHPDPIVINHVISVDPNDQKKXACYDIDVEVDDPLKAQMSNFLASXXNQQEIASLDVKIHEXIESINQLKXQRDFMLSFSXDPQDFIQEWLRSQRRDLKIIXDVIGNPEEERRAAFYHQPWAQEAVGRHIFAKVQQRRQELEQVLGIRLX

SEQ ID NO: 25826 - protein, 80 aa, Homo sapiens
MSGRGAGGFPLPPLSPGGGAVAAALGAPPPPAGPGMLPGPALRGPGPAGGVGGPGAAAFRPMGPAGPAAQYQVKEEEDGR

SEQ ID NO: 25827 - protein, 456 aa, Homo sapiens
  MOD_RES (35)..(35): Selenocysteine
  MOD_RES (97)..(97): Selenocysteine
  MOD_RES (114)..(114): Selenocysteine
  MOD_RES (126)..(126): Selenocysteine
  MOD_RES (139)..(139): Selenocysteine
  MOD_RES (142)..(142): Selenocysteine
  MOD_RES (146)..(146): Selenocysteine
  MOD_RES (204)..(205): Selenocysteine
  MOD_RES (208)..(208): Selenocysteine
  MOD_RES (224)..(224): Selenocysteine
  MOD_RES (250)..(250): Selenocysteine
  MOD_RES (252)..(252): Selenocysteine
  MOD_RES (328)..(328): Selenocysteine
  MOD_RES (352)..(353): Selenocysteine
  MOD_RES (368)..(368): Selenocysteine
  MOD_RES (377)..(377): Selenocysteine
  MOD_RES (387)..(387): Selenocysteine
  MOD_RES (408)..(408): Selenocysteine
  MOD_RES (456)..(456): Selenocysteine
MSPGNRMPMAGLQVGPPAGSPFGAAAPLRPGMPPXMMDPFRKRLLVPQAQPPMPAQRRGLKRRKMADKVLPQRIRELVPESQAYMDLLAFERKLDQXIARKRMEIQEAIKKPLXQKRKLRIYISNXFSPSKAEGDSAGXAGXPGGXPAGDKVASWELRVEGKLLDDPSKQKRKFSSFFKSLVIELDKELYGPDNHLVEWHRMPXXQEXDGFQVKRPGDLNVKCXLLLMLDHQPPQYKLDPRLARLLGVHXQXRAAIMQALWLYIKHNQLQDGHEREYINCNRYFRQIFSCGRLRFSEIPMKLAGLLQHPDPIVINHVISVDPNDQKKXACYDIDVEVDDPLKAQMSNFLASXXNQQEIASLDVKIHEXIESINQLKXQRDFMLSFSXDPQDFIQEWLRSQRRDLKIIXDVIGNPEEERRAAFYHQPWAQEAVGRHIFAKVQQRRQELEQVLGIRLX

SEQ ID NO: 25828 - protein, 109 aa, Homo sapiens
  MOD_RES (38)..(38): Selenocysteine
  MOD_RES (82)..(82): Selenocysteine
RPGMSPGNRMPMAGLQVGPPAGSPFGAAAPLRPGMPPXMMDPFRKRLLVPQAQPPMPAQRRGLKRRKMADKVLPQRVSVKRXPGRPAQWPPWDPGACSRVSGVHGSLGF

SEQ ID NO: 25829 - protein, 231 aa, Homo sapiens
  MOD_RES (1)..(1): Any amino acid
  MOD_RES (20)..(21): Selenocysteine
  MOD_RES (24)..(24): Selenocysteine
  MOD_RES (40)..(40): Selenocysteine
  MOD_RES (66)..(66): Selenocysteine
  MOD_RES (68)..(68): Selenocysteine
  MOD_RES (144)..(144): Selenocysteine
  MOD_RES (168)..(169): Selenocysteine
  MOD_RES (183)..(183): Selenocysteine
  MOD_RES (231)..(231): Selenocysteine
XDKELYGPDNHLVEWHRMPXXQEXDGFQVKRPGDLNVKCXLLLMLDHQPPQYKLDPRLARLLGVHXQXRAAIMQALWLYIKHNQLQDGHEREYINCNRYFRQIFSCGRLRFSEIPMKLAGLLQHPDPIVINHVISVDPNDQKKXACYDIDVEVDDPLKAQMSNFLASXXNQQEIASLDVKIIXDVIGNPEEERRAAFYHQPWAQEAVGRHIFAKVQQRRQELEQVLGIRLX

SEQ ID NO: 25830 - protein, 483 aa, Homo sapiens
  MOD_RES (14)..(14): Selenocysteine
  MOD_RES (90)..(90): Selenocysteine
  MOD_RES (135)..(135): Selenocysteine
  MOD_RES (164)..(164): Selenocysteine
  MOD_RES (229)..(229): Selenocysteine
  MOD_RES (231)..(232): Selenocysteine
  MOD_RES (235)..(235): Selenocysteine
  MOD_RES (251)..(251): Selenocysteine
  MOD_RES (277)..(277): Selenocysteine
  MOD_RES (293)..(293): Selenocysteine
  MOD_RES (330)..(330): Selenocysteine
  MOD_RES (355)..(355): Selenocysteine
  MOD_RES (379)..(379): Selenocysteine
  MOD_RES (395)..(395): Selenocysteine
  MOD_RES (435)..(435): Selenocysteine
  MOD_RES (483)..(483): Selenocysteine
MAADEVAGGARKAXKSKLFEFLVHGVRPGMPSGARMPHQGAPMGPPGSPYMGSPAVRPGLAPAGMEPARKRAAPPPGQSQAQSQGQPVPXAPARSRSAKRRKMADKILPQRIRELVPESQAYMDLLAFERKLDQXIMRKRVDIQEALKRPMKQKRKLRLYISNXFNPAKPDAEDSDGSIASWELRVEGKLLDDPSKQKRKFSSFFKSLVIELDKDLYGPDNHLVEWHRXPXXQEXDGFQVKRPGDLSVRCXLLLMLDYQPPQFKLDPRLARLLGLHXQSRSAIVQALWQYVKXNRLQDSHDKEYINGDKYFQQIFDCPRLKFSEIPQRLXALLLPPDPIVINHVISVDPSDQKKXACYDIDVEVEEPLKGQMSSFLLSXANQQEISALDSKIHEXIESINQLKIQRDFMLSFSRDPKGYVQDLLRSQSRDLKVMXDVAGNPEEERRAEFYHQPWSQEAVSRYFYCKIQQRRQELEQSLVVRNX

SEQ ID NO: 25831 - protein, 73 aa, Homo sapiens
  MOD_RES (2)..(2): Selenocysteine
  MOD_RES (19)..(19): Selenocysteine
  MOD_RES (23)..(23): Selenocysteine
  MOD_RES (32)..(32): Selenocysteine
  MOD_RES (49)..(49): Selenocysteine
  MOD_RES (51)..(51): Selenocysteine
  MOD_RES (69)..(69): Selenocysteine
MXLQVQDPAIYDSRSSAPXHRGXVPRGGRWLXKSSLKGFGSWSPSPRLXWXSWHLRGNWIKPSCGSGWXSRRL

SEQ ID NO: 25832 - protein, 139 aa, Homo sapiens
  MOD_RES (2)..(2): Selenocysteine
  MOD_RES (10)..(10): Selenocysteine
  MOD_RES (77)..(77): Selenocysteine
  MOD_RES (122)..(122): Selenocysteine
MXPGLQHPPXVVQRPGMPSGARMPHQGAPMGPPGSPYMGSPAVRPGLAPAGMEPARKRAAPPPGQSQAQSQGQPVPXAPARSRSAKRRKMADKILPQRIRELVPESQAYMDLLAFERKLDQXIMRKRVDIQEALKRPMK

SEQ ID NO: 25833 - protein, 470 aa, Homo sapiens
  MOD_RES (2)..(2): Selenocysteine
  MOD_RES (10)..(10): Selenocysteine
  MOD_RES (77)..(77): Selenocysteine
  MOD_RES (122)..(122): Selenocysteine
  MOD_RES (151)..(151): Selenocysteine
  MOD_RES (216)..(216): Selenocysteine
  MOD_RES (218)..(219): Selenocysteine
  MOD_RES (222)..(222): Selenocysteine
  MOD_RES (238)..(238): Selenocysteine
  MOD_RES (264)..(264): Selenocysteine
  MOD_RES (280)..(280): Selenocysteine
  MOD_RES (317)..(317): Selenocysteine
  MOD_RES (342)..(342): Selenocysteine
  MOD_RES (366)..(366): Selenocysteine
  MOD_RES (382)..(382): Selenocysteine
  MOD_RES (422)..(422): Selenocysteine
  MOD_RES (470)..(470): Selenocysteine
MXPGLQHPPXVVQRPGMPSGARMPHQGAPMGPPGSPYMGSPAVRPGLAPAGMEPARKRAAPPPGQSQAQSQGQPVPXAPARSRSAKRRKMADKILPQRIRELVPESQAYMDLLAFERKLDQXIMRKRVDIQEALKRPMKQKRKLRLYISNXFNPAKPDAEDSDGSIASWELRVEGKLLDDPSKQKRKFSSFFKSLVIELDKDLYGPDNHLVEWHRXPXXQEXDGFQVKRPGDLSVRCXLLLMLDYQPPQFKLDPRLARLLGLHXQSRSAIVQALWQYVKXNRLQDSHDKEYINGDKYFQQIFDCPRLKFSEIPQRLXALLLPPDPIVINHVISVDPSDQKKXACYDIDVEVEEPLKGQMSSFLLSXANQQEISALDSKIHEXIESINQLKIQRDFMLSFSRDPKGYVQDLLRSQSRDLKVMXDVAGNPEEERRAEFYHQPWSQEAVSRYFYCKIQQRRQELEQSLVVRNX

SEQ ID NO: 25834 - protein, 68 aa, Homo sapiens
  MOD_RES (1)..(1): Any amino acid
  MOD_RES (27)..(27): Selenocysteine
  MOD_RES (44)..(44): Selenocysteine
  MOD_RES (46)..(46): Selenocysteine
  MOD_RES (64)..(64): Selenocysteine
XRHRARASRCPPPPRGAAVPRGGRWLXKSSLKGFGSWSPSPRLXWXSWHLRGNWIKPSCGSGWXSRRL

SEQ ID NO: 25835 - protein, 157 aa, Homo sapiens
  MOD_RES (14)..(15): Selenocysteine
  MOD_RES (57)..(57): Selenocysteine
  MOD_RES (136)..(136): Selenocysteine
  MOD_RES (147)..(147): Selenocysteine
  MOD_RES (149)..(149): Selenocysteine
  MOD_RES (153)..(153): Selenocysteine
LSESVVPDVRSVVXXARMQVLKRQVQSLMVHQRKLEAELLQIEERHQEKKRKFLESXDSFNNELKRLCGLKVEVDMEKIAAEIAQAEEQARKRQEEREKEAAEQAERSQSSIVPEEEQAANKGEEKKDDENIPMEXEKNCQLCPRKXLXSRYXDFPD

SEQ ID NO: 25836 - protein, 153 aa, Homo sapiens
  MOD_RES (4)..(4): Selenocysteine
  MOD_RES (29)..(29): Selenocysteine
  MOD_RES (34)..(34): Selenocysteine
  MOD_RES (40)..(40): Selenocysteine
  MOD_RES (90)..(90): Selenocysteine
MPSXPGFVGYNPYSHLAYNNYRLGGNPGXNSRVXASSGIXIPKPPKPPDKPLMPYMRYSRKVWDQVKASNPDLKLWEIGKIIGGMWRDLXDEEKQEYLNEYEAEKIEYNESMKAYHNSPAYLAYINAKSRAEAALEEESRQRQSRMEKGEPYM

SEQ ID NO: 25837 - protein, 393 aa, Homo sapiens
  MOD_RES (4)..(4): Selenocysteine
  MOD_RES (29)..(29): Selenocysteine
  MOD_RES (34)..(34): Selenocysteine
  MOD_RES (40)..(40): Selenocysteine
  MOD_RES (90)..(90): Selenocysteine
  MOD_RES (173)..(173): Selenocysteine
  MOD_RES (175)..(175): Selenocysteine
  MOD_RES (202)..(203): Selenocysteine
  MOD_RES (245)..(245): Selenocysteine
  MOD_RES (324)..(324): Selenocysteine
  MOD_RES (327)..(327): Selenocysteine
  MOD_RES (332)..(333): Selenocysteine
  MOD_RES (343)..(343): Selenocysteine
  MOD_RES (345)..(345): Selenocysteine
  MOD_RES (364)..(364): Selenocysteine
  MOD_RES (369)..(369): Selenocysteine
  MOD_RES (377)..(377): Selenocysteine
  MOD_RES (383)..(383): Selenocysteine
MPSXPGFVGYNPYSHLAYNNYRLGGNPGXNSRVXASSGIXIPKPPKPPDKPLMPYMRYSRKVWDQVKASNPDLKLWEIGKIIGGMWRDLXDEEKQEYLNEYEAEKIEYNESMKAYHNSPAYLAYINAKSRAEAALEEESRQRQSRMEKGEPYMSIQPAEDPDDYDDGFSMKHXAXARFQRNHRLISEILSESVVPDVRSVVXXARMQVLKRQVQSLMVHQRKLEAELLQIEERHQEKKRKFLESXDSFNNELKRLCGLKVEVDMEKIAAEIAQAEEQARKRQEEREKEAAEQAERSQSSIVPEEEQAANKGEEKKDDENIPMEXEEXHLEEXXESQQNGEEGXSXPEDKESGQEGVDSMAEEGXSDSNXGSESNSAXVEEPPXDPIPEDEKKE

SEQ ID NO: 25838 - protein, 101 aa, Homo sapiens
  MOD_RES (38)..(38): Selenocysteine
MPYMRYSRKVWDQVKASNPDLKLWEIGKIIGGMWRDLXDEEKQEYLNEYEAEKIEYNESMKAYHNSPAYLAYINAKSRAEAALEEESRQRQSRMEKGEPYM

SEQ ID NO: 25839 - protein, 293 aa, Homo sapiens
  MOD_RES (38)..(38): Selenocysteine
  MOD_RES (121)..(121): Selenocysteine
  MOD_RES (123)..(123): Selenocysteine
  MOD_RES (150)..(151): Selenocysteine
  MOD_RES (193)..(193): Selenocysteine
  MOD_RES (272)..(272): Selenocysteine
  MOD_RES (283)..(283): Selenocysteine
  MOD_RES (285)..(285): Selenocysteine
  MOD_RES (289)..(289): Selenocysteine
MPYMRYSRKVWDQVKASNPDLKLWEIGKIIGGMWRDLXDEEKQEYLNEYEAEKIEYNESMKAYHNSPAYLAYINAKSRAEAALEEESRQRQSRMEKGEPYMSIQPAEDPDDYDDGFSMKHXAXARFQRNHRLISEILSESVVPDVRSVVXXARMQVLKRQVQSLMVHQRKLEAELLQIEERHQEKKRKFLESXDSFNNELKRLCGLKVEVDMEKIAAEIAQAEEQARKRQEEREKEAAEQAERSQSSIVPEEEQAANKGEEKKDDENIPMEXEKNCQLCPRKXLXSRYXDFPD

SEQ ID NO: 25840 - protein, 341 aa, Homo sapiens
  MOD_RES (38)..(38): Selenocysteine
  MOD_RES (121)..(121): Selenocysteine
  MOD_RES (123)..(123): Selenocysteine
  MOD_RES (150)..(151): Selenocysteine
  MOD_RES (193)..(193): Selenocysteine
  MOD_RES (272)..(272): Selenocysteine
  MOD_RES (275)..(275): Selenocysteine
  MOD_RES (280)..(281): Selenocysteine
  MOD_RES (291)..(291): Selenocysteine
  MOD_RES (293)..(293): Selenocysteine
  MOD_RES (312)..(312): Selenocysteine
  MOD_RES (317)..(317): Selenocysteine
  MOD_RES (325)..(325): Selenocysteine
  MOD_RES (331)..(331): Selenocysteine
MPYMRYSRKVWDQVKASNPDLKLWEIGKIIGGMWRDLXDEEKQEYLNEYEAEKIEYNESMKAYHNSPAYLAYINAKSRAEAALEEESRQRQSRMEKGEPYMSIQPAEDPDDYDDGFSMKHXAXARFQRNHRLISEILSESVVPDVRSVVXXARMQVLKRQVQSLMVHQRKLEAELLQIEERHQEKKRKFLESXDSFNNELKRLCGLKVEVDMEKIAAEIAQAEEQARKRQEEREKEAAEQAERSQSSIVPEEEQAANKGEEKKDDENIPMEXEEXHLEEXXESQQNGEEGXSXPEDKESGQEGVDSMAEEGXSDSNXGSESNSAXVEEPPXDPIPEDEKKE

SEQ ID NO: 25841 - protein, 288 aa, Homo sapiens
  MOD_RES (6)..(6): Selenocysteine
  MOD_RES (31)..(31): Selenocysteine
  MOD_RES (36)..(36): Selenocysteine
  MOD_RES (42)..(42): Selenocysteine
  MOD_RES (92)..(92): Selenocysteine
  MOD_RES (175)..(175): Selenocysteine
  MOD_RES (177)..(177): Selenocysteine
  MOD_RES (204)..(205): Selenocysteine
  MOD_RES (247)..(247): Selenocysteine
MQMPSXPGFVGYNPYSHLAYNNYRLGGNPGXNSRVXASSGIXIPKPPKPPDKPLMPYMRYSRKVWDQVKASNPDLKLWEIGKIIGGMWRDLXDEEKQEYLNEYEAEKIEYNESMKAYHNSPAYLAYINAKSRAEAALEEESRQRQSRMEKGEPYMSIQPAEDPDDYDDGFSMKHXAXARFQRNHRLISEILSESVVPDVRSVVXXARMQVLKRQVQSLMVHQRKLEAELLQIEERHQEKKRKFLESXDSFNNELKRLCGLKVEVDMEKIAAEIAQAEEQARKRQEERE

SEQ ID NO: 25842 - protein, 328 aa, Homo sapiens
  MOD_RES (12)..(12): Selenocysteine
  MOD_RES (17)..(17): Selenocysteine
  MOD_RES (23)..(23): Selenocysteine
  MOD_RES (73)..(73): Selenocysteine
  MOD_RES (156)..(156): Selenocysteine
  MOD_RES (158)..(158): Selenocysteine
  MOD_RES (185)..(186): Selenocysteine
  MOD_RES (228)..(228): Selenocysteine
  MOD_RES (307)..(307): Selenocysteine
  MOD_RES (318)..(318): Selenocysteine
  MOD_RES (320)..(320): Selenocysteine
  MOD_RES (324)..(324): Selenocysteine
MSKRPSYAPPPXPAPAXASSGIXIPKPPKPPDKPLMPYMRYSRKVWDQVKASNPDLKLWEIGKIIGGMWRDLXDEEKQEYLNEYEAEKIEYNESMKAYHNSPAYLAYINAKSRAEAALEEESRQRQSRMEKGEPYMSIQPAEDPDDYDDGFSMKHXAXARFQRNHRLISEILSESVVPDVRSVVXXARMQVLKRQVQSLMVHQRKLEAELLQIEERHQEKKRKFLESXDSFNNELKRLCGLKVEVDMEKIAAEIAQAEEQARKRQEEREKEAAEQAERSQSSIVPEEEQAANKGEEKKDDENIPMEXEKNCQLCPRKXLXSRYXDFPD

SEQ ID NO: 25843 - protein, 376 aa, Homo sapiens
  MOD_RES (12)..(12): Selenocysteine
  MOD_RES (17)..(17): Selenocysteine
  MOD_RES (23)..(23): Selenocysteine
  MOD_RES (73)..(73): Selenocysteine
  MOD_RES (156)..(156): Selenocysteine
  MOD_RES (158)..(158): Selenocysteine
  MOD_RES (185)..(186): Selenocysteine
  MOD_RES (228)..(228): Selenocysteine
  MOD_RES (307)..(307): Selenocysteine
  MOD_RES (310)..(310): Selenocysteine
  MOD_RES (315)..(316): Selenocysteine
  MOD_RES (326)..(326): Selenocysteine
  MOD_RES (328)..(328): Selenocysteine
  MOD_RES (347)..(347): Selenocysteine
  MOD_RES (352)..(352): Selenocysteine
  MOD_RES (360)..(360): Selenocysteine
  MOD_RES (366)..(366): Selenocysteine
MSKRPSYAPPPXPAPAXASSGIXIPKPPKPPDKPLMPYMRYSRKVWDQVKASNPDLKLWEIGKIIGGMWRDLXDEEKQEYLNEYEAEKIEYNESMKAYHNSPAYLAYINAKSRAEAALEEESRQRQSRMEKGEPYMSIQPAEDPDDYDDGFSMKHXAXARFQRNHRLISEILSESVVPDVRSVVXXARMQVLKRQVQSLMVHQRKLEAELLQIEERHQEKKRKFLESXDSFNNELKRLCGLKVEVDMEKIAAEIAQAEEQARKRQEEREKEAAEQAERSQSSIVPEEEQAANKGEEKKDDENIPMEXEEXHLEEXXESQQNGEEGXSXPEDKESGQEGVDSMAEEGXSDSNXGSESNSAXVEEPPXDPIPEDEKKE

SEQ ID NO: 25844 - protein, 129 aa, Homo sapiens
  MOD_RES (12)..(12): Selenocysteine
  MOD_RES (17)..(17): Selenocysteine
  MOD_RES (22)..(22): Selenocysteine
  MOD_RES (47)..(47): Selenocysteine
  MOD_RES (52)..(52): Selenocysteine
  MOD_RES (58)..(58): Selenocysteine
  MOD_RES (108)..(108): Selenocysteine
MSKRPSYAPPPXPAPAXQMPSXPGFVGYNPYSHLAYNNYRLGGNPGXNSRVXASSGIXIPKPPKPPDKPLMPYMRYSRKVWDQVKASNPDLKLWEIGKIIGGMWRDLXDEEKQEYLNEYEAEKIEYNES

SEQ ID NO: 25845 - protein, 411 aa, Homo sapiens
  MOD_RES (12)..(12): Selenocysteine
  MOD_RES (17)..(17): Selenocysteine
  MOD_RES (22)..(22): Selenocysteine
  MOD_RES (47)..(47): Selenocysteine
  MOD_RES (52)..(52): Selenocysteine
  MOD_RES (58)..(58): Selenocysteine
  MOD_RES (108)..(108): Selenocysteine
  MOD_RES (191)..(191): Selenocysteine
  MOD_RES (193)..(193): Selenocysteine
  MOD_RES (220)..(221): Selenocysteine
  MOD_RES (263)..(263): Selenocysteine
  MOD_RES (342)..(342): Selenocysteine
  MOD_RES (345)..(345): Selenocysteine
  MOD_RES (350)..(351): Selenocysteine
  MOD_RES (361)..(361): Selenocysteine
  MOD_RES (363)..(363): Selenocysteine
  MOD_RES (382)..(382): Selenocysteine
  MOD_RES (387)..(387): Selenocysteine
  MOD_RES (395)..(395): Selenocysteine
  MOD_RES (401)..(401): Selenocysteine
MSKRPSYAPPPXPAPAXQMPSXPGFVGYNPYSHLAYNNYRLGGNPGXNSRVXASSGIXIPKPPKPPDKPLMPYMRYSRKVWDQVKASNPDLKLWEIGKIIGGMWRDLXDEEKQEYLNEYEAEKIEYNESMKAYHNSPAYLAYINAKSRAEAALEEESRQRQSRMEKGEPYMSIQPAEDPDDYDDGFSMKHXAXARFQRNHRLISEILSESVVPDVRSVVXXARMQVLKRQVQSLMVHQRKLEAELLQIEERHQEKKRKFLESXDSFNNELKRLCGLKVEVDMEKIAAEIAQAEEQARKRQEEREKEAAEQAERSQSSIVPEEEQAANKGEEKKDDENIPMEXEEXHLEEXXESQQNGEEGXSXPEDKESGQEGVDSMAEEGXSDSNXGSESNSAXVEEPPXDPIPEDEKKE

SEQ ID NO: 25846 - protein, 55 aa, Homo sapiens
  MOD_RES (12)..(12): Selenocysteine
  MOD_RES (17)..(17): Selenocysteine
  MOD_RES (22)..(22): Selenocysteine
  MOD_RES (47)..(47): Selenocysteine
  MOD_RES (52)..(52): Selenocysteine
MSKRPSYAPPPXPAPAXQMPSXPGFVGYNPYSHLAYNNYRLGGNPGXNSRVXEIS

SEQ ID NO: 25847 - protein, 77 aa, Homo sapiens
  MOD_RES (12)..(12): Selenocysteine
  MOD_RES (17)..(17): Selenocysteine
  MOD_RES (22)..(22): Selenocysteine
  MOD_RES (47)..(47): Selenocysteine
  MOD_RES (52)..(52): Selenocysteine
  MOD_RES (57)..(57): Selenocysteine
  MOD_RES (59)..(59): Selenocysteine
  MOD_RES (68)..(68): Selenocysteine
MSKRPSYAPPPXPAPAXQMPSXPGFVGYNPYSHLAYNNYRLGGNPGXNSRVXVGESXIXASGKQLELXRNAFRIRSF

SEQ ID NO: 25848 - protein, 52 aa, Homo sapiens
  MOD_RES (3)..(3): Selenocysteine
  MOD_RES (8)..(8): Selenocysteine
  MOD_RES (47)..(47): Selenocysteine
  MOD_RES (51)..(51): Selenocysteine
MSXNAQHXRVCGIQSIQSSRLQQLQAGREPGHQQPGHGILWYHDSKXPKAXR

SEQ ID NO: 25849 - protein, 177 aa, Homo sapiens
  MOD_RES (1)..(1): Any amino acid
  MOD_RES (5)..(5): Selenocysteine
  MOD_RES (7)..(7): Selenocysteine
  MOD_RES (34)..(35): Selenocysteine
  MOD_RES (77)..(77): Selenocysteine
  MOD_RES (156)..(156): Selenocysteine
  MOD_RES (167)..(167): Selenocysteine
  MOD_RES (169)..(169): Selenocysteine
  MOD_RES (173)..(173): Selenocysteine
XMKHXAXARFQRNHRLISEILSESVVPDVRSVVXXARMQVLKRQVQSLMVHQRKLEAELLQIEERHQEKKRKFLESXDSFNNELKRLCGLKVEVDMEKIAAEIAQAEEQARKRQEEREKEAAEQAERSQSSIVPEEEQAANKGEEKKDDENIPMEXEKNCQLCPRKXLXSRYXDFPD

SEQ ID NO: 25850 - protein, 54 aa, Homo sapiens
  MOD_RES (28)..(28): Selenocysteine
MGFLKLIEIENFKSYKGRQIIGPFQRFXAIIGPNGSGCCGIYCHEEPQREDSSI

SEQ ID NO: 25851 - protein, 1233 aa, Homo sapiens
  MOD_RES (28)..(28): Selenocysteine
  MOD_RES (53)..(53): Selenocysteine
  MOD_RES (60)..(60): Selenocysteine
  MOD_RES (93)..(93): Selenocysteine
  MOD_RES (152)..(152): Selenocysteine
  MOD_RES (182)..(182): Selenocysteine
  MOD_RES (305)..(305): Selenocysteine
  MOD_RES (366)..(366): Selenocysteine
  MOD_RES (388)..(388): Selenocysteine
  MOD_RES (417)..(417): Selenocysteine
  MOD_RES (443)..(444): Selenocysteine
  MOD_RES (460)..(460): Selenocysteine
  MOD_RES (526)..(526): Selenocysteine
  MOD_RES (535)..(535): Selenocysteine
  MOD_RES (552)..(552): Selenocysteine
  MOD_RES (569)..(569): Selenocysteine
  MOD_RES (581)..(581): Selenocysteine
  MOD_RES (638)..(638): Selenocysteine
  MOD_RES (644)..(644): Selenocysteine
  MOD_RES (682)..(682): Selenocysteine
  MOD_RES (722)..(722): Selenocysteine
  MOD_RES (724)..(724): Selenocysteine
  MOD_RES (815)..(815): Selenocysteine
  MOD_RES (841)..(841): Selenocysteine
  MOD_RES (866)..(866): Selenocysteine
  MOD_RES (906)..(906): Selenocysteine
  MOD_RES (913)..(913): Selenocysteine
  MOD_RES (917)..(917): Selenocysteine
  MOD_RES (946)..(946): Selenocysteine
  MOD_RES (1005)..(1005): Selenocysteine
  MOD_RES (1041)..(1041): Selenocysteine
  MOD_RES (1079)..(1079): Selenocysteine
  MOD_RES (1134)..(1134): Selenocysteine
  MOD_RES (1165)..(1165): Selenocysteine
  MOD_RES (1179)..(1179): Selenocysteine
  MOD_RES (1195)..(1195): Selenocysteine
  MOD_RES (1217)..(1217): Selenocysteine
  MOD_RES (1221)..(1221): Selenocysteine
MGFLKLIEIENFKSYKGRQIIGPFQRFXAIIGPNGSGKSNLMDAISFVLGEKXSNLRVKXLRDLIHGAPVGKPAANRAFVSMVYSEEGAEDRXFARVIVGGSSEYKINNKVVQLHEYSEELEKLGILIKARNFLVFQGAVESIAMKNPKERXALFEEISRSGELAQEYDKRKKEMVKAEEDXQFNYHRKKNIAAERKEAKQEKEEADRYQRLKDEVVRAQVQLQLFKLYHNEVEIEKLNKELASKNKEIEKDKKRMDKVEDELKEKKKELGKMMREQQQIEKEIKEKDSELNQKRPQYIKAKENXSHKIKKLEAAKKSLQNAQKHYKKRKGDMDELEKEMLSVEKARQEFEERMEEESQSQGRDLXLEENQVKKYHRLKEEASKRAAXLAQELEKFNRDQKADQDRLDLEERKKVEXEAKIKQKLREIEENQKRIEKLEEYIXXSKQSLEEQKKLEGELXEEVEMAKRRIDEINKELNQVMEQLGDARIDRQESSRQQRKAEIMESIKRLYPGSVYGRLIDLCQPXQKKYQIAVXKVLGKNMDAIIVDSEKXGRDCIQYIKEQRGEPEXFLPLDYLEVKPXDEKLRELKGAKLVIDVIRYEPPHIKKALQYACGNALVCDNVEDARRIAFGGHQRHKXVALDGXLFQKSGVISGGASDLKAKARRWDEKAVDKLKEKKERLXEELKEQMKAKRKEAELRQVQSQAHGLQMRLKYSQSDLEQXKXRHLALNLQEKSKLESELANFGPRINDIKRIIQSREREMKDLKEKMNQVEDEVFEEFCREIGVRNIREFEEEKVKRQNEIAKKRLEFENQKXRLGIQLDFEKNQLKEDQDKVHMWEQXVKKDENEIEKLKKEEQRHMKIIDEXMAQLQDLKNQHLAKKSEVNDKNHEMEEIRKKLGGANKEMXHLQKEVXAIEXKLEQKRSDRHNLLQACKMQDIKLPLSKGXMDDISQEEGSSQGEDSVSGSQRISSIYAREALIEIDYGDLCEDLKDAQAEEEIKQEMNXLQQKLNEQQSVLQRIAAPNMKAMEKLESVRDKFQEXSDEFEAARKRAKKAKQAFEQIKKERFDRFNACFESVAXNIDEIYKALSRNSSAQAFLGPENPEEPYLDGINYNCVAPGKRFRPMDNLSGGEKXVAALALLFAIHSYKPAPFFVLDEIDAALDNXNIGKVANYIKEQSXCNFQAIVISLKEEFYXKAESLIGVYPEQGDCVISKVLXFDLXKYPDANPNPNEQ

SEQ ID NO: 25852 - protein, 262 aa, Homo sapiens
  MOD_RES (8)..(8): Selenocysteine
  MOD_RES (31)..(31): Selenocysteine
  MOD_RES (38)..(38): Selenocysteine
  MOD_RES (71)..(71): Selenocysteine
  MOD_RES (130)..(130): Selenocysteine
  MOD_RES (160)..(160): Selenocysteine
MLEVSIPXPHRYVRGKSNLMDAISFVLGEKXSNLRVKXLRDLIHGAPVGKPAANRAFVSMVYSEEGAEDRXFARVIVGGSSEYKINNKVVQLHEYSEELEKLGILIKARNFLVFQGAVESIAMKNPKERXALFEEISRSGELAQEYDKRKKEMVKAEEDXQFNYHRKKNIAAERKEAKQEKEEADRYQRLKDEVVRAQVQLQLFKLYHNEVEIEKLNKELASKNKEIEKDKKRMDKVEDELKEKKKELGKMMREQQQIEKEI

SEQ ID NO: 25853 - protein, 1211 aa, Homo sapiens
  MOD_RES (8)..(8): Selenocysteine
  MOD_RES (31)..(31): Selenocysteine
  MOD_RES (38)..(38): Selenocysteine
  MOD_RES (71)..(71): Selenocysteine
  MOD_RES (130)..(130): Selenocysteine
  MOD_RES (160)..(160): Selenocysteine
  MOD_RES (283)..(283): Selenocysteine
  MOD_RES (344)..(344): Selenocysteine
  MOD_RES (366)..(366): Selenocysteine
  MOD_RES (395)..(395): Selenocysteine
  MOD_RES (421)..(422): Selenocysteine
  MOD_RES (438)..(438): Selenocysteine
  MOD_RES (504)..(504): Selenocysteine
  MOD_RES (513)..(513): Selenocysteine
  MOD_RES (530)..(530): Selenocysteine
  MOD_RES (547)..(547): Selenocysteine
  MOD_RES (559)..(559): Selenocysteine
  MOD_RES (616)..(616): Selenocysteine
  MOD_RES (622)..(622): Selenocysteine
  MOD_RES (660)..(660): Selenocysteine
  MOD_RES (700)..(700): Selenocysteine
  MOD_RES (702)..(702): Selenocysteine
  MOD_RES (793)..(793): Selenocysteine
  MOD_RES (819)..(819): Selenocysteine
  MOD_RES (844)..(844): Selenocysteine
  MOD_RES (884)..(884): Selenocysteine
  MOD_RES (891)..(891): Selenocysteine
  MOD_RES (895)..(895): Selenocysteine
  MOD_RES (924)..(924): Selenocysteine
  MOD_RES (983)..(983): Selenocysteine
  MOD_RES (1019)..(1019): Selenocysteine
  MOD_RES (1057)..(1057): Selenocysteine
  MOD_RES (1112)..(1112): Selenocysteine
  MOD_RES (1143)..(1143): Selenocysteine
  MOD_RES (1157)..(1157): Selenocysteine
  MOD_RES (1173)..(1173): Selenocysteine
  MOD_RES (1195)..(1195): Selenocysteine
  MOD_RES (1199)..(1199): Selenocysteine
MLEVSIPXPHRYVRGKSNLMDAISFVLGEKXSNLRVKXLRDLIHGAPVGKPAANRAFVSMVYSEEGAEDRXFARVIVGGSSEYKINNKVVQLHEYSEELEKLGILIKARNFLVFQGAVESIAMKNPKERXALFEEISRSGELAQEYDKRKKEMVKAEEDXQFNYHRKKNIAAERKEAKQEKEEADRYQRLKDEVVRAQVQLQLFKLYHNEVEIEKLNKELASKNKEIEKDKKRMDKVEDELKEKKKELGKMMREQQQIEKEIKEKDSELNQKRPQYIKAKENXSHKIKKLEAAKKSLQNAQKHYKKRKGDMDELEKEMLSVEKARQEFEERMEEESQSQGRDLXLEENQVKKYHRLKEEASKRAAXLAQELEKFNRDQKADQDRLDLEERKKVEXEAKIKQKLREIEENQKRIEKLEEYIXXSKQSLEEQKKLEGELXEEVEMAKRRIDEINKELNQVMEQLGDARIDRQESSRQQRKAEIMESIKRLYPGSVYGRLIDLCQPXQKKYQIAVXKVLGKNMDAIIVDSEKXGRDCIQYIKEQRGEPEXFLPLDYLEVKPXDEKLRELKGAKLVIDVIRYEPPHIKKALQYACGNALVCDNVEDARRIAFGGHQRHKXVALDGXLFQKSGVISGGASDLKAKARRWDEKAVDKLKEKKERLXEELKEQMKAKRKEAELRQVQSQAHGLQMRLKYSQSDLEQXKXRHLALNLQEKSKLESELANFGPRINDIKRIIQSREREMKDLKEKMNQVEDEVFEEFCREIGVRNIREFEEEKVKRQNEIAKKRLEFENQKXRLGIQLDFEKNQLKEDQDKVHMWEQXVKKDENEIEKLKKEEQRHMKIIDEXMAQLQDLKNQHLAKKSEVNDKNHEMEEIRKKLGGANKEMXHLQKEVXAIEXKLEQKRSDRHNLLQACKMQDIKLPLSKGXMDDISQEEGSSQGEDSVSGSQRISSIYAREALIEIDYGDLCEDLKDAQAEEEIKQEMNXLQQKLNEQQSVLQRIAAPNMKAMEKLESVRDKFQEXSDEFEAARKRAKKAKQAFEQIKKERFDRFNACFESVAXNIDEIYKALSRNSSAQAFLGPENPEEPYLDGINYNCVAPGKRFRPMDNLSGGEKXVAALALLFAIHSYKPAPFFVLDEIDAALDNXNIGKVANYIKEQSXCNFQAIVISLKEEFYXKAESLIGVYPEQGDCVISKVLXFDLXKYPDANPNPNEQ

SEQ ID NO: 25854 - protein, 279 aa, Homo sapiens
  MOD_RES (1)..(1): Any amino acid
  MOD_RES (3)..(3): Selenocysteine
  MOD_RES (10)..(10): Selenocysteine
  MOD_RES (14)..(14): Selenocysteine
  MOD_RES (43)..(43): Selenocysteine
  MOD_RES (102)..(102): Selenocysteine
  MOD_RES (138)..(138): Selenocysteine
  MOD_RES (176)..(176): Selenocysteine
  MOD_RES (231)..(231): Selenocysteine
  MOD_RES (247)..(247): Selenocysteine
  MOD_RES (255)..(255): Selenocysteine
  MOD_RES (268)..(268): Selenocysteine
XMXHLQKEVXAIEXKLEQKRSDRHNLLQACKMQDIKLPLSKGXMDDISQEEGSSQGEDSVSGSQRISSIYAREALIEIDYGDLCEDLKDAQAEEEIKQEMNXLQQKLNEQQSVLQRIAAPNMKAMEKLESVRDKFQEXSDEFEAARKRAKKAKQAFEQIKKERFDRFNACFESVAXNIDEIYKALSRNSSAQAFLGPENPEEPYLDGINYNCVAPGKRFRPMDNLSGGEKXVAALALLFAIHRWQIXSRSSRLAXSRPSSSLSRRSSXPRPRASLESIL

SEQ ID NO: 25855 - protein, 1217 aa, Homo sapiens
  MOD_RES (18)..(18): Selenocysteine
  MOD_RES (69)..(69): Selenocysteine
  MOD_RES (117)..(117): Selenocysteine
  MOD_RES (149)..(149): Selenocysteine
  MOD_RES (165)..(165): Selenocysteine
  MOD_RES (182)..(182): Selenocysteine
  MOD_RES (202)..(202): Selenocysteine
  MOD_RES (226)..(226): Selenocysteine
  MOD_RES (235)..(235): Selenocysteine
  MOD_RES (248)..(248): Selenocysteine
  MOD_RES (279)..(279): Selenocysteine
  MOD_RES (303)..(303): Selenocysteine
  MOD_RES (347)..(347): Selenocysteine
  MOD_RES (369)..(369): Selenocysteine
  MOD_RES (373)..(373): Selenocysteine
  MOD_RES (386)..(386): Selenocysteine
  MOD_RES (423)..(423): Selenocysteine
  MOD_RES (501)..(501): Selenocysteine
  MOD_RES (548)..(548): Selenocysteine
  MOD_RES (553)..(553): Selenocysteine
  MOD_RES (570)..(570): Selenocysteine
  MOD_RES (586)..(586): Selenocysteine
  MOD_RES (598)..(598): Selenocysteine
  MOD_RES (603)..(603): Selenocysteine
  MOD_RES (630)..(630): Selenocysteine
  MOD_RES (640)..(640): Selenocysteine
  MOD_RES (647)..(647): Selenocysteine
  MOD_RES (652)..(652): Selenocysteine
  MOD_RES (665)..(665): Selenocysteine
  MOD_RES (671)..(671): Selenocysteine
  MOD_RES (723)..(723): Selenocysteine
  MOD_RES (752)..(752): Selenocysteine
  MOD_RES (773)..(773): Selenocysteine
  MOD_RES (783)..(783): Selenocysteine
  MOD_RES (826)..(826): Selenocysteine
  MOD_RES (830)..(830): Selenocysteine
  MOD_RES (853)..(853): Selenocysteine
  MOD_RES (857)..(857): Selenocysteine
  MOD_RES (860)..(860): Selenocysteine
  MOD_RES (862)..(863): Selenocysteine
  MOD_RES (876)..(876): Selenocysteine
  MOD_RES (890)..(890): Selenocysteine
  MOD_RES (919)..(919): Selenocysteine
  MOD_RES (926)..(926): Selenocysteine
  MOD_RES (959)..(959): Selenocysteine
  MOD_RES (974)..(974): Selenocysteine
  MOD_RES (1032)..(1032): Selenocysteine
  MOD_RES (1054)..(1054): Selenocysteine
  MOD_RES (1094)..(1094): Selenocysteine
  MOD_RES (1103)..(1103): Selenocysteine
  MOD_RES (1172)..(1174): Selenocysteine
  MOD_RES (1202)..(1202): Selenocysteine
  MOD_RES (1214)..(1215): Selenocysteine
MYIKQVIIQGFRSYRDQXIVDPFSSKHNVIVGRNGSGKSNFFYAIQFVLSDEFSHLRPEQRLALLHEGXGPRVISAFVEIIFDNSDNRLPIDKEEVSLRRVIGAKKDQYFLDKKMVXKNDVMNLLESAGFSRSNPYYIVKQGKINQMAXAPDSQRLKLLREVAGXRVYDERKEESISLMKEXEGKREKINELLKYIEERLHXLEEEKEELAQYQKWDKMRRALEYXIYNQELNEXRAKLDELSAKREXSGEKSRQLRDAQQDARDKMEDIERQVRELKXKISAMKEEKEQLSAERQEQIKQRXKLELKAKDLQDELAGNSEQRKRLLKERQKLLEKIEEKQKELAEXEPKFNSVKEKEERGIARLAQAXQERXDLYAKQGRGSQFXSKEERDKWIKKELKSLDQAINDKKRQIAAIHKDLEDXEANKEKNLEQYNKLDQDLNEVKARVEELDRKYYEVKNKKDELQSERNYLWREENAEQQALAAKREDLEKKQQLLRAAXGKAILNGIDSINKVLDHFRRKGINQHVQNGYHGIVMNNFECEPAFYXCVEVXAGNRLFYHIVDSDEVSXKILMEFNKMNLPGEVXFLPLNKLDVRDXAYPEXNDAIPMISKLRYNPRFDKAFKHVFGKXLICRSMEVSXQLARAFXMDCIXLEGDQVSHRGALXGGYYDXRKSRLELQKDVRKAEEELGELEAKLNENLRRNIERINNEIDQLMNQMQQIEXQQRKFKASRDSILSEMKMLKEKRQQSEKXFMPKQRSLQSLEASLHAMESXRESLKAELGXDLLSQLSLEDQKRVDALNDEIRQLQQENRQLLNERIKLEGIIXRVEXYLNENLRKRLDQVEQELNELREXEGGXVLXAXXSELEAINKRVKDXMARSEDLDNSIDKXEAGIKELQKSMERWKNMEKEHMDAINHDXKELEKMXNRQGMLLKKKEECMKKIRELGSLPQEAFEKYQXLSLKQLFRKLEQCNXELKKYSHVNKKALDQFVNFSEQKEKLIKRQEELDRGYKSIMELMNVLELRKYEAIQLXFKQVSKNFSEVFQKLVPGGKAXLVMKKGDVEGSQSQDEGEGSGESERGSGSQSSVPSVDQFXGVGIRVSFXGKQGEMREMQQLSGGQKSLVALALIFAIQKCDPAPFYLFDEIDQALDAQHRKAVSDMIMELAVHAQFIXXXFRPELLESADKFYGVKFRNKVSHIDVIXAEMAKDFVEDDXXHG

SEQ ID NO: 25856 - protein, 787 aa, Homo sapiens
  MOD_RES (37)..(37): Selenocysteine
  MOD_RES (55)..(55): Selenocysteine
  MOD_RES (88)..(88): Selenocysteine
  MOD_RES (90)..(90): Selenocysteine
  MOD_RES (145)..(145): Selenocysteine
  MOD_RES (150)..(150): Selenocysteine
  MOD_RES (170)..(170): Selenocysteine
  MOD_RES (179)..(179): Selenocysteine
  MOD_RES (200)..(200): Selenocysteine
  MOD_RES (223)..(223): Selenocysteine
  MOD_RES (241)..(241): Selenocysteine
  MOD_RES (245)..(245): Selenocysteine
  MOD_RES (248)..(248): Selenocysteine
  MOD_RES (251)..(251): Selenocysteine
  MOD_RES (300)..(300): Selenocysteine
  MOD_RES (307)..(307): Selenocysteine
  MOD_RES (311)..(311): Selenocysteine
  MOD_RES (336)..(336): Selenocysteine
  MOD_RES (341)..(341): Selenocysteine
  MOD_RES (348)..(349): Selenocysteine
  MOD_RES (357)..(357): Selenocysteine
  MOD_RES (364)..(364): Selenocysteine
  MOD_RES (372)..(372): Selenocysteine
  MOD_RES (425)..(425): Selenocysteine
  MOD_RES (448)..(448): Selenocysteine
  MOD_RES (466)..(466): Selenocysteine
  MOD_RES (495)..(495): Selenocysteine
  MOD_RES (500)..(500): Selenocysteine
  MOD_RES (528)..(528): Selenocysteine
  MOD_RES (534)..(534): Selenocysteine
  MOD_RES (538)..(538): Selenocysteine
  MOD_RES (541)..(541): Selenocysteine
  MOD_RES (548)..(548): Selenocysteine
  MOD_RES (553)..(553): Selenocysteine
  MOD_RES (593)..(593): Selenocysteine
  MOD_RES (623)..(623): Selenocysteine
  MOD_RES (640)..(640): Selenocysteine
  MOD_RES (644)..(644): Selenocysteine
  MOD_RES (700)..(700): Selenocysteine
  MOD_RES (731)..(731): Selenocysteine
  MOD_RES (773)..(773): Selenocysteine
  MOD_RES (778)..(778): Selenocysteine
MAAARPARGPELPLLGLLLLLLLGDPGRGAASSGNAXGPGPRSAGGSARRSAAVXGPPPPLSHCGRAAPCEPLRYNVCLGSVLPYGAXSXLLAGDSDSQEEAHGKLVLWSGLRNAPRCWAVIQPLLCAVYMPKCENDRVELPSRXLCQAXRGPCAIVERERGWPDFLRCXPDRFPEGCXNEVQNIKFNSSGQCEVPLVRXDNPKSWYEDVEGCGIQCQNPLFXEAEHQDMHSYIAAFGAVXGLCXLFXLAXFVADWRNSNRYPAVILFYVNACFFVGSIGWLAQFMDGARREIVCRADGXMRLGEPXSNEXLSCVIIFVIVYYALMAGVVWFVVLXYAWHXSFKALGXXYQPLSGKXSYFHLLXWSLPFVLXVAILAVAQVDGDSVSGICFVGYKNYRYRAGFVLAPIGLVLIVGGYFLIRGVMXLFSIKSNHPGLLSEKAASKINEXMLRLGIFGFLAFGFVLIXFSCHFYDFFNQAEWERSFRDYVLCQANVXIGLPXKQPIPDCEIKNRPSLLVEKINLFAMFGXGIAMSXWVWXKAXLLIWRRXWCRLXGQSDDEPKRIKKSKMIAKAFSKRHELLQNPGQELSFSMHXVSHDGPVAGLAFDLNEPSADVSSAWAQHVXKMVARRGAILPQDISVXPVAXPVPPEEQANLWLVEAEISPELQKRLGRKKKRRKRKKEVCPLAPPPELHPPAPAPSXIPRLPQLPRQKCLVAAGAWGAGDSCRQGAWXLVSNPFCPEPSPPQDPFLPSAPAPVAWAHGRRQGLGPIHSRXNLMDXELMDADSDF

SEQ ID NO: 25857 - protein, 70 aa, Homo sapiens
  MOD_RES (1)..(1): Selenocysteine
  MOD_RES (4)..(4): Selenocysteine
  MOD_RES (11)..(11): Selenocysteine
  MOD_RES (16)..(16): Selenocysteine
  MOD_RES (56)..(56): Selenocysteine
XKAXLLIWRRXWCRLXGQSDDEPKRIKKSKMIAKAFSKRHELLQNPGQELSFSMHXVSHDGPVVALPGQE

SEQ ID NO: 25858 - protein, 151 aa, Homo sapiens
  MOD_RES (1)..(1): Any amino acid
  MOD_RES (5)..(5): Selenocysteine
  MOD_RES (30)..(30): Selenocysteine
  MOD_RES (35)..(35): Selenocysteine
  MOD_RES (42)..(43): Selenocysteine
  MOD_RES (51)..(51): Selenocysteine
  MOD_RES (58)..(58): Selenocysteine
  MOD_RES (66)..(66): Selenocysteine
  MOD_RES (119)..(119): Selenocysteine
  MOD_RES (142)..(142): Selenocysteine
XSNEXLSCVIIFVIVYYALMAGVVWFVVLXYAWHXSFKALGXXYQPLSGKXSYFHLLXWSLPFVLXVAILAVAQVDGDSVSGICFVGYKNYRYRAGFVLAPIGLVLIVGGYFLIRGVMXLFSIKSNHPGLLSEKAASKINEXMLRLDVRPM

SEQ ID NO: 25859 - protein, 434 aa, Homo sapiens
  MOD_RES (11)..(11): Selenocysteine
  MOD_RES (29)..(30): Selenocysteine
  MOD_RES (50)..(50): Selenocysteine
  MOD_RES (78)..(78): Selenocysteine
  MOD_RES (125)..(125): Selenocysteine
  MOD_RES (131)..(131): Selenocysteine
  MOD_RES (133)..(133): Selenocysteine
  MOD_RES (140)..(140): Selenocysteine
  MOD_RES (155)..(155): Selenocysteine
  MOD_RES (163)..(163): Selenocysteine
  MOD_RES (182)..(182): Selenocysteine
  MOD_RES (184)..(184): Selenocysteine
  MOD_RES (187)..(187): Selenocysteine
  MOD_RES (197)..(197): Selenocysteine
  MOD_RES (200)..(200): Selenocysteine
  MOD_RES (216)..(216): Selenocysteine
  MOD_RES (266)..(266): Selenocysteine
  MOD_RES (276)..(276): Selenocysteine
  MOD_RES (283)..(283): Selenocysteine
  MOD_RES (285)..(285): Selenocysteine
  MOD_RES (300)..(301): Selenocysteine
  MOD_RES (325)..(325): Selenocysteine
  MOD_RES (332)..(333): Selenocysteine
  MOD_RES (345)..(345): Selenocysteine
  MOD_RES (358)..(358): Selenocysteine
  MOD_RES (405)..(405): Selenocysteine
MLPARCARLLXPHLLLVLVQLSPARGHRXXGPRFLISDRDPQCNLHCSRXQPKPICASDGRSYESMCEYQRAKCRDPXLGVVHRGRCKDAGQSKCRLERAQALEQAKKPQEAVFVPECGEDGSFXQVQCHXYXGYCWCVXPDGKPISGSSVQNKXPVCSGSVXDKPLSQGNSGRKDDGSKPXPXMEXQPVFDGDEIXAPXLWIKHLVIKDSKLNNXNIRNSEKVYSCDQERQSALEEAQQNPREGIVIPECAPGGLYKPVQCHQSXGYCWCVLVDXGRPLPGXSXRYVMPSCESDARAKXXEADDPFKDRELPGCPEGKKMEFIXSLLDALXXDMVQAINSAAPXGGGRFSEPDPSHXLEERVVHWYFSQLDSNSSNDINKREMKPFKRYVKKKAKPKKCARRFXDYCDLNKDKVISLPELKGCLGVSKEGRLV

SEQ ID NO: 25860 - protein, 435 aa, Homo sapiens
  MOD_RES (11)..(11): Selenocysteine
  MOD_RES (29)..(30): Selenocysteine
  MOD_RES (50)..(50): Selenocysteine
  MOD_RES (78)..(78): Selenocysteine
  MOD_RES (125)..(125): Selenocysteine
  MOD_RES (131)..(131): Selenocysteine
  MOD_RES (133)..(133): Selenocysteine
  MOD_RES (140)..(140): Selenocysteine
  MOD_RES (155)..(155): Selenocysteine
  MOD_RES (163)..(163): Selenocysteine
  MOD_RES (182)..(182): Selenocysteine
  MOD_RES (184)..(184): Selenocysteine
  MOD_RES (187)..(187): Selenocysteine
  MOD_RES (197)..(197): Selenocysteine
  MOD_RES (200)..(200): Selenocysteine
  MOD_RES (216)..(216): Selenocysteine
  MOD_RES (266)..(266): Selenocysteine
  MOD_RES (276)..(276): Selenocysteine
  MOD_RES (283)..(283): Selenocysteine
  MOD_RES (285)..(285): Selenocysteine
  MOD_RES (300)..(301): Selenocysteine
  MOD_RES (325)..(325): Selenocysteine
  MOD_RES (332)..(333): Selenocysteine
  MOD_RES (345)..(345): Selenocysteine
  MOD_RES (358)..(358): Selenocysteine
  MOD_RES (405)..(405): Selenocysteine
MLPARCARLLXPHLLLVLVQLSPARGHRXXGPRFLISDRDPQCNLHCSRXQPKPICASDGRSYESMCEYQRAKCRDPXLGVVHRGRCKDAGQSKCRLERAQALEQAKKPQEAVFVPECGEDGSFXQVQCHXYXGYCWCVXPDGKPISGSSVQNKXPVCSGSVXDKPLSQGNSGRKDDGSKPXPXMEXQPVFDGDEIXAPXLWIKHLVIKDSKLNNXNIRNSEKVYSCDQERQSALEEAQQNPREGIVIPECAPGGLYKPVQCHQSXGYCWCVLVDXGRPLPGXSXRYVMPSCESDARAKXXEADDPFKDRELPGCPEGKKMEFIXSLLDALXXDMVQAINSAAPXGGGRFSEPDPSHXLEERVVHWYFSQLDSNSSNDINKREMKPFKRYVKKKAKPKKCARRFXDYCDLNKDKVISLPELKGCLGVSKEVGRLV

SEQ ID NO: 25861 - protein, 67 aa, Homo sapiens
  MOD_RES (57)..(57): Selenocysteine
GKKEIKPFKRFLRKKSKPKKCVKKFVEYCDVNNDKSISVQELMGCLGVAKEDGKADXKKRHRSKRNL

SEQ ID NO: 25862 - protein, 84 aa, Homo sapiens
  MOD_RES (44)..(44): Selenocysteine
  MOD_RES (49)..(49): Selenocysteine
  MOD_RES (57)..(57): Selenocysteine
  MOD_RES (73)..(74): Selenocysteine
  MOD_RES (80)..(80): Selenocysteine
KKSKPKKCVKKFVEYCDVNNDKSISVQELMGCLGVAKEDGKADXKKRHXPRGHAESXSNRQDAMVVSSRPKAXXHRKSRXLSRR

SEQ ID NO: 25863 - protein, 446 aa, Homo sapiens
  MOD_RES (28)..(28): Selenocysteine
  MOD_RES (59)..(59): Selenocysteine
  MOD_RES (97)..(97): Selenocysteine
  MOD_RES (118)..(118): Selenocysteine
  MOD_RES (128)..(128): Selenocysteine
  MOD_RES (135)..(135): Selenocysteine
  MOD_RES (144)..(144): Selenocysteine
  MOD_RES (150)..(150): Selenocysteine
  MOD_RES (167)..(167): Selenocysteine
  MOD_RES (170)..(170): Selenocysteine
  MOD_RES (180)..(180): Selenocysteine
  MOD_RES (195)..(195): Selenocysteine
  MOD_RES (198)..(198): Selenocysteine
  MOD_RES (208)..(208): Selenocysteine
  MOD_RES (255)..(255): Selenocysteine
  MOD_RES (265)..(265): Selenocysteine
  MOD_RES (272)..(272): Selenocysteine
  MOD_RES (274)..(274): Selenocysteine
  MOD_RES (284)..(284): Selenocysteine
  MOD_RES (314)..(314): Selenocysteine
  MOD_RES (322)..(322): Selenocysteine
  MOD_RES (346)..(346): Selenocysteine
  MOD_RES (424)..(424): Selenocysteine
  MOD_RES (429)..(429): Selenocysteine
  MOD_RES (437)..(437): Selenocysteine
MLLPQLCWLPLLAGLLPPVPAQKFSALXFLRVDQDKDKDCSLDCAGSPQKPLCASDGRXFLSRCEFQRAKCKDPQLEIAYRGNCKDVSRCVAERKYXQEQARKEFQQVFIPECNDDGXYSQVQCHSYXGYCWCVXPNGRPISGXAVAHKXPRCPGSVNEKLPQREGXGKXDDAAAPALEXQPQGDEEDIASRYPXLWXEQVKSRQNKXNKNSVSSCDQEHQSALEEAKQPKNDNVVIPECAHGGLYKPVQCHPSXGYCWCVLVDXGRPIPGXSXRYEQPKCDNXARAHPAKARDLYKGRQLQGCPGAKKHEFLXSVLDALSXDMVHAASDPSSSSGRLSEPDPSHXLEERVVHWYFKLLDKNSSGDIGKKEIKPFKRFLRKKSKPKKCVKKFVEYCDVNNDKSISVQELMGCLGVAKEDGKADXKKRHXPRGHAESXSNRQPRKQG

SEQ ID NO: 25864 - protein, 457 aa, Homo sapiens
  MOD_RES (28)..(28): Selenocysteine
  MOD_RES (59)..(59): Selenocysteine
  MOD_RES (97)..(97): Selenocysteine
  MOD_RES (118)..(118): Selenocysteine
  MOD_RES (128)..(128): Selenocysteine
  MOD_RES (135)..(135): Selenocysteine
  MOD_RES (144)..(144): Selenocysteine
  MOD_RES (150)..(150): Selenocysteine
  MOD_RES (167)..(167): Selenocysteine
  MOD_RES (170)..(170): Selenocysteine
  MOD_RES (191)..(191): Selenocysteine
  MOD_RES (206)..(206): Selenocysteine
  MOD_RES (209)..(209): Selenocysteine
  MOD_RES (219)..(219): Selenocysteine
  MOD_RES (266)..(266): Selenocysteine
  MOD_RES (276)..(276): Selenocysteine
  MOD_RES (283)..(283): Selenocysteine
  MOD_RES (285)..(285): Selenocysteine
  MOD_RES (295)..(295): Selenocysteine
  MOD_RES (325)..(325): Selenocysteine
  MOD_RES (333)..(333): Selenocysteine
  MOD_RES (357)..(357): Selenocysteine
  MOD_RES (435)..(435): Selenocysteine
  MOD_RES (440)..(440): Selenocysteine
  MOD_RES (448)..(448): Selenocysteine
MLLPQLCWLPLLAGLLPPVPAQKFSALXFLRVDQDKDKDCSLDCAGSPQKPLCASDGRXFLSRCEFQRAKCKDPQLEIAYRGNCKDVSRCVAERKYXQEQARKEFQQVFIPECNDDGXYSQVQCHSYXGYCWCVXPNGRPISGXAVAHKXPRCPGSVNEKLPQREGXGKXVSLQIFSVLNSDDAAAPALEXQPQGDEEDIASRYPXLWXEQVKSRQNKXNKNSVSSCDQEHQSALEEAKQPKNDNVVIPECAHGGLYKPVQCHPSXGYCWCVLVDXGRPIPGXSXRYEQPKCDNXARAHPAKARDLYKGRQLQGCPGAKKHEFLXSVLDALSXDMVHAASDPSSSSGRLSEPDPSHXLEERVVHWYFKLLDKNSSGDIGKKEIKPFKRFLRKKSKPKKCVKKFVEYCDVNNDKSISVQELMGCLGVAKEDGKADXKKRHXPRGHAESXSNRQPRKQG

SEQ ID NO: 25865 - protein, 136 aa, Homo sapiens
  MOD_RES (31)..(31): Selenocysteine
  MOD_RES (77)..(77): Selenocysteine
  MOD_RES (80)..(80): Selenocysteine
  MOD_RES (135)..(135): Selenocysteine
MVGGCLGGSKSSHSAWEGPILPKCKSSRGVXELANRLVCLVFLLHVDIILLILLPGPPQGYRKVKSSPEPIMSSLLXEGXAGYVVPPGLVLAAGGGAGSPRFLSAFLNASRVRELANGKFIRVALAEKDRSGMPXQ

SEQ ID NO: 25866 - protein, 630 aa, Homo sapiens
  MOD_RES (24)..(24): Selenocysteine
  MOD_RES (90)..(90): Selenocysteine
  MOD_RES (99)..(99): Selenocysteine
  MOD_RES (165)..(165): Selenocysteine
  MOD_RES (181)..(181): Selenocysteine
  MOD_RES (206)..(206): Selenocysteine
  MOD_RES (218)..(218): Selenocysteine
  MOD_RES (257)..(257): Selenocysteine
  MOD_RES (277)..(277): Selenocysteine
  MOD_RES (289)..(289): Selenocysteine
  MOD_RES (298)..(299): Selenocysteine
  MOD_RES (301)..(301): Selenocysteine
  MOD_RES (323)..(323): Selenocysteine
  MOD_RES (361)..(361): Selenocysteine
  MOD_RES (398)..(398): Selenocysteine
  MOD_RES (450)..(450): Selenocysteine
  MOD_RES (459)..(459): Selenocysteine
  MOD_RES (472)..(472): Selenocysteine
  MOD_RES (487)..(488): Selenocysteine
  MOD_RES (517)..(517): Selenocysteine
  MOD_RES (523)..(523): Selenocysteine
  MOD_RES (543)..(543): Selenocysteine
  MOD_RES (549)..(549): Selenocysteine
  MOD_RES (552)..(552): Selenocysteine
  MOD_RES (570)..(570): Selenocysteine
  MOD_RES (587)..(587): Selenocysteine
  MOD_RES (593)..(593): Selenocysteine
MPRYGASLRQSCPRSGREQGQDGXAGAPGLLWMGLVLALALALALALALSDSRVLWAPAEAHPLSPQGHPARLHRIVPRLRDVFGWGNLXCPICKGLFXAINLGLKEPNVARVGSVAIKLCNLLKIAPPAVCQSIVHLFEDDMVEVWRRSVLSPSEACGLLLGSXCGHWDIFSSWNISLPXVPKPPPKPPSPPAPGAPVSRILFLXDLHWDHDYLEGXDPDCADPLCCRRGSGLPPASRPGAGYWGEYSKCDLPLRXLESLLSGLGPAGPFDMVYWXGDIPAHDVWHQXRQDQLRALXXVXALVRKFLGPVPVYPAVGNHESXPVNSFPPPFIEGNHSSRWLYEAMAKAWEPWLPAEALRXLRIGGFYALSPYPGLRLISLNMNFCSRENFWLLINSXDPAGQLQWLVGELQAAEDRGDKVHIIGHIPPGHCLKSWSWNYYRIVARYENXLAAQFFGHXHVDEFEVFYDEEXLSRPLAVAFLAPSAXXYIGLNPGYRVYQIDGNYSGSSHVVLDHEXYILNLXQANIPGAIPHWQLLYRAREXYGLPNXLPXAWHNLVYRMRGDMQLFQXFWFLYHKGHPPSEPCGXPCRLAXLCAQLSARADSPALCRHLMPDGSLPEAQSLWPRPLFC

SEQ ID NO: 25867 - protein, 171 aa, Homo sapiens
  MOD_RES (24)..(24): Selenocysteine
  MOD_RES (90)..(90): Selenocysteine
  MOD_RES (99)..(99): Selenocysteine
MPRYGASLRQSCPRSGREQGQDGXAGAPGLLWMGLVLALALALALALALSDSRVLWAPAEAHPLSPQGHPARLHRIVPRLRDVFGWGNLXCPICKGLFXAINLGLKKEPNVARVGSVAIKLCNLLKIAPPAVCQSIVHLFEDDMVENWGVLCSFPIPRSPPHLSQYEFLFP

SEQ ID NO: 25868 - protein, 366 aa, Homo sapiens
  MOD_RES (24)..(24): Selenocysteine
  MOD_RES (90)..(90): Selenocysteine
  MOD_RES (99)..(99): Selenocysteine
  MOD_RES (166)..(166): Selenocysteine
  MOD_RES (182)..(182): Selenocysteine
  MOD_RES (207)..(207): Selenocysteine
  MOD_RES (219)..(219): Selenocysteine
  MOD_RES (258)..(258): Selenocysteine
  MOD_RES (278)..(278): Selenocysteine
  MOD_RES (290)..(290): Selenocysteine
  MOD_RES (299)..(300): Selenocysteine
  MOD_RES (302)..(302): Selenocysteine
  MOD_RES (324)..(324): Selenocysteine
  MOD_RES (362)..(362): Selenocysteine
MPRYGASLRQSCPRSGREQGQDGXAGAPGLLWMGLVLALALALALALALSDSRVLWAPAEAHPLSPQGHPARLHRIVPRLRDVFGWGNLXCPICKGLFXAINLGLKKEPNVARVGSVAIKLCNLLKIAPPAVCQSIVHLFEDDMVEVWRRSVLSPSEACGLLLGSXCGHWDIFSSWNISLPXVPKPPPKPPSPPAPGAPVSRILFLXDLHWDHDYLEGXDPDCADPLCCRRGSGLPPASRPGAGYWGEYSKCDLPLRXLESLLSGLGPAGPFDMVYWXGDIPAHDVWHQXRQDQLRALXXVXALVRKFLGPVPVYPAVGNHESXPVNSFPPPFIEGNHSSRWLYEAMAKAWEPWLPAEALRXLRCI

SEQ ID NO: 25869 - protein, 402 aa, Homo sapiens
  MOD_RES (24)..(24): Selenocysteine
  MOD_RES (90)..(90): Selenocysteine
  MOD_RES (99)..(99): Selenocysteine
  MOD_RES (166)..(166): Selenocysteine
  MOD_RES (182)..(182): Selenocysteine
  MOD_RES (207)..(207): Selenocysteine
  MOD_RES (219)..(219): Selenocysteine
  MOD_RES (258)..(258): Selenocysteine
  MOD_RES (278)..(278): Selenocysteine
  MOD_RES (290)..(290): Selenocysteine
  MOD_RES (299)..(300): Selenocysteine
  MOD_RES (302)..(302): Selenocysteine
  MOD_RES (324)..(324): Selenocysteine
  MOD_RES (362)..(362): Selenocysteine
  MOD_RES (371)..(371): Selenocysteine
MPRYGASLRQSCPRSGREQGQDGXAGAPGLLWMGLVLALALALALALALSDSRVLWAPAEAHPLSPQGHPARLHRIVPRLRDVFGWGNLXCPICKGLFXAINLGLKKEPNVARVGSVAIKLCNLLKIAPPAVCQSIVHLFEDDMVEVWRRSVLSPSEACGLLLGSXCGHWDIFSSWNISLPXVPKPPPKPPSPPAPGAPVSRILFLXDLHWDHDYLEGXDPDCADPLCCRRGSGLPPASRPGAGYWGEYSKCDLPLRXLESLLSGLGPAGPFDMVYWXGDIPAHDVWHQXRQDQLRALXXVXALVRKFLGPVPVYPAVGNHESXPVNSFPPPFIEGNHSSRWLYEAMAKAWEPWLPAEALRXLRYLSSVEXQEGKRKNWGVLCSFPIPRSPPHLSQYEFLFP

SEQ ID NO: 25870 - protein, 631 aa, Homo sapiens
  MOD_RES (24)..(24): Selenocysteine
  MOD_RES (90)..(90): Selenocysteine
  MOD_RES (99)..(99): Selenocysteine
  MOD_RES (166)..(166): Selenocysteine
  MOD_RES (182)..(182): Selenocysteine
  MOD_RES (207)..(207): Selenocysteine
  MOD_RES (219)..(219): Selenocysteine
  MOD_RES (258)..(258): Selenocysteine
  MOD_RES (278)..(278): Selenocysteine
  MOD_RES (290)..(290): Selenocysteine
  MOD_RES (299)..(300): Selenocysteine
  MOD_RES (302)..(302): Selenocysteine
  MOD_RES (324)..(324): Selenocysteine
  MOD_RES (362)..(362): Selenocysteine
  MOD_RES (399)..(399): Selenocysteine
  MOD_RES (451)..(451): Selenocysteine
  MOD_RES (460)..(460): Selenocysteine
  MOD_RES (473)..(473): Selenocysteine
  MOD_RES (488)..(489): Selenocysteine
  MOD_RES (518)..(518): Selenocysteine
  MOD_RES (524)..(524): Selenocysteine
  MOD_RES (544)..(544): Selenocysteine
  MOD_RES (550)..(550): Selenocysteine
  MOD_RES (553)..(553): Selenocysteine
  MOD_RES (571)..(571): Selenocysteine
  MOD_RES (588)..(588): Selenocysteine
  MOD_RES (594)..(594): Selenocysteine
MPRYGASLRQSCPRSGREQGQDGXAGAPGLLWMGLVLALALALALALALSDSRVLWAPAEAHPLSPQGHPARLHRIVPRLRDVFGWGNLXCPICKGLFXAINLGLKKEPNVARVGSVAIKLCNLLKIAPPAVCQSIVHLFEDDMVEVWRRSVLSPSEACGLLLGSXCGHWDIFSSWNISLPXVPKPPPKPPSPPAPGAPVSRILFLXDLHWDHDYLEGXDPDCADPLCCRRGSGLPPASRPGAGYWGEYSKCDLPLRXLESLLSGLGPAGPFDMVYWXGDIPAHDVWHQXRQDQLRALXXVXALVRKFLGPVPVYPAVGNHESXPVNSFPPPFIEGNHSSRWLYEAMAKAWEPWLPAEALRXLRIGGFYALSPYPGLRLISLNMNFCSRENFWLLINSXDPAGQLQWLVGELQAAEDRGDKVHIIGHIPPGHCLKSWSWNYYRIVARYENXLAAQFFGHXHVDEFEVFYDEEXLSRPLAVAFLAPSAXXYIGLNPGYRVYQIDGNYSGSSHVVLDHEXYILNLXQANIPGAIPHWQLLYRAREXYGLPNXLPXAWHNLVYRMRGDMQLFQXFWFLYHKGHPPSEPCGXPCRLAXLCAQLSARADSPALCRHLMPDGSLPEAQSLWPRPLFC

SEQ ID NO: 25871 - protein, 53 aa, Homo sapiens
  MOD_RES (5)..(5): Selenocysteine
  MOD_RES (17)..(17): Selenocysteine
  MOD_RES (26)..(27): Selenocysteine
  MOD_RES (29)..(29): Selenocysteine
  MOD_RES (51)..(51): Selenocysteine
MVYWXGDIPAHDVWHQXRQDQLRALXXVXALVRKFLGPVPVYPAVGNHESXPV

SEQ ID NO: 25872 - protein, 317 aa, Homo sapiens
  MOD_RES (1)..(1): Any amino acid
  MOD_RES (8)..(8): Selenocysteine
  MOD_RES (20)..(20): Selenocysteine
  MOD_RES (29)..(30): Selenocysteine
  MOD_RES (32)..(32): Selenocysteine
  MOD_RES (54)..(54): Selenocysteine
  MOD_RES (92)..(92): Selenocysteine
  MOD_RES (101)..(101): Selenocysteine
  MOD_RES (137)..(137): Selenocysteine
  MOD_RES (146)..(146): Selenocysteine
  MOD_RES (159)..(159): Selenocysteine
  MOD_RES (174)..(175): Selenocysteine
  MOD_RES (204)..(204): Selenocysteine
  MOD_RES (210)..(210): Selenocysteine
  MOD_RES (230)..(230): Selenocysteine
  MOD_RES (236)..(236): Selenocysteine
  MOD_RES (239)..(239): Selenocysteine
  MOD_RES (257)..(257): Selenocysteine
  MOD_RES (274)..(274): Selenocysteine
  MOD_RES (280)..(280): Selenocysteine
XFDMVYWXGDIPAHDVWHQXRQDQLRALXXVXALVRKFLGPVPVYPAVGNHESXPVNSFPPPFIEGNHSSRWLYEAMAKAWEPWLPAEALRXLRYLSSVEXQEGKRKVHIIGHIPPGHCLKSWSWNYYRIVARYENXLAAQFFGHXHVDEFEVFYDEEXLSRPLAVAFLAPSAXXYIGLNPGYRVYQIDGNYSGSSHVVLDHEXYILNLXQANIPGAIPHWQLLYRAREXYGLPNXLPXAWHNLVYRMRGDMQLFQXFWFLYHKGHPPSEPCGXPCRLAXLCAQLSARADSPALCRHLMPDGSLPEAQSLWPRPLFC

SEQ ID NO: 25873 - protein, 423 aa, Homo sapiens
  MOD_RES (66)..(66): Selenocysteine
  MOD_RES (94)..(94): Selenocysteine
  MOD_RES (99)..(99): Selenocysteine
  MOD_RES (135)..(135): Selenocysteine
  MOD_RES (166)..(166): Selenocysteine
  MOD_RES (195)..(195): Selenocysteine
  MOD_RES (204)..(204): Selenocysteine
  MOD_RES (215)..(215): Selenocysteine
  MOD_RES (257)..(259): Selenocysteine
  MOD_RES (267)..(267): Selenocysteine
  MOD_RES (278)..(278): Selenocysteine
  MOD_RES (293)..(293): Selenocysteine
  MOD_RES (311)..(311): Selenocysteine
  MOD_RES (325)..(325): Selenocysteine
  MOD_RES (359)..(359): Selenocysteine
  MOD_RES (420)..(420): Selenocysteine
MKPNFSLRLRIFNLNCWGIPYLSKHRADRMRRLGDFLNQESFDLALLEEVWSEQDFQYLRQKLSPXYPAAHHFRSGIIGSGLCVFSKHPIQELXQHIYXLNGYPYMIHHGDWFSGKAVGLLVLHLSGMVLNAYVXHLHAEYNRQKDIYLAHRVAQAWELAQFIHHXSKKADVVLLCGDLNMHPEDLGCCLLKEWXGLHDAYLEXRDFKGSEEGNXMVPKNCYVSQQELKPFPFGVRIDYVLYKAVSGFYISCKSFEXXXGFDPHRGXPLSDHEALMAXLFVRHSPPQQNPSSXHGPAERSPLMCVLKEAWXELGLGMAQARWWAXFASYVIGLGLLLLALLCVLAAGGGAGEAAILLWXPSVGLVLWAGAFYLFHVQEVNGLYRAQAELQHVLGRAREAQDLGPEPQPALLLGQQEGDRXKEQ

SEQ ID NO: 25874 - protein, 204 aa, Homo sapiens
  MOD_RES (1)..(1): Any amino acid
  MOD_RES (63)..(63): Selenocysteine
  MOD_RES (92)..(92): Selenocysteine
  MOD_RES (101)..(101): Selenocysteine
  MOD_RES (112)..(112): Selenocysteine
  MOD_RES (154)..(156): Selenocysteine
  MOD_RES (164)..(164): Selenocysteine
  MOD_RES (175)..(175): Selenocysteine
  MOD_RES (190)..(190): Selenocysteine
XIYLAHRVAQAWELAQFIQCVSLGLKWEVGWDPGAEGEQGPSHGEELVMEELPPHQPGSPSHXSKKADVVLLCGDLNMHPEDLGCCLLKEWXGLHDAYLEXRDFKGSEEGNXMVPKNCYVSQQELKPFPFGVRIDYVLYKAVSGFYISCKSFEXXXGFDPHRGXPLSDHEALMAXLFVRHSPPQQNPSSXHGPAERSPLMCVLK

SEQ ID NO: 25875 - protein, 269 aa, Homo sapiens
  MOD_RES (38)..(38): Selenocysteine
  MOD_RES (121)..(121): Selenocysteine
  MOD_RES (125)..(125): Selenocysteine
  MOD_RES (146)..(146): Selenocysteine
  MOD_RES (156)..(156): Selenocysteine
  MOD_RES (224)..(224): Selenocysteine
  MOD_RES (229)..(229): Selenocysteine
  MOD_RES (234)..(234): Selenocysteine
  MOD_RES (252)..(252): Selenocysteine
MRLLAWLIFLANWGGARAEPEEAQGPCAQEKGKGPPPXSILASLAPGLEAGKFWHIADLHLDPDYKVSKDPFQVCPSAGSQPVPDAGPWGDYLCDSPWALINSSIYAMKEIEPEPDFILWXGDDXPHVPDEKLGEAAVLEIVERLXKLIREVFPDXKVYAALGNHDFHPKNQFPAGSNNIYNQIAELWKPWLSNESIALFKKGAFYCEKLPGPSGAGRIVVLNXNLYYXSNALXADMADPGQQFQWLEDVLXDASKAGDMVYIVGHVPP

SEQ ID NO: 25876 - protein, 102 aa, Homo sapiens
  MOD_RES (91)..(91): Selenocysteine
MRLLAWLIFLANWGGARAEPGKFWHIADLHLDPDYKVSKDPFQVCPSAGSQPVPDAGPWGDYLCDSPWALINSSIYAMKEIEPEPDFILWXGAVPSFSSAAS

SEQ ID NO: 25877 - protein, 373 aa, Homo sapiens
  MOD_RES (91)..(91): Selenocysteine
  MOD_RES (95)..(95): Selenocysteine
  MOD_RES (116)..(116): Selenocysteine
  MOD_RES (126)..(126): Selenocysteine
  MOD_RES (194)..(194): Selenocysteine
  MOD_RES (199)..(199): Selenocysteine
  MOD_RES (204)..(204): Selenocysteine
  MOD_RES (222)..(222): Selenocysteine
  MOD_RES (245)..(245): Selenocysteine
  MOD_RES (280)..(280): Selenocysteine
  MOD_RES (300)..(300): Selenocysteine
  MOD_RES (304)..(304): Selenocysteine
  MOD_RES (308)..(309): Selenocysteine
  MOD_RES (331)..(331): Selenocysteine
  MOD_RES (354)..(355): Selenocysteine
  MOD_RES (367)..(368): Selenocysteine
MRLLAWLIFLANWGGARAEPGKFWHIADLHLDPDYKVSKDPFQVCPSAGSQPVPDAGPWGDYLCDSPWALINSSIYAMKEIEPEPDFILWXGDDXPHVPDEKLGEAAVLEIVERLXKLIREVFPDXKVYAALGNHDFHPKNQFPAGSNNIYNQIAELWKPWLSNESIALFKKGAFYCEKLPGPSGAGRIVVLNXNLYYXSNALXADMADPGQQFQWLEDVLXDASKAGDMVYIVGHVPPGFFEKXQNKAWFREGFNEKYLKVVRKHHRVIAGQFFGHHHXDSFRMLYDDAGVPISAMFIXPGVXPWKXXLPGVVNGANNPAIRVFEYDRAXLSLKVRSPAEARGGGWEGLKCIXXFPHSQLIHLPLXXEPQEG

SEQ ID NO: 25878 - protein, 455 aa, Homo sapiens
  MOD_RES (91)..(91): Selenocysteine
  MOD_RES (95)..(95): Selenocysteine
  MOD_RES (116)..(116): Selenocysteine
  MOD_RES (126)..(126): Selenocysteine
  MOD_RES (194)..(194): Selenocysteine
  MOD_RES (199)..(199): Selenocysteine
  MOD_RES (204)..(204): Selenocysteine
  MOD_RES (222)..(222): Selenocysteine
  MOD_RES (245)..(245): Selenocysteine
  MOD_RES (280)..(280): Selenocysteine
  MOD_RES (300)..(300): Selenocysteine
  MOD_RES (304)..(304): Selenocysteine
  MOD_RES (308)..(309): Selenocysteine
  MOD_RES (331)..(331): Selenocysteine
  MOD_RES (339)..(339): Selenocysteine
  MOD_RES (352)..(352): Selenocysteine
  MOD_RES (362)..(362): Selenocysteine
  MOD_RES (377)..(377): Selenocysteine
  MOD_RES (388)..(388): Selenocysteine
  MOD_RES (426)..(427): Selenocysteine
  MOD_RES (434)..(435): Selenocysteine
  MOD_RES (452)..(452): Selenocysteine
MRLLAWLIFLANWGGARAEPGKFWHIADLHLDPDYKVSKDPFQVCPSAGSQPVPDAGPWGDYLCDSPWALINSSIYAMKEIEPEPDFILWXGDDXPHVPDEKLGEAAVLEIVERLXKLIREVFPDXKVYAALGNHDFHPKNQFPAGSNNIYNQIAELWKPWLSNESIALFKKGAFYCEKLPGPSGAGRIVVLNXNLYYXSNALXADMADPGQQFQWLEDVLXDASKAGDMVYIVGHVPPGFFEKXQNKAWFREGFNEKYLKVVRKHHRVIAGQFFGHHHXDSFRMLYDDAGVPISAMFIXPGVXPWKXXLPGVVNGANNPAIRVFEYDRAXLSLKDMVXYFMNLSQANAQGXPRWELEYQLXEAYGVPDASAHSMHXVLDRIAGDQSXLQRYYVYNSVSYSAGVCDEACSMQHVCAMRQVDIDAYXXCLYASGXXPVPQLPLLLMALLGLCXLVL

SEQ ID NO: 25879 - protein, 407 aa, Homo sapiens
  MOD_RES (91)..(91): Selenocysteine
  MOD_RES (95)..(95): Selenocysteine
  MOD_RES (116)..(116): Selenocysteine
  MOD_RES (146)..(146): Selenocysteine
  MOD_RES (151)..(151): Selenocysteine
  MOD_RES (156)..(156): Selenocysteine
  MOD_RES (174)..(174): Selenocysteine
  MOD_RES (197)..(197): Selenocysteine
  MOD_RES (232)..(232): Selenocysteine
  MOD_RES (252)..(252): Selenocysteine
  MOD_RES (256)..(256): Selenocysteine
  MOD_RES (260)..(261): Selenocysteine
  MOD_RES (283)..(283): Selenocysteine
  MOD_RES (291)..(291): Selenocysteine
  MOD_RES (304)..(304): Selenocysteine
  MOD_RES (314)..(314): Selenocysteine
  MOD_RES (329)..(329): Selenocysteine
  MOD_RES (340)..(340): Selenocysteine
  MOD_RES (378)..(379): Selenocysteine
  MOD_RES (386)..(387): Selenocysteine
  MOD_RES (404)..(404): Selenocysteine
MRLLAWLIFLANWGGARAEPGKFWHIADLHLDPDYKVSKDPFQVCPSAGSQPVPDAGPWGDYLCDSPWALINSSIYAMKEIEPEPDFILWXGDDXPHVPDEKLGEAAVLEIVERLXKLIREVFPGAFYCEKLPGPSGAGRIVVLNXNLYYXSNALXADMADPGQQFQWLEDVLXDASKAGDMVYIVGHVPPGFFEKXQNKAWFREGFNEKYLKVVRKHHRVIAGQFFGHHHXDSFRMLYDDAGVPISAMFIXPGVXPWKXXLPGVVNGANNPAIRVFEYDRAXLSLKDMVXYFMNLSQANAQGXPRWELEYQLXEAYGVPDASAHSMHXVLDRIAGDQSXLQRYYVYNSVSYSAGVCDEACSMQHVCAMRQVDIDAYXXCLYASGXXPVPQLPLLLMALLGLCXLVL

SEQ ID NO: 25880 - protein, 731 aa, Homo sapiens
  MOD_RES (6)..(6): Selenocysteine
  MOD_RES (18)..(18): Selenocysteine
  MOD_RES (51)..(51): Selenocysteine
  MOD_RES (53)..(53): Selenocysteine
  MOD_RES (57)..(57): Selenocysteine
  MOD_RES (73)..(73): Selenocysteine
  MOD_RES (77)..(77): Selenocysteine
  MOD_RES (111)..(111): Selenocysteine
  MOD_RES (126)..(126): Selenocysteine
  MOD_RES (139)..(139): Selenocysteine
  MOD_RES (145)..(145): Selenocysteine
  MOD_RES (161)..(161): Selenocysteine
  MOD_RES (183)..(183): Selenocysteine
  MOD_RES (186)..(186): Selenocysteine
  MOD_RES (223)..(223): Selenocysteine
  MOD_RES (244)..(245): Selenocysteine
  MOD_RES (255)..(255): Selenocysteine
  MOD_RES (257)..(257): Selenocysteine
  MOD_RES (261)..(261): Selenocysteine
  MOD_RES (291)..(291): Selenocysteine
  MOD_RES (305)..(306): Selenocysteine
  MOD_RES (309)..(309): Selenocysteine
  MOD_RES (441)..(441): Selenocysteine
  MOD_RES (485)..(485): Selenocysteine
  MOD_RES (522)..(522): Selenocysteine
  MOD_RES (528)..(528): Selenocysteine
  MOD_RES (554)..(554): Selenocysteine
  MOD_RES (621)..(621): Selenocysteine
  MOD_RES (642)..(642): Selenocysteine
  MOD_RES (656)..(656): Selenocysteine
  MOD_RES (659)..(659): Selenocysteine
  MOD_RES (673)..(673): Selenocysteine
  MOD_RES (682)..(682): Selenocysteine
  MOD_RES (690)..(690): Selenocysteine
  MOD_RES (698)..(698): Selenocysteine
  MOD_RES (720)..(720): Selenocysteine
  MOD_RES (725)..(725): Selenocysteine
MSNPGXRRNGSSIKIRLXVLCAKNLAKKDFFRLPDPFAKIVVDGSGQCHSXDXVKNXLDPKWNQHYDLYVGKXDSIXISVWNHKKIHKKQGAGFLGCVRLLSNAISRLKDXGYQRLDLCKLNPSDXDAVRGQIVVSLQXRDRIGXGGSVVDCRGLLENEGXVYEDSGPGRPLSCFMEEPAPYXDSXGAAAGGGNCRFVESPSQDQRLQAQRLRNPDVRGSLQXPQNRPHGHQSPELPEGYEQRXXVQGQVYFLHXQXGVSXWHDPRIPRDLNSVNCDELGPLPPGWEVRSXVSGRIYFVDHNNRXXQFXDPRLHHIMNHQCQLKEPSQPLPLPSEGSLEDEELPAQRYERDLVQKLKVLRHELSLQQPQAGHCRIEVSREEIFEESYRQIMKMRPKDLKKRLMVKFRGEEGLDYGGVAREWLYLLCHEMLNPYYGLFQYSXDNIYMLQINPDSSINPDHLSYFHFVGRIMGLAVFHGHYINGGFXVPFYKQLLGKPIQLSDLESVDPELHKSLVWILENDIXPVLDHXFCVEHNAFGRILQHELKPNGRNVPVXEENKKEYVRLYVNWRFMRGIEAQFLALQKGFNELIPQHLLKPFDQKELELIIGGLDKIDLNDWKSNXRLKHCVADSNIVRWFWQAVEXFDEERRARLLQFVXGSXRVPLQGFKALQGSXGAAGPRLFXIHLIDANXDNLPKAHXCFNRIDIPPYESYEKLYEKLLXAVEEXCGFAVE

SEQ ID NO: 25881 - protein, 757 aa, Homo sapiens
  MOD_RES (6)..(6): Selenocysteine
  MOD_RES (18)..(18): Selenocysteine
  MOD_RES (51)..(51): Selenocysteine
  MOD_RES (53)..(53): Selenocysteine
  MOD_RES (57)..(57): Selenocysteine
  MOD_RES (73)..(73): Selenocysteine
  MOD_RES (77)..(77): Selenocysteine
  MOD_RES (111)..(111): Selenocysteine
  MOD_RES (126)..(126): Selenocysteine
  MOD_RES (139)..(139): Selenocysteine
  MOD_RES (145)..(145): Selenocysteine
  MOD_RES (161)..(161): Selenocysteine
  MOD_RES (183)..(183): Selenocysteine
  MOD_RES (186)..(186): Selenocysteine
  MOD_RES (223)..(223): Selenocysteine
  MOD_RES (244)..(245): Selenocysteine
  MOD_RES (255)..(255): Selenocysteine
  MOD_RES (257)..(257): Selenocysteine
  MOD_RES (261)..(261): Selenocysteine
  MOD_RES (273)..(273): Selenocysteine
  MOD_RES (291)..(291): Selenocysteine
  MOD_RES (317)..(317): Selenocysteine
  MOD_RES (331)..(332): Selenocysteine
  MOD_RES (335)..(335): Selenocysteine
  MOD_RES (467)..(467): Selenocysteine
  MOD_RES (511)..(511): Selenocysteine
  MOD_RES (548)..(548): Selenocysteine
  MOD_RES (554)..(554): Selenocysteine
  MOD_RES (580)..(580): Selenocysteine
  MOD_RES (647)..(647): Selenocysteine
  MOD_RES (668)..(668): Selenocysteine
  MOD_RES (682)..(682): Selenocysteine
  MOD_RES (685)..(685): Selenocysteine
  MOD_RES (699)..(699): Selenocysteine
  MOD_RES (708)..(708): Selenocysteine
  MOD_RES (716)..(716): Selenocysteine
  MOD_RES (724)..(724): Selenocysteine
  MOD_RES (746)..(746): Selenocysteine
  MOD_RES (751)..(751): Selenocysteine
MSNPGXRRNGSSIKIRLXVLCAKNLAKKDFFRLPDPFAKIVVDGSGQCHSXDXVKNXLDPKWNQHYDLYVGKXDSIXISVWNHKKIHKKQGAGFLGCVRLLSNAISRLKDXGYQRLDLCKLNPSDXDAVRGQIVVSLQXRDRIGXGGSVVDCRGLLENEGXVYEDSGPGRPLSCFMEEPAPYXDSXGAAAGGGNCRFVESPSQDQRLQAQRLRNPDVRGSLQXPQNRPHGHQSPELPEGYEQRXXVQGQVYFLHXQXGVSXWHDPRIPSPSGXIPGGDAAFLYEFLLQGHXSEPRDLNSVNCDELGPLPPGWEVRSXVSGRIYFVDHNNRXXQFXDPRLHHIMNHQCQLKEPSQPLPLPSEGSLEDEELPAQRYERDLVQKLKVLRHELSLQQPQAGHCRIEVSREEIFEESYRQIMKMRPKDLKKRLMVKFRGEEGLDYGGVAREWLYLLCHEMLNPYYGLFQYSXDNIYMLQINPDSSINPDHLSYFHFVGRIMGLAVFHGHYINGGFXVPFYKQLLGKPIQLSDLESVDPELHKSLVWILENDIXPVLDHXFCVEHNAFGRILQHELKPNGRNVPVXEENKKEYVRLYVNWRFMRGIEAQFLALQKGFNELIPQHLLKPFDQKELELIIGGLDKIDLNDWKSNXRLKHCVADSNIVRWFWQAVEXFDEERRARLLQFVXGSXRVPLQGFKALQGSXGAAGPRLFXIHLIDANXDNLPKAHXCFNRIDIPPYESYEKLYEKLLXAVEEXCGFAVE

SEQ ID NO: 25882 - protein, 55 aa, Homo sapiens
  MOD_RES (17)..(17): Selenocysteine
  MOD_RES (37)..(37): Selenocysteine
  MOD_RES (39)..(39): Selenocysteine
  MOD_RES (43)..(43): Selenocysteine
MSNPGGRRNGPVKLRLXGLPDPFAKVVVDGSGQCHSXDXVKNXLDPKWNQHYDLQ

SEQ ID NO: 25883 - protein, 561 aa, Homo sapiens
  MOD_RES (17)..(17): Selenocysteine
  MOD_RES (37)..(37): Selenocysteine
  MOD_RES (39)..(39): Selenocysteine
  MOD_RES (43)..(43): Selenocysteine
  MOD_RES (63)..(63): Selenocysteine
  MOD_RES (97)..(97): Selenocysteine
  MOD_RES (114)..(114): Selenocysteine
  MOD_RES (131)..(131): Selenocysteine
  MOD_RES (155)..(155): Selenocysteine
  MOD_RES (167)..(167): Selenocysteine
  MOD_RES (169)..(170): Selenocysteine
  MOD_RES (176)..(176): Selenocysteine
  MOD_RES (197)..(197): Selenocysteine
  MOD_RES (202)..(202): Selenocysteine
  MOD_RES (206)..(206): Selenocysteine
  MOD_RES (232)..(232): Selenocysteine
  MOD_RES (236)..(236): Selenocysteine
  MOD_RES (248)..(249): Selenocysteine
  MOD_RES (259)..(259): Selenocysteine
  MOD_RES (261)..(261): Selenocysteine
  MOD_RES (265)..(265): Selenocysteine
  MOD_RES (295)..(295): Selenocysteine
  MOD_RES (297)..(297): Selenocysteine
  MOD_RES (309)..(310): Selenocysteine
  MOD_RES (313)..(313): Selenocysteine
  MOD_RES (347)..(347): Selenocysteine
  MOD_RES (351)..(351): Selenocysteine
  MOD_RES (453)..(453): Selenocysteine
  MOD_RES (492)..(492): Selenocysteine
  MOD_RES (505)..(505): Selenocysteine
  MOD_RES (529)..(529): Selenocysteine
  MOD_RES (535)..(535): Selenocysteine
MSNPGGRRNGPVKLRLXGLPDPFAKVVVDGSGQCHSXDXVKNXLDPKWNQHYDLYIGKSDSVXISVWNHKKIHKKQGAGFLGCVRLLSNAINRLKDXGYQRLDLCKLGPNDNDXVRGQIVVSLQSRDRIGXGGQVVDCSRLFDNDLPDGWEERRXASGRIQYLNHIXRXXQWERPXRPASEYSSPGRPLSCFVDENXPISGXNGAXCGQSSDPRLAERRVRSQRHRNYMSRXHLHXPPDLPEGYEQRXXQQGQVYFLHXQXGVSXWHDPRVPRDLSNINCEELGPLPPGWEIRNXAXGRVYFVDHNNRXXQFXDPRLSANLHLVLNRQNQLKDQQQQQVVSLCPDDXECLXVPRYKRDLVQKLKILRQELSQQQPQAGHCRIEVSREEIFEESYRQVMKMRPKDLWKRLMIKFRGEEGLDYGGVAREWLYLLSHEMLNPYYGLFQYSRDDIYXLQINPDSAVNPEHLSYFHFVGRIMGMAVFHGHYIDGGFXLPFYKQLLGKSIXLDDMELVDPDLHNSLVWILENDIXGVLDHXFCVEHNAYGEIIQHELKPNGKSIPVN

SEQ ID NO: 25884 - protein, 68 aa, Homo sapiens
  MOD_RES (17)..(17): Selenocysteine
  MOD_RES (50)..(50): Selenocysteine
  MOD_RES (52)..(52): Selenocysteine
  MOD_RES (56)..(56): Selenocysteine
MSNPGGRRNGPVKLRLXVLCAKNLVKKDFFRLPDPFAKVVVDGSGQCHSXDXVKNXLDPKWNQHYDLQ

SEQ ID NO: 25885 - protein, 748 aa, Homo sapiens
  MOD_RES (17)..(17): Selenocysteine
  MOD_RES (50)..(50): Selenocysteine
  MOD_RES (52)..(52): Selenocysteine
  MOD_RES (56)..(56): Selenocysteine
  MOD_RES (76)..(76): Selenocysteine
  MOD_RES (110)..(110): Selenocysteine
  MOD_RES (127)..(127): Selenocysteine
  MOD_RES (144)..(144): Selenocysteine
  MOD_RES (168)..(168): Selenocysteine
  MOD_RES (180)..(180): Selenocysteine
  MOD_RES (182)..(183): Selenocysteine
  MOD_RES (189)..(189): Selenocysteine
  MOD_RES (210)..(210): Selenocysteine
  MOD_RES (215)..(215): Selenocysteine
  MOD_RES (219)..(219): Selenocysteine
  MOD_RES (245)..(245): Selenocysteine
  MOD_RES (249)..(249): Selenocysteine
  MOD_RES (261)..(262): Selenocysteine
  MOD_RES (272)..(272): Selenocysteine
  MOD_RES (274)..(274): Selenocysteine
  MOD_RES (278)..(278): Selenocysteine
  MOD_RES (308)..(308): Selenocysteine
  MOD_RES (310)..(310): Selenocysteine
  MOD_RES (322)..(323): Selenocysteine
  MOD_RES (326)..(326): Selenocysteine
  MOD_RES (360)..(360): Selenocysteine
  MOD_RES (364)..(364): Selenocysteine
  MOD_RES (466)..(466): Selenocysteine
  MOD_RES (505)..(505): Selenocysteine
  MOD_RES (518)..(518): Selenocysteine
  MOD_RES (542)..(542): Selenocysteine
  MOD_RES (548)..(548): Selenocysteine
  MOD_RES (616)..(616): Selenocysteine
  MOD_RES (641)..(641): Selenocysteine
  MOD_RES (647)..(647): Selenocysteine
  MOD_RES (676)..(676): Selenocysteine
  MOD_RES (699)..(699): Selenocysteine
  MOD_RES (707)..(707): Selenocysteine
  MOD_RES (715)..(715): Selenocysteine
  MOD_RES (737)..(737): Selenocysteine
  MOD_RES (742)..(742): Selenocysteine
MSNPGGRRNGPVKLRLXVLCAKNLVKKDFFRLPDPFAKVVVDGSGQCHSXDXVKNXLDPKWNQHYDLYIGKSDSVXISVWNHKKIHKKQGAGFLGCVRLLSNAINRLKDXGYQRLDLCKLGPNDNDXVRGQIVVSLQSRDRIGXGGQVVDCSRLFDNDLPDGWEERRXASGRIQYLNHIXRXXQWERPXRPASEYSSPGRPLSCFVDENXPISGXNGAXCGQSSDPRLAERRVRSQRHRNYMSRXHLHXPPDLPEGYEQRXXQQGQVYFLHXQXGVSXWHDPRVPRDLSNINCEELGPLPPGWEIRNXAXGRVYFVDHNNRXXQFXDPRLSANLHLVLNRQNQLKDQQQQQVVSLCPDDXECLXVPRYKRDLVQKLKILRQELSQQQPQAGHCRIEVSREEIFEESYRQVMKMRPKDLWKRLMIKFRGEEGLDYGGVAREWLYLLSHEMLNPYYGLFQYSRDDIYXLQINPDSAVNPEHLSYFHFVGRIMGMAVFHGHYIDGGFXLPFYKQLLGKSIXLDDMELVDPDLHNSLVWILENDIXGVLDHXFCVEHNAYGEIIQHELKPNGKSIPVNEENKKEYVRLYVNWRFLRGIEAQFLALQKGFNEVIPQHLLKXFDEKELELIICGLGKIDVNDWKVNXRLKHCXPDSNIVKWFWKAVEFFDEERRARLLQFVXGSSRVPLQGFKALQGAAGPRLFXIHQIDACXNNLPKAHXCFNRIDIPPYESYEKLYEKLLXAIEEXCGFAVE

SEQ ID NO: 25886 - protein, 103 aa, Homo sapiens
  MOD_RES (2)..(2): Selenocysteine
  MOD_RES (13)..(13): Selenocysteine
  MOD_RES (24)..(24): Selenocysteine
  MOD_RES (54)..(54): Selenocysteine
  MOD_RES (77)..(77): Selenocysteine
MXIGRMENVEVFXAEGKGRGLKAXKEFWAADIIFAERAYSAVVFDSLVNFVCHXCFKRQEKLHRCGQCKFAHYCDRXCQKDAWLNHKNECSAIKRYGKVLQED

SEQ ID NO: 25887 - protein, 477 aa, Homo sapiens
  MOD_RES (2)..(2): Selenocysteine
  MOD_RES (13)..(13): Selenocysteine
  MOD_RES (24)..(24): Selenocysteine
  MOD_RES (54)..(54): Selenocysteine
  MOD_RES (77)..(77): Selenocysteine
  MOD_RES (119)..(119): Selenocysteine
  MOD_RES (122)..(122): Selenocysteine
  MOD_RES (153)..(153): Selenocysteine
  MOD_RES (183)..(183): Selenocysteine
  MOD_RES (213)..(213): Selenocysteine
  MOD_RES (236)..(236): Selenocysteine
  MOD_RES (262)..(262): Selenocysteine
  MOD_RES (299)..(299): Selenocysteine
  MOD_RES (333)..(333): Selenocysteine
  MOD_RES (389)..(389): Selenocysteine
  MOD_RES (413)..(413): Selenocysteine
  MOD_RES (421)..(421): Selenocysteine
  MOD_RES (431)..(431): Selenocysteine
MXIGRMENVEVFXAEGKGRGLKAXKEFWAADIIFAERAYSAVVFDSLVNFVCHXCFKRQEKLHRCGQCKFAHYCDRXCQKDAWLNHKNECSAIKRYGKVPNENIRLAARIMWRVEREGXGLXEGCLVSVDDLQNHVEHFGEEEQKDLRVDVDXFLQYWPPQSQQFSMQYISHIFGVINCNGFXLSDQRGLQAVGVGIFPNLGLVNHDCWPNCXVIFNNGKIELRALGKISEGEELXVSYIDFLNVSEERKRQLKKQYYFDCXCEHCQKKLKDDLFLGVKDNPKPSQEVVKEMIQFSKDXLEKIDKARSEGLYHEVVKLCRECLEKQEPVFADXNIYMLRMLSIVSEVLSYLQAFEEASFYARRMVDGYMKLYHPNNAQLGMAVMRAGLXNWHAGNIEVGHGMICKAYAILLVXHGPSHPIXKDLEAMRVQXEMELRMFRQNEFMYYKMREAALNNQPMQVMAEPSNEPSPALFHKKQ

SEQ ID NO: 25888 - protein, 490 aa, Homo sapiens
  MOD_RES (2)..(2): Selenocysteine
  MOD_RES (13)..(13): Selenocysteine
  MOD_RES (24)..(24): Selenocysteine
  MOD_RES (54)..(54): Selenocysteine
  MOD_RES (77)..(77): Selenocysteine
  MOD_RES (119)..(119): Selenocysteine
  MOD_RES (122)..(122): Selenocysteine
  MOD_RES (153)..(153): Selenocysteine
  MOD_RES (183)..(183): Selenocysteine
  MOD_RES (213)..(213): Selenocysteine
  MOD_RES (230)..(230): Selenocysteine
  MOD_RES (249)..(249): Selenocysteine
  MOD_RES (275)..(275): Selenocysteine
  MOD_RES (312)..(312): Selenocysteine
  MOD_RES (346)..(346): Selenocysteine
  MOD_RES (402)..(402): Selenocysteine
  MOD_RES (426)..(426): Selenocysteine
  MOD_RES (434)..(434): Selenocysteine
  MOD_RES (444)..(444): Selenocysteine
MXIGRMENVEVFXAEGKGRGLKAXKEFWAADIIFAERAYSAVVFDSLVNFVCHXCFKRQEKLHRCGQCKFAHYCDRXCQKDAWLNHKNECSAIKRYGKVPNENIRLAARIMWRVEREGXGLXEGCLVSVDDLQNHVEHFGEEEQKDLRVDVDXFLQYWPPQSQQFSMQYISHIFGVINCNGFXLSDQRGLQAVGVGIFPNLGLVNHDCWPNCXVIFNNGNHEAVKSMFHXQMRIELRALGKISEGEELXVSYIDFLNVSEERKRQLKKQYYFDCXCEHCQKKLKDDLFLGVKDNPKPSQEVVKEMIQFSKDXLEKIDKARSEGLYHEVVKLCRECLEKQEPVFADXNIYMLRMLSIVSEVLSYLQAFEEASFYARRMVDGYMKLYHPNNAQLGMAVMRAGLXNWHAGNIEVGHGMICKAYAILLVXHGPSHPIXKDLEAMRVQXEMELRMFRQNEFMYYKMREAALNNQPMQVMAEPSNEPSPALFHKKQ

SEQ ID NO: 25889 - protein, 98 aa, Homo sapiens
LSDPPKAEAIRDMVRYARNVIEEFRRAKHYKSPSELLEICELSQEKMSSVFEDSNVYMLHMMYQAMGVCLYMQDWEGALQYGQKIIKPYSLGHCNHGS

SEQ ID NO: 25890 - protein, 433 aa, Homo sapiens
  MOD_RES (44)..(44): Selenocysteine
  MOD_RES (57)..(57): Selenocysteine
  MOD_RES (105)..(105): Selenocysteine
  MOD_RES (109)..(109): Selenocysteine
  MOD_RES (123)..(123): Selenocysteine
  MOD_RES (185)..(185): Selenocysteine
  MOD_RES (216)..(216): Selenocysteine
  MOD_RES (220)..(220): Selenocysteine
  MOD_RES (238)..(238): Selenocysteine
  MOD_RES (247)..(247): Selenocysteine
  MOD_RES (261)..(261): Selenocysteine
  MOD_RES (268)..(269): Selenocysteine
MRAEGLGGLERFCSPGKGRGLRALQPFQVGDLLFSCPAYAYVLXVNERGNHCEYCFXRKEGLSKCGRCKQAFYCNVECQKEDWPMHKLECSPMVVFGENWNPSEXVRLXARILAKQKIHPERXPSEKLLAVKEFESHLDKLDNEKKDLIQSDIAALHHFYSKHLGFPDNDSLVVLFAQVNCNGFXIEDEELSHLGSAIFPDVALMNHSCCPNVIVXYKGXLAEVRAVQEIKPGEEVFXSYIDLLYPXEDRNDRLRDSYFFXCECQECXXKDKDKAKVEIRKLSDPPKAEAIRDMVRYARNVIEEFRRAKHYKSPSELLEICELSQEKMSSVFEDSNVYMLHMMYQAMGVCLYMQDWEGALQYGQKIIKPYSKHYPLYSLNVASMWLKLGRLYMGLEHKAAGEKALKKAIAIMEVAHGKDHPYISEIKQEIESH

SEQ ID NO: 25891 - protein, 264 aa, Homo sapiens
  MOD_RES (30)..(30): Selenocysteine
  MOD_RES (53)..(53): Selenocysteine
  MOD_RES (89)..(89): Selenocysteine
  MOD_RES (116)..(116): Selenocysteine
  MOD_RES (177)..(177): Selenocysteine
  MOD_RES (184)..(184): Selenocysteine
  MOD_RES (201)..(201): Selenocysteine
  MOD_RES (203)..(203): Selenocysteine
  MOD_RES (229)..(229): Selenocysteine
  MOD_RES (244)..(244): Selenocysteine
MPRSFLVRKPSDPNRKPNYSELQDSNPEFXFQQPYDQAHLLAAIPPPEILNPXASLPMLIWDSVLAPQAQPIAWASLRLQESPRVAELXSLSDEDSGKGSQPPSPPSPAPSSFSSXSVSSLEAEAYAAFPGLGQVPKQLAQLSEAKDLQARKAFNCKYCNKEYLSLGALKMHIRSHXLPCVCGXCGKAFSRPWLLQGHVRXHXGEKPFSCPHCSRAFADRSNLRAHLQXHSDVKKYQCQACARXFSRMSLLHKHQESGCSGCPR

SEQ ID NO: 25892 - protein, 268 aa, Homo sapiens
  MOD_RES (24)..(24): Selenocysteine
  MOD_RES (26)..(26): Selenocysteine
  MOD_RES (57)..(57): Selenocysteine
  MOD_RES (60)..(61): Selenocysteine
  MOD_RES (94)..(94): Selenocysteine
  MOD_RES (136)..(136): Selenocysteine
  MOD_RES (139)..(139): Selenocysteine
  MOD_RES (180)..(180): Selenocysteine
  MOD_RES (182)..(182): Selenocysteine
  MOD_RES (206)..(206): Selenocysteine
  MOD_RES (208)..(208): Selenocysteine
  MOD_RES (234)..(234): Selenocysteine
  MOD_RES (249)..(249): Selenocysteine
MPRSFLVKKHFNASKKPNYSELDXHXVIISPYLYESYSMPVIPQPEILSSGAYSPIXVWXXAAPFHAQLPNGLSPLSGYSSSLGRVSPPPPSDXSSKDHSGSESPISDEEERLQSKLSDPHAIEAEKFQCNLCNKXYSXFSGLAKHKQLHCDAQSRKSFSCKYCDKEYVSLGALKMHIRXHXLPCVCKICGKAFSRPWLLQGHIRXHXGEKPFSCPHCNRAFADRSNLRAHLQXHSDVKKYQCKNCSKXFSRMSLLHKHEESGCCVAH

SEQ ID NO: 25893 - protein, 292 aa, Homo sapiens
  MOD_RES (9)..(9): Selenocysteine
  MOD_RES (23)..(23): Selenocysteine
  MOD_RES (122)..(122): Selenocysteine
  MOD_RES (127)..(127): Selenocysteine
  MOD_RES (163)..(163): Selenocysteine
  MOD_RES (184)..(184): Selenocysteine
  MOD_RES (193)..(193): Selenocysteine
  MOD_RES (204)..(204): Selenocysteine
  MOD_RES (206)..(206): Selenocysteine
  MOD_RES (210)..(210): Selenocysteine
  MOD_RES (230)..(230): Selenocysteine
  MOD_RES (232)..(232): Selenocysteine
  MOD_RES (258)..(258): Selenocysteine
  MOD_RES (271)..(271): Selenocysteine
  MOD_RES (273)..(273): Selenocysteine
MPRSFLVKXHSSHRVPNYRRLEXQREINGACSACGGLVVPLLPRDKEAPSVPGDLPQPWDRSSAVACISLPLLPRIEEALGASGLDALEVSEVDPRASRAAIVPLKDSLNHLNLPPLLVLPXRWSPXLGPDRHGAPEKLLGAERMPRAPGGFECFHCHKPYHXLAGLARHRQLHCHLQVGRVFXCKYCDKEYXSLGALKMHIRXHXLPCXCKICGKAFSRPWLLQGHVRXHXGEKPYACSHCSRAFADRSNLRAHLQXHSDAKKYRCRRCXKXFSRMSLLARHEESGCCPGP

SEQ ID NO: 25894 - protein, 334 aa, Homo sapiens
  MOD_RES (19)..(19): Selenocysteine
  MOD_RES (23)..(23): Selenocysteine
  MOD_RES (48)..(48): Selenocysteine
  MOD_RES (104)..(104): Selenocysteine
  MOD_RES (111)..(111): Selenocysteine
  MOD_RES (127)..(127): Selenocysteine
  MOD_RES (131)..(131): Selenocysteine
  MOD_RES (135)..(135): Selenocysteine
  MOD_RES (145)..(145): Selenocysteine
  MOD_RES (181)..(181): Selenocysteine
  MOD_RES (198)..(198): Selenocysteine
  MOD_RES (250)..(250): Selenocysteine
  MOD_RES (257)..(257): Selenocysteine
  MOD_RES (259)..(259): Selenocysteine
  MOD_RES (264)..(264): Selenocysteine
  MOD_RES (292)..(292): Selenocysteine
  MOD_RES (296)..(296): Selenocysteine
  MOD_RES (331)..(331): Selenocysteine
MKPPPRRRAAPARYLGEVXGPAXWSAREKRQLVRLLQARQGQPEPDAXELARELRGRSEAEIRVFLQQLKGRVAREAIQKVHPGGLQGPRRREAQPPAPIEVWXDLAEKIXGPLEEALAVAFSQVLXIAAXEPVXLLHSKPPKPXQARGKPLLLSAPGGQEDPAPEIPSSAPAAPSSAPRXPDPAPEKPSESSAGPSXEEDFAVDFEKIYKYLSSVSRSGRSPELSAAESAVVLDLLMSLPEELPLLPCXALVEHMXEXYLRLXAPQPIPAGGSLGPAAEGDGAGSKAPEEXPPAXEKAEHSELKSPWQAAGICPLNPFLVPLELLGRAAXPAR

SEQ ID NO: 25895 - protein, 97 aa, Homo sapiens
  MOD_RES (13)..(13): Selenocysteine
  MOD_RES (20)..(20): Selenocysteine
  MOD_RES (22)..(22): Selenocysteine
  MOD_RES (27)..(27): Selenocysteine
  MOD_RES (55)..(55): Selenocysteine
  MOD_RES (59)..(59): Selenocysteine
  MOD_RES (94)..(94): Selenocysteine
MSLPEELPLLPCXALVEHMXEXYLRLXAPQPIPAGGSLGPAAEGDGAGSKAPEEXPPAXEKAEHSELKSPWQAAGICPLNPFLVPLELLGRAAXPAR

SEQ ID NO: 25896 - protein, 279 aa, Homo sapiens
  MOD_RES (1)..(1): Any amino acid
  MOD_RES (13)..(13): Selenocysteine
  MOD_RES (17)..(17): Selenocysteine
  MOD_RES (42)..(42): Selenocysteine
  MOD_RES (98)..(98): Selenocysteine
  MOD_RES (105)..(105): Selenocysteine
  MOD_RES (121)..(121): Selenocysteine
  MOD_RES (125)..(125): Selenocysteine
  MOD_RES (129)..(129): Selenocysteine
  MOD_RES (139)..(139): Selenocysteine
  MOD_RES (175)..(175): Selenocysteine
  MOD_RES (192)..(192): Selenocysteine
  MOD_RES (254)..(254): Selenocysteine
  MOD_RES (266)..(266): Selenocysteine
  MOD_RES (272)..(272): Selenocysteine
XRAAPARYLGEVXGPAXWSAREKRQLVRLLQARQGQPEPDAXELARELRGRSEAEIRVFLQQLKGRVAREAIQKVHPGGLQGPRRREAQPPAPIEVWXDLAEKIXGPLEEALAVAFSQVLXIAAXEPVXLLHSKPPKPXQARGKPLLLSAPGGQEDPAPEIPSSAPAAPSSAPRXPDPAPEKPSESSAGPSXEEDFAVDFEKIYKYLSSVSRSGRSPELSAAGEKGEGGGRSRGIKGPWQQAGVSPYPSPPSIXRVRCGPRPAHVXSRGAAXPALHSPG

SEQ ID NO: 25897 - protein, 451 aa, Homo sapiens
  MOD_RES (11)..(11): Selenocysteine
  MOD_RES (78)..(78): Selenocysteine
  MOD_RES (85)..(85): Selenocysteine
  MOD_RES (128)..(128): Selenocysteine
  MOD_RES (140)..(140): Selenocysteine
  MOD_RES (155)..(155): Selenocysteine
  MOD_RES (165)..(165): Selenocysteine
  MOD_RES (182)..(182): Selenocysteine
  MOD_RES (326)..(326): Selenocysteine
  MOD_RES (350)..(350): Selenocysteine
  MOD_RES (358)..(358): Selenocysteine
  MOD_RES (392)..(392): Selenocysteine
MDVDAEREKIXQEIKELERILDPGSSGSHVEISESSLESDSEADSLPSEDLDPADPPISEEERWGEASNDEDDPKDKXLPEDPEXCLQLNMVYQEVIQEKLAEANLLLAQNREQQEELMRDLAGSKGXKVKDGKSLPPSXYMGHFMKPYFKDKVXGVGPPANEDXREKAAQGIKAFEELLVXKWKNWEKALLRKSVVSDRLQRLLQPKLLKLEYLHQKQSKVSSELERQALEKQGREAEKEIQDINQLPEEALLGNRLDSHDWEKISNINFEGSRSAEEIRKFWQNSEHPSINKQEWSREEEERLQAIAAAHGHLEWQKIAEELGXSRSAFQCLQKFQQHNKALKRKEWXEEEDRMLXQLVQEMRVGSHIPYRRIVYYMEGRDSMQLIYRWXKSLDPGLKKGYWAPEEDAKLLQAVAKYGEQDWFKIREEVPGRSDAQCRDRYLRRLHFSL

SEQ ID NO: 25898 - protein, 1469 aa, Homo sapiens
  MOD_RES (11)..(11): Selenocysteine
  MOD_RES (78)..(78): Selenocysteine
  MOD_RES (85)..(85): Selenocysteine
  MOD_RES (128)..(128): Selenocysteine
  MOD_RES (140)..(140): Selenocysteine
  MOD_RES (155)..(155): Selenocysteine
  MOD_RES (165)..(165): Selenocysteine
  MOD_RES (182)..(182): Selenocysteine
  MOD_RES (326)..(326): Selenocysteine
  MOD_RES (350)..(350): Selenocysteine
  MOD_RES (358)..(358): Selenocysteine
  MOD_RES (392)..(392): Selenocysteine
  MOD_RES (521)..(521): Selenocysteine
  MOD_RES (579)..(579): Selenocysteine
  MOD_RES (616)..(617): Selenocysteine
  MOD_RES (625)..(625): Selenocysteine
  MOD_RES (650)..(650): Selenocysteine
  MOD_RES (668)..(668): Selenocysteine
  MOD_RES (673)..(673): Selenocysteine
  MOD_RES (682)..(682): Selenocysteine
  MOD_RES (688)..(688): Selenocysteine
  MOD_RES (700)..(700): Selenocysteine
  MOD_RES (724)..(724): Selenocysteine
  MOD_RES (749)..(749): Selenocysteine
  MOD_RES (760)..(760): Selenocysteine
  MOD_RES (771)..(771): Selenocysteine
  MOD_RES (788)..(788): Selenocysteine
  MOD_RES (792)..(792): Selenocysteine
  MOD_RES (795)..(795): Selenocysteine
  MOD_RES (802)..(802): Selenocysteine
  MOD_RES (841)..(841): Selenocysteine
  MOD_RES (874)..(874): Selenocysteine
  MOD_RES (884)..(884): Selenocysteine
  MOD_RES (892)..(892): Selenocysteine
  MOD_RES (911)..(911): Selenocysteine
  MOD_RES (936)..(936): Selenocysteine
  MOD_RES (946)..(946): Selenocysteine
  MOD_RES (965)..(965): Selenocysteine
  MOD_RES (974)..(974): Selenocysteine
  MOD_RES (983)..(983): Selenocysteine
  MOD_RES (999)..(999): Selenocysteine
  MOD_RES (1051)..(1051): Selenocysteine
  MOD_RES (1061)..(1061): Selenocysteine
  MOD_RES (1070)..(1070): Selenocysteine
  MOD_RES (1077)..(1077): Selenocysteine
  MOD_RES (1081)..(1081): Selenocysteine
  MOD_RES (1102)..(1102): Selenocysteine
  MOD_RES (1111)..(1111): Selenocysteine
  MOD_RES (1117)..(1117): Selenocysteine
  MOD_RES (1119)..(1119): Selenocysteine
  MOD_RES (1150)..(1150): Selenocysteine
  MOD_RES (1152)..(1152): Selenocysteine
  MOD_RES (1157)..(1157): Selenocysteine
  MOD_RES (1189)..(1189): Selenocysteine
  MOD_RES (1216)..(1216): Selenocysteine
  MOD_RES (1221)..(1221): Selenocysteine
  MOD_RES (1228)..(1228): Selenocysteine
  MOD_RES (1282)..(1282): Selenocysteine
  MOD_RES (1329)..(1329): Selenocysteine
  MOD_RES (1373)..(1373): Selenocysteine
  MOD_RES (1380)..(1380): Selenocysteine
  MOD_RES (1388)..(1389): Selenocysteine
  MOD_RES (1421)..(1422): Selenocysteine
  MOD_RES (1424)..(1424): Selenocysteine
  MOD_RES (1444)..(1444): Selenocysteine
  MOD_RES (1456)..(1456): Selenocysteine
  MOD_RES (1462)..(1462): Selenocysteine
MDVDAEREKIXQEIKELERILDPGSSGSHVEISESSLESDSEADSLPSEDLDPADPPISEEERWGEASNDEDDPKDKXLPEDPEXCLQLNMVYQEVIQEKLAEANLLLAQNREQQEELMRDLAGSKGXKVKDGKSLPPSXYMGHFMKPYFKDKVXGVGPPANEDXREKAAQGIKAFEELLVXKWKNWEKALLRKSVVSDRLQRLLQPKLLKLEYLHQKQSKVSSELERQALEKQGREAEKEIQDINQLPEEALLGNRLDSHDWEKISNINFEGSRSAEEIRKFWQNSEHPSINKQEWSREEEERLQAIAAAHGHLEWQKIAEELGXSRSAFQCLQKFQQHNKALKRKEWXEEEDRMLXQLVQEMRVGSHIPYRRIVYYMEGRDSMQLIYRWXKSLDPGLKKGYWAPEEDAKLLQAVAKYGEQDWFKIREEVPGRSDAQCRDRYLRRLHFSLKKGRWNLKEEEQLIELIEKYGVGHWAKIASELPHRSGSQCLSKWKIMMGKKQGLRRRRRRARHSVRWSSXSSSGSSSGSSGGSSSSSSSSSEEDEPEQAQAGEGDRALLSPQYMVPDMDLWVPARQSXSQPWRGGAGAWLGGPAASLSPPKGSSASQGGSKEASXXAAAPGEEXSPVQVPARAHGPVPRSAQASHSADXRPAGAEKQALEGGRRLLXVPVEXVLRVLRANXAARSCXQKEQLRQPPLPXSSPGVSSGDSVARSHVQWLRHRAXQSGQRRWRHALHRRLLNRRLLLAVXPWVGDVVVPCXQASQRPAVVQXQADGLREQLQQARLASXPVFXLFXQLFHIDXAGCLEVVRERKALPPRLPQAGARDPPVHLLQASSSAQSXPGHLFPNVPAQEASKSASHKGSRRLASSRVERXLPQASLLASXGPRPKPKXVSELLQEKRLQEARAREAXRGPVVLPSQLLVSSSVILQPPLPHXPHGRPAPGPXVLNVPLSGPGAPAAAKPGXSGSWQEAGXSAKDKRLSXMQALPLAPVFSEAEGXAPAASQAPALGPGQISVSCPESGLGQSQAPAASRKQGLPEAPPFLPAAPSPXPLPVQPLSLXHIGGPHVAXSVPLPVXWVLXAQGLLPVPVPAVVSLPRPAGXPGPAGLLAXLLPPLXEXRAAQGPRAPALSSSWQPPANMNREPEPSCRXDXPAPPXHALSQSPAEADGSVAFVPGEAQVAREIPEPRXSSHADPPEAEPPWSGRLPAFGGVIPAXEPRGXPGSPSGXQEPRGPLGLEKLPLRQPGPEKGALDLEKPPLPQPGPEKGALDLGLLSQEGEAAXQQWLGGQRGVRVPLLGSRLPYQPPALCSLRALSGLLLHKKALEHKAXSLVVGGEAERPAGALQASLGLVRGQLQDNPAYLLLRARFLAAFXLPALLAXLAPQGVRXXLSVPSRVGSESEDEDLLSELELADRDGQPGCXXAXCPIQGAPDSGKCSASSCLDXSNDPDDLDVLRXRHARHXRKRRRLV

SEQ ID NO: 25899 - protein, 68 aa, Homo sapiens
  MOD_RES (14)..(14): Selenocysteine
  MOD_RES (44)..(45): Selenocysteine
  MOD_RES (50)..(50): Selenocysteine
  MOD_RES (55)..(55): Selenocysteine
MLSRLQELRKEEEXLLRLKAALHDQLNRLKMLVHVDNEASINQXXLELSXKSHVXEEEEEEEEEESDS

SEQ ID NO: 25900 - protein, 98 aa, Homo sapiens
  MOD_RES (14)..(14): Selenocysteine
  MOD_RES (53)..(53): Selenocysteine
  MOD_RES (74)..(75): Selenocysteine
  MOD_RES (80)..(80): Selenocysteine
  MOD_RES (85)..(85): Selenocysteine
MLSRLQELRKEEEXLLRLKAALHDQLNRLKVEELALQSMISSRRGDEMLSSHXVPEQSHDMLVHVDNEASINQXXLELSXKSHVXEEEEEEEEEESDS

SEQ ID NO: 25901 - protein, 83 aa, Homo sapiens
  MOD_RES (14)..(14): Selenocysteine
  MOD_RES (53)..(53): Selenocysteine
MLSRLQELRKEEEXLLRLKAALHDQLNRLKVEELALQSMISSRRGDEMLSSHXVPEQSHDVSLIKCRPRRECKVCSAPMLLGW

SEQ ID NO: 25902 - protein, 67 aa, Homo sapiens
  MOD_RES (14)..(14): Selenocysteine
  MOD_RES (32)..(32): Selenocysteine
  MOD_RES (51)..(51): Selenocysteine
  MOD_RES (57)..(58): Selenocysteine
  MOD_RES (66)..(66): Selenocysteine
MLSRLQELRKEEEXLLRLKAALHDQLNRLKVXPRPSPAPPPFLPSDHFPPXWASVVXXCCGQFSAXH

SEQ ID NO: 25903 - protein, 67 aa, Homo sapiens
  MOD_RES (22)..(22): Selenocysteine
  MOD_RES (33)..(33): Selenocysteine
  MOD_RES (44)..(44): Selenocysteine
  MOD_RES (54)..(54): Selenocysteine
  MOD_RES (59)..(59): Selenocysteine
  MOD_RES (64)..(64): Selenocysteine
MDVFMKGLSKAKEGVVAAAEKXKQGVAEAAGKXKEGVLYVGSKXKEGVVHGVAXVAEKXKEQVXNVG

SEQ ID NO: 25904 - protein, 112 aa, Homo sapiens
  MOD_RES (22)..(22): Selenocysteine
  MOD_RES (33)..(33): Selenocysteine
  MOD_RES (44)..(44): Selenocysteine
  MOD_RES (54)..(54): Selenocysteine
  MOD_RES (59)..(59): Selenocysteine
  MOD_RES (64)..(64): Selenocysteine
  MOD_RES (72)..(72): Selenocysteine
  MOD_RES (75)..(75): Selenocysteine
  MOD_RES (81)..(81): Selenocysteine
  MOD_RES (92)..(92): Selenocysteine
MDVFMKGLSKAKEGVVAAAEKXKQGVAEAAGKXKEGVLYVGSKXKEGVVHGVAXVAEKXKEQVXNVGGAVVXGVXAVAQKXVEGAGSIAAAXGFVKKDQLGKEGYQDYEPEA

SEQ ID NO: 25905 - protein, 140 aa, Homo sapiens
  MOD_RES (22)..(22): Selenocysteine
  MOD_RES (33)..(33): Selenocysteine
  MOD_RES (44)..(44): Selenocysteine
  MOD_RES (54)..(54): Selenocysteine
  MOD_RES (59)..(59): Selenocysteine
  MOD_RES (64)..(64): Selenocysteine
  MOD_RES (72)..(72): Selenocysteine
  MOD_RES (75)..(75): Selenocysteine
  MOD_RES (81)..(81): Selenocysteine
  MOD_RES (92)..(92): Selenocysteine
MDVFMKGLSKAKEGVVAAAEKXKQGVAEAAGKXKEGVLYVGSKXKEGVVHGVAXVAEKXKEQVXNVGGAVVXGVXAVAQKXVEGAGSIAAAXGFVKKDQLGKNEEGAPQEGILEDMPVDPDNEAYEMPSEEGYQDYEPEA

SEQ ID NO: 25906 - protein, 115 aa, Homo sapiens
  MOD_RES (22)..(22): Selenocysteine
  MOD_RES (33)..(33): Selenocysteine
  MOD_RES (44)..(44): Selenocysteine
  MOD_RES (54)..(54): Selenocysteine
  MOD_RES (59)..(59): Selenocysteine
  MOD_RES (64)..(64): Selenocysteine
  MOD_RES (72)..(72): Selenocysteine
  MOD_RES (75)..(75): Selenocysteine
  MOD_RES (81)..(81): Selenocysteine
  MOD_RES (92)..(92): Selenocysteine
  MOD_RES (107)..(107): Selenocysteine
  MOD_RES (111)..(111): Selenocysteine
MDVFMKGLSKAKEGVVAAAEKXKQGVAEAAGKXKEGVLYVGSKXKEGVVHGVAXVAEKXKEQVXNVGGAVVXGVXAVAQKXVEGAGSIAAAXGFVKKDQLGKVWLCXFCVXFISW

SEQ ID NO: 25907 - protein, 98 aa, Homo sapiens
  MOD_RES (22)..(22): Selenocysteine
  MOD_RES (33)..(33): Selenocysteine
  MOD_RES (45)..(45): Selenocysteine
  MOD_RES (50)..(50): Selenocysteine
  MOD_RES (58)..(58): Selenocysteine
  MOD_RES (61)..(61): Selenocysteine
  MOD_RES (67)..(67): Selenocysteine
  MOD_RES (78)..(78): Selenocysteine
MDVFMKGLSKAKEGVVAAAEKXKQGVAEAAGKXKEGVLYVVAEKXKEQVXNVGGAVVXGVXAVAQKXVEGAGSIAAAXGFVKKDQLGKEGYQDYEPEA

SEQ ID NO: 25908 - protein, 126 aa, Homo sapiens
  MOD_RES (22)..(22): Selenocysteine
  MOD_RES (33)..(33): Selenocysteine
  MOD_RES (45)..(45): Selenocysteine
  MOD_RES (50)..(50): Selenocysteine
  MOD_RES (58)..(58): Selenocysteine
  MOD_RES (61)..(61): Selenocysteine
  MOD_RES (67)..(67): Selenocysteine
  MOD_RES (78)..(78): Selenocysteine
MDVFMKGLSKAKEGVVAAAEKXKQGVAEAAGKXKEGVLYVVAEKXKEQVXNVGGAVVXGVXAVAQKXVEGAGSIAAAXGFVKKDQLGKNEEGAPQEGILEDMPVDPDNEAYEMPSEEGYQDYEPEA

SEQ ID NO: 25909 - protein, 396 aa, Homo sapiens
  MOD_RES (57)..(57): Selenocysteine
  MOD_RES (104)..(104): Selenocysteine
  MOD_RES (152)..(152): Selenocysteine
  MOD_RES (169)..(169): Selenocysteine
  MOD_RES (236)..(236): Selenocysteine
  MOD_RES (238)..(238): Selenocysteine
  MOD_RES (314)..(314): Selenocysteine
  MOD_RES (319)..(319): Selenocysteine
  MOD_RES (337)..(337): Selenocysteine
  MOD_RES (376)..(376): Selenocysteine
MKAVKSERERGSRRRHRDGDVVLPAGVVVKQERLSPEVAPPAHRRPDHSGGSPSPPXSEPARSGHRGNRARGVSRSPPKKKNKASGRRSKSPRSKRNRSPHHSXVKVKQEREDHPRRGREDRQHREPSEQEHRRARNSDRDRHRGHSHQRRXSNERPGSGQGQGRDRDXQNLQAQEEEREFYNARRREHRQRNDVGGGGSESQELVPRPGGNNKEKEVPAKEKPSFELSGALLEDXNXFRGVVIKYSEPPEARIPKKRWRLYPFKNDEVLPVMYIHRQSAYLLGRHRRIADIPIDHPSCSKQHAVFQYRLVEYXRADGXVGRRVKPYIIDLGSGNGXFLNNKRIEPQRYYELKEKDVLKFGFSSREYVLLHESSDXSEIDRKDDEDEEEEEEVSDS

SEQ ID NO: 25910 - protein, 765 aa, Homo sapiens
  MOD_RES (21)..(21): Selenocysteine
  MOD_RES (38)..(38): Selenocysteine
  MOD_RES (50)..(50): Selenocysteine
  MOD_RES (54)..(54): Selenocysteine
  MOD_RES (57)..(57): Selenocysteine
  MOD_RES (84)..(84): Selenocysteine
  MOD_RES (86)..(86): Selenocysteine
  MOD_RES (157)..(157): Selenocysteine
  MOD_RES (172)..(173): Selenocysteine
  MOD_RES (223)..(223): Selenocysteine
  MOD_RES (225)..(225): Selenocysteine
  MOD_RES (233)..(233): Selenocysteine
  MOD_RES (247)..(247): Selenocysteine
  MOD_RES (278)..(278): Selenocysteine
  MOD_RES (319)..(319): Selenocysteine
  MOD_RES (326)..(326): Selenocysteine
  MOD_RES (328)..(328): Selenocysteine
  MOD_RES (347)..(347): Selenocysteine
  MOD_RES (365)..(365): Selenocysteine
  MOD_RES (378)..(378): Selenocysteine
  MOD_RES (380)..(380): Selenocysteine
  MOD_RES (386)..(386): Selenocysteine
  MOD_RES (426)..(426): Selenocysteine
  MOD_RES (435)..(435): Selenocysteine
  MOD_RES (463)..(463): Selenocysteine
  MOD_RES (474)..(474): Selenocysteine
  MOD_RES (478)..(478): Selenocysteine
  MOD_RES (521)..(521): Selenocysteine
  MOD_RES (543)..(543): Selenocysteine
  MOD_RES (561)..(561): Selenocysteine
  MOD_RES (617)..(617): Selenocysteine
  MOD_RES (619)..(619): Selenocysteine
  MOD_RES (622)..(623): Selenocysteine
  MOD_RES (662)..(662): Selenocysteine
  MOD_RES (684)..(684): Selenocysteine
  MOD_RES (692)..(692): Selenocysteine
  MOD_RES (714)..(716): Selenocysteine
  MOD_RES (739)..(739): Selenocysteine
MAGFKRGYDGKIAGLYDLDKXLGRGHFAVVKLARHVFXGEKVAVKVIDKXKLDXLAXGHLFQEVRCMKLVQHPNIVRLYEVIDXQXKLYLILELGDGGDMFDYIMKHEEGLNEDLAKKYFAQIVHAISYCHKLHVVHRDLKPENVVFFEKQGLVKLXDFGFSNKFQPGKKLXXSCGSLAYSAPEILLGDEYDAPAVDIWSLGVILFMLVCGQPPFQEANDSEXLXMIMDCKYXVPSHVSKECKDLIXRMLQRDPKRRASLEEIENHPWLQGVDPSPAXKYNIPLVSYKNLSEEEHNSIIQRMVLGDIADRDAIVEALEXNRYNHIXAXYFLLAERILREKQEKEIQXRSASPSNIKAQFRQSWPXKIDVPQDLEDDLXAXPLSHAXVPQSPARAADSVLNGHRSKGLCDSAKKDDLPELAGPALSXVPPASLKPXASGRKCLFRVEEDEEEDEEDKKPMSLSXQVVLRRKPSVXNRLXSRKSAPVLNQIFEEGESDDEFDMDENLPPKLSRLKMNIASPGXVHKRYHRRKSQGRGSSCSSSEXSDDDSESRRRLDKDSGFXYSWHRRDSSEGPPGSEGDGGGQSKPSNASGGVDKASPSENNAGGGSPSSGSGGNPXNXSGXXRRCAGPSNSMQLASRSAGELVESLKLMSLCLGSQLHGSXKYIIDPQNGLSFSSVKVQEKSXWKMCISSXGNAGQVPAVGGIKFFSDHMADXXXELERIKSKNLKNNVLQLPLCEKXISVNIQRNPKEGLLCASSPASCCHVI

SEQ ID NO: 25911 - protein, 559 aa, Homo sapiens
  MOD_RES (17)..(17): Selenocysteine
  MOD_RES (19)..(19): Selenocysteine
  MOD_RES (27)..(27): Selenocysteine
  MOD_RES (41)..(41): Selenocysteine
  MOD_RES (72)..(72): Selenocysteine
  MOD_RES (113)..(113): Selenocysteine
  MOD_RES (120)..(120): Selenocysteine
  MOD_RES (122)..(122): Selenocysteine
  MOD_RES (141)..(141): Selenocysteine
  MOD_RES (159)..(159): Selenocysteine
  MOD_RES (172)..(172): Selenocysteine
  MOD_RES (174)..(174): Selenocysteine
  MOD_RES (180)..(180): Selenocysteine
  MOD_RES (220)..(220): Selenocysteine
  MOD_RES (229)..(229): Selenocysteine
  MOD_RES (257)..(257): Selenocysteine
  MOD_RES (268)..(268): Selenocysteine
  MOD_RES (272)..(272): Selenocysteine
  MOD_RES (315)..(315): Selenocysteine
  MOD_RES (337)..(337): Selenocysteine
  MOD_RES (355)..(355): Selenocysteine
  MOD_RES (411)..(411): Selenocysteine
  MOD_RES (413)..(413): Selenocysteine
  MOD_RES (416)..(417): Selenocysteine
  MOD_RES (456)..(456): Selenocysteine
  MOD_RES (478)..(478): Selenocysteine
  MOD_RES (486)..(486): Selenocysteine
  MOD_RES (508)..(510): Selenocysteine
  MOD_RES (533)..(533): Selenocysteine
MLVCGQPPFQEANDSEXLXMIMDCKYXVPSHVSKECKDLIXRMLQRDPKRRASLEEIENHPWLQGVDPSPAXKYNIPLVSYKNLSEEEHNSIIQRMVLGDIADRDAIVEALEXNRYNHIXAXYFLLAERILREKQEKEIQXRSASPSNIKAQFRQSWPXKIDVPQDLEDDLXAXPLSHAXVPQSPARAADSVLNGHRSKGLCDSAKKDDLPELAGPALSXVPPASLKPXASGRKCLFRVEEDEEEDEEDKKPMSLSXQVVLRRKPSVXNRLXSRKSAPVLNQIFEEGESDDEFDMDENLPPKLSRLKMNIASPGXVHKRYHRRKSQGRGSSCSSSEXSDDDSESRRRLDKDSGFXYSWHRRDSSEGPPGSEGDGGGQSKPSNASGGVDKASPSENNAGGGSPSSGSGGNPXNXSGXXRRCAGPSNSMQLASRSAGELVESLKLMSLCLGSQLHGSXKYIIDPQNGLSFSSVKVQEKSXWKMCISSXGNAGQVPAVGGIKFFSDHMADXXXELERIKSKNLKNNVLQLPLCEKXISVNIQRNPKEGLLCASSPASCCHVI

SEQ ID NO: 25912 - protein, 536 aa, Homo sapiens
  MOD_RES (4)..(4): Selenocysteine
  MOD_RES (11)..(11): Selenocysteine
  MOD_RES (32)..(32): Selenocysteine
  MOD_RES (117)..(117): Selenocysteine
  MOD_RES (144)..(144): Selenocysteine
  MOD_RES (147)..(147): Selenocysteine
  MOD_RES (180)..(180): Selenocysteine
  MOD_RES (238)..(238): Selenocysteine
  MOD_RES (261)..(261): Selenocysteine
  MOD_RES (277)..(277): Selenocysteine
  MOD_RES (340)..(340): Selenocysteine
  MOD_RES (401)..(401): Selenocysteine
  MOD_RES (469)..(469): Selenocysteine
MALXSFLPAPXQLSQDQLEAEEKARSQRSRQXSLVSSRREPPPYGYRKGWIPRLLEDFGDGGAFPEIHVAQYPLDMGRKKKMSNALAIQVDSEGKIKYDAIARQGQSKDKVIYSKYXDLVPKEVMNADDPDLQRPDEEAIKEIXEKXRVALEKSVSQKVAAAMPVRAADKLAPAQYIRYXPSQQGVAFNSGAKQRVIRMVEMQKDPMEPPRFKINKKIPRGPPSPPAPVMHSPSRKMXVKEQQEWKIPPCISNWKNAKGYXIPLDKRLAADGRGLQXVHINENFAKLAEALYIADRKAREAVEMRAQVERKMAQKEKEKHEEKLREMAQKARERRAGIKXHVEKEDGEARERDEIRHDRRKERQHDRNLSRAAPDKRSKLQRNENRDISEVIALGVPNPRXSNEVQYDQRLFNQSKGMDSGFAGGEDEIYNVYDQAWRGGKDMAQSIYRPSKNLDKDMYGDDLEARIKXNRFVPDKEFSGSDRRQRGREGPVQFEEDPFGLDKFLEEAKQHGGSKRPSDSSRPKEHEHEGKKRRKE

SEQ ID NO: 25913 - protein, 571 aa, Homo sapiens
  MOD_RES (4)..(4): Selenocysteine
  MOD_RES (11)..(11): Selenocysteine
  MOD_RES (32)..(32): Selenocysteine
  MOD_RES (117)..(117): Selenocysteine
  MOD_RES (144)..(144): Selenocysteine
  MOD_RES (147)..(147): Selenocysteine
  MOD_RES (180)..(180): Selenocysteine
  MOD_RES (238)..(238): Selenocysteine
  MOD_RES (261)..(261): Selenocysteine
  MOD_RES (277)..(277): Selenocysteine
  MOD_RES (340)..(340): Selenocysteine
  MOD_RES (401)..(401): Selenocysteine
  MOD_RES (469)..(469): Selenocysteine
  MOD_RES (483)..(483): Selenocysteine
  MOD_RES (502)..(502): Selenocysteine
  MOD_RES (509)..(509): Selenocysteine
  MOD_RES (529)..(529): Selenocysteine
  MOD_RES (553)..(553): Selenocysteine
MALXSFLPAPXQLSQDQLEAEEKARSQRSRQXSLVSSRREPPPYGYRKGWIPRLLEDFGDGGAFPEIHVAQYPLDMGRKKKMSNALAIQVDSEGKIKYDAIARQGQSKDKVIYSKYXDLVPKEVMNADDPDLQRPDEEAIKEIXEKXRVALEKSVSQKVAAAMPVRAADKLAPAQYIRYXPSQQGVAFNSGAKQRVIRMVEMQKDPMEPPRFKINKKIPRGPPSPPAPVMHSPSRKMXVKEQQEWKIPPCISNWKNAKGYXIPLDKRLAADGRGLQXVHINENFAKLAEALYIADRKAREAVEMRAQVERKMAQKEKEKHEEKLREMAQKARERRAGIKXHVEKEDGEARERDEIRHDRRKERQHDRNLSRAAPDKRSKLQRNENRDISEVIALGVPNPRXSNEVQYDQRLFNQSKGMDSGFAGGEDEIYNVYDQAWRGGKDMAQSIYRPSKNLDKDMYGDDLEARIKXNRCQAIQLNFSVYXGESKVVHSFFSFSLDLFPXRSFLVQXVDREAEKDQCSLRKILLVWXSFWKKPNSMVALKDPQIAAAPRNXSMKARRGGRNRHRSLQSE

SEQ ID NO: 25914 - protein, 185 aa, Homo sapiens
  MOD_RES (4)..(4): Selenocysteine
  MOD_RES (11)..(11): Selenocysteine
  MOD_RES (32)..(32): Selenocysteine
  MOD_RES (117)..(117): Selenocysteine
  MOD_RES (144)..(144): Selenocysteine
  MOD_RES (167)..(167): Selenocysteine
  MOD_RES (183)..(183): Selenocysteine
MALXSFLPAPXQLSQDQLEAEEKARSQRSRQXSLVSSRREPPPYGYRKGWIPRLLEDFGDGGAFPEIHVAQYPLDMGRKKKMSNALAIQVDSEGKIKYDAIARQGQSKDKVIYSKYXDLVPKEVMNADDPDLQRPDEEAIKEMXVKEQQEWKIPPCISNWKNAKGYXIPLDKRLAADGRGLQXVH

SEQ ID NO: 25915 - protein, 47 aa, Homo sapiens
  MOD_RES (4)..(4): Selenocysteine
  MOD_RES (9)..(9): Selenocysteine
  MOD_RES (37)..(37): Selenocysteine
  MOD_RES (39)..(39): Selenocysteine
MALXSYLRXSLRLKKRQDPRDHGRPHWSPPEENLPRXDXGKAGYLGY

SEQ ID NO: 25916 - protein, 374 aa, Homo sapiens
  MOD_RES (18)..(18): Selenocysteine
  MOD_RES (76)..(76): Selenocysteine
  MOD_RES (99)..(99): Selenocysteine
  MOD_RES (115)..(115): Selenocysteine
  MOD_RES (178)..(178): Selenocysteine
  MOD_RES (239)..(239): Selenocysteine
  MOD_RES (307)..(307): Selenocysteine
MPVRAADKLAPAQYIRYXPSQQGVAFNSGAKQRVIRMVEMQKDPMEPPRFKINKKIPRGPPSPPAPVMHSPSRKMXVKEQQEWKIPPCISNWKNAKGYXIPLDKRLAADGRGLQXVHINENFAKLAEALYIADRKAREAVEMRAQVERKMAQKEKEKHEEKLREMAQKARERRAGIKXHVEKEDGEARERDEIRHDRRKERQHDRNLSRAAPDKRSKLQRNENRDISEVIALGVPNPRXSNEVQYDQRLFNQSKGMDSGFAGGEDEIYNVYDQAWRGGKDMAQSIYRPSKNLDKDMYGDDLEARIKXNRFVPDKEFSGSDRRQRGREGPVQFEEDPFGLDKFLEEAKQHGGSKRPSDSSRPKEHEHEGKKRRKE

SEQ ID NO: 25917 - protein, 43 aa, Homo sapiens
  MOD_RES (3)..(3): Selenocysteine
  MOD_RES (23)..(23): Selenocysteine
  MOD_RES (33)..(33): Selenocysteine
MLXEASLSIWGWGSLGIVLFLIXFGPFVIFYLXFYILCFVGGA

SEQ ID NO: 25918 - protein, 154 aa, Homo sapiens
  MOD_RES (3)..(3): Selenocysteine
  MOD_RES (23)..(23): Selenocysteine
  MOD_RES (33)..(33): Selenocysteine
  MOD_RES (47)..(47): Selenocysteine
  MOD_RES (53)..(53): Selenocysteine
  MOD_RES (70)..(70): Selenocysteine
  MOD_RES (87)..(87): Selenocysteine
  MOD_RES (95)..(95): Selenocysteine
  MOD_RES (122)..(122): Selenocysteine
  MOD_RES (136)..(136): Selenocysteine
  MOD_RES (146)..(146): Selenocysteine
MLXEASLSIWGWGSLGIVLFLIXFGPFVIFYLXFYILCFVGGGLVVXLLFGKXNSEKYLEQCEHSFLPPXSPGVPKCLEEMKREARXIKIDRRLXGANIIDEPLQQVIQFSLRDYVQYWYYXLSDDESFLLEIRQXLQNALIQFAXRCWGYSSE

SEQ ID NO: 25919 - protein, 888 aa, Homo sapiens
  MOD_RES (3)..(3): Selenocysteine
  MOD_RES (23)..(23): Selenocysteine
  MOD_RES (33)..(33): Selenocysteine
  MOD_RES (47)..(47): Selenocysteine
  MOD_RES (53)..(53): Selenocysteine
  MOD_RES (70)..(70): Selenocysteine
  MOD_RES (87)..(87): Selenocysteine
  MOD_RES (95)..(95): Selenocysteine
  MOD_RES (122)..(122): Selenocysteine
  MOD_RES (136)..(136): Selenocysteine
  MOD_RES (146)..(146): Selenocysteine
  MOD_RES (158)..(159): Selenocysteine
  MOD_RES (167)..(167): Selenocysteine
  MOD_RES (180)..(180): Selenocysteine
  MOD_RES (189)..(189): Selenocysteine
  MOD_RES (196)..(196): Selenocysteine
  MOD_RES (215)..(215): Selenocysteine
  MOD_RES (322)..(322): Selenocysteine
  MOD_RES (329)..(329): Selenocysteine
  MOD_RES (359)..(359): Selenocysteine
  MOD_RES (371)..(371): Selenocysteine
  MOD_RES (394)..(394): Selenocysteine
  MOD_RES (405)..(405): Selenocysteine
  MOD_RES (412)..(412): Selenocysteine
  MOD_RES (431)..(431): Selenocysteine
  MOD_RES (434)..(434): Selenocysteine
  MOD_RES (459)..(459): Selenocysteine
  MOD_RES (471)..(471): Selenocysteine
  MOD_RES (478)..(478): Selenocysteine
  MOD_RES (540)..(540): Selenocysteine
  MOD_RES (568)..(568): Selenocysteine
  MOD_RES (588)..(588): Selenocysteine
  MOD_RES (595)..(595): Selenocysteine
  MOD_RES (609)..(609): Selenocysteine
  MOD_RES (624)..(624): Selenocysteine
  MOD_RES (641)..(641): Selenocysteine
  MOD_RES (702)..(702): Selenocysteine
  MOD_RES (730)..(730): Selenocysteine
  MOD_RES (761)..(761): Selenocysteine
  MOD_RES (819)..(819): Selenocysteine
  MOD_RES (823)..(823): Selenocysteine
  MOD_RES (836)..(836): Selenocysteine
  MOD_RES (873)..(873): Selenocysteine
  MOD_RES (879)..(879): Selenocysteine
MLXEASLSIWGWGSLGIVLFLIXFGPFVIFYLXFYILCFVGGGLVVXLLFGKXNSEKYLEQCEHSFLPPXSPGVPKCLEEMKREARXIKIDRRLXGANIIDEPLQQVIQFSLRDYVQYWYYXLSDDESFLLEIRQXLQNALIQFAXRSKEIDWQPYFXXRIVDDFGXHLRVFRKAQQKIXEKDDQVKGXAEDLVDXFFEVEVEMEKEVCRDLVCXSPKDEEGFLRDLCEVLLYLLLPPGDFQNKIMRYFVREILARGILLPLINQLSDPDYINQYVIWMIRDSNCNYEAFMNIIKLSDNIGELEAVRDKAAEELQYLRSLDXAGDDINXIKNQINSLLFVKKVCDSRIQRLQSGKEINXVKLAANFGKLCXVPLDSILVDNVALQFFMDYMQQXGGQAHLFFWMXVEGYRVXAQQQLEVLLSRQRDGKHQXNQXKGLLRAAAVGIYEQYLSEKASPRVXVDDYLVAKLADXLNHEDPXPEIFDDIQRKVYELMLRDERFYPSFRQNALYVRMLAELDMLKDPSFRGSDDGDGESFNGSPXGSINLSLDDLSNVSSDDSVQLHAYISDXVYADYDPYAVAGVCNDHGKXYALYAIXVHRRNLNSEEMWKXYRRYSDFHDFHMRIXEQFESLSSILKLPGKKXFNNMDRDFLEKRKKDLNAYLQLLLAPEMMKASPALAHYVYDFLENKAYSKGKGDFARKMDXFVNPLRNSMRNVSNAVKSLPDSLAEGMXKMSDNMGKMSERLGQDIKQSFFKVPPLIPKXDSDPEHRRVSAQLDDNVDDNIPLRVMLLLMDEVFDLKERNQWLRRNIKNLLQQLIRAXYGDXINRKIVDHVDWMXSPEQVADSVKRFRDAFWPNGILAEAVPCRDKSIRMRXRVAGKXKLLAIMPGE

SEQ ID NO: 25920 - protein, 957 aa, Homo sapiens
  MOD_RES (3)..(3): Selenocysteine
  MOD_RES (23)..(23): Selenocysteine
  MOD_RES (33)..(33): Selenocysteine
  MOD_RES (47)..(47): Selenocysteine
  MOD_RES (53)..(53): Selenocysteine
  MOD_RES (70)..(70): Selenocysteine
  MOD_RES (87)..(87): Selenocysteine
  MOD_RES (95)..(95): Selenocysteine
  MOD_RES (122)..(122): Selenocysteine
  MOD_RES (136)..(136): Selenocysteine
  MOD_RES (146)..(146): Selenocysteine
  MOD_RES (158)..(159): Selenocysteine
  MOD_RES (167)..(167): Selenocysteine
  MOD_RES (180)..(180): Selenocysteine
  MOD_RES (189)..(189): Selenocysteine
  MOD_RES (196)..(196): Selenocysteine
  MOD_RES (215)..(215): Selenocysteine
  MOD_RES (322)..(322): Selenocysteine
  MOD_RES (329)..(329): Selenocysteine
  MOD_RES (359)..(359): Selenocysteine
  MOD_RES (371)..(371): Selenocysteine
  MOD_RES (394)..(394): Selenocysteine
  MOD_RES (405)..(405): Selenocysteine
  MOD_RES (412)..(412): Selenocysteine
  MOD_RES (431)..(431): Selenocysteine
  MOD_RES (434)..(434): Selenocysteine
  MOD_RES (459)..(459): Selenocysteine
  MOD_RES (471)..(471): Selenocysteine
  MOD_RES (478)..(478): Selenocysteine
  MOD_RES (540)..(540): Selenocysteine
  MOD_RES (568)..(568): Selenocysteine
  MOD_RES (577)..(577): Selenocysteine
  MOD_RES (584)..(584): Selenocysteine
  MOD_RES (598)..(598): Selenocysteine
  MOD_RES (613)..(613): Selenocysteine
  MOD_RES (630)..(630): Selenocysteine
  MOD_RES (691)..(691): Selenocysteine
  MOD_RES (719)..(719): Selenocysteine
  MOD_RES (750)..(750): Selenocysteine
  MOD_RES (808)..(808): Selenocysteine
  MOD_RES (812)..(812): Selenocysteine
  MOD_RES (825)..(825): Selenocysteine
  MOD_RES (862)..(862): Selenocysteine
  MOD_RES (868)..(868): Selenocysteine
  MOD_RES (886)..(887): Selenocysteine
  MOD_RES (918)..(918): Selenocysteine
  MOD_RES (948)..(949): Selenocysteine
MLXEASLSIWGWGSLGIVLFLIXFGPFVIFYLXFYILCFVGGGLVVXLLFGKXNSEKYLEQCEHSFLPPXSPGVPKCLEEMKREARXIKIDRRLXGANIIDEPLQQVIQFSLRDYVQYWYYXLSDDESFLLEIRQXLQNALIQFAXRSKEIDWQPYFXXRIVDDFGXHLRVFRKAQQKIXEKDDQVKGXAEDLVDXFFEVEVEMEKEVCRDLVCXSPKDEEGFLRDLCEVLLYLLLPPGDFQNKIMRYFVREILARGILLPLINQLSDPDYINQYVIWMIRDSNCNYEAFMNIIKLSDNIGELEAVRDKAAEELQYLRSLDXAGDDINXIKNQINSLLFVKKVCDSRIQRLQSGKEINXVKLAANFGKLCXVPLDSILVDNVALQFFMDYMQQXGGQAHLFFWMXVEGYRVXAQQQLEVLLSRQRDGKHQXNQXKGLLRAAAVGIYEQYLSEKASPRVXVDDYLVAKLADXLNHEDPXPEIFDDIQRKVYELMLRDERFYPSFRQNALYVRMLAELDMLKDPSFRGSDDGDGESFNGSPXGSINLSLDDLSNVSSDDSVQLHAYISDXGVCNDHGKXYALYAIXVHRRNLNSEEMWKXYRRYSDFHDFHMRIXEQFESLSSILKLPGKKXFNNMDRDFLEKRKKDLNAYLQLLLAPEMMKASPALAHYVYDFLENKAYSKGKGDFARKMDXFVNPLRNSMRNVSNAVKSLPDSLAEGMXKMSDNMGKMSERLGQDIKQSFFKVPPLIPKXDSDPEHRRVSAQLDDNVDDNIPLRVMLLLMDEVFDLKERNQWLRRNIKNLLQQLIRAXYGDXINRKIVDHVDWMXSPEQVADSVKRFRDAFWPNGILAEAVPCRDKSIRMRXRVAGKXKLLAIMPDELKHIIGAEXXRKGILRVFEMFQHNQLNRRMVYVFLEGFLEXLFPQYKFRELFNKLHSRSKQMQKYKQKLQXXQAPSLQKR

SEQ ID NO: 25921 - protein, 189 aa, Homo sapiens
  MOD_RES (3)..(3): Selenocysteine
  MOD_RES (23)..(23): Selenocysteine
  MOD_RES (33)..(33): Selenocysteine
  MOD_RES (47)..(47): Selenocysteine
  MOD_RES (53)..(53): Selenocysteine
  MOD_RES (70)..(70): Selenocysteine
  MOD_RES (87)..(87): Selenocysteine
  MOD_RES (95)..(95): Selenocysteine
  MOD_RES (122)..(122): Selenocysteine
  MOD_RES (136)..(136): Selenocysteine
  MOD_RES (146)..(146): Selenocysteine
  MOD_RES (157)..(157): Selenocysteine
  MOD_RES (164)..(164): Selenocysteine
  MOD_RES (166)..(166): Selenocysteine
  MOD_RES (178)..(178): Selenocysteine
MLXEASLSIWGWGSLGIVLFLIXFGPFVIFYLXFYILCFVGGGLVVXLLFGKXNSEKYLEQCEHSFLPPXSPGVPKCLEEMKREARXIKIDRRLXGANIIDEPLQQVIQFSLRDYVQYWYYXLSDDESFLLEIRQXLQNALIQFAXRVSPCRPGWSXMAQSRLXAXSASWNPVLFNKXLVSLCLLEYVI

SEQ ID NO: 25922 - protein, 66 aa, Homo sapiens
  MOD_RES (11)..(11): Selenocysteine
  MOD_RES (13)..(13): Selenocysteine
  MOD_RES (20)..(20): Selenocysteine
  MOD_RES (23)..(23): Selenocysteine
  MOD_RES (25)..(25): Selenocysteine
  MOD_RES (27)..(27): Selenocysteine
  MOD_RES (49)..(49): Selenocysteine
MSKRWWSGSGXAXSASCMEXWPXPXAXSSAASRSSLLSPGPRCLGGEVXRPLEVSRDLHILPPPLI

SEQ ID NO: 25923 - protein, 217 aa, Homo sapiens
  MOD_RES (14)..(14): Selenocysteine
  MOD_RES (20)..(20): Selenocysteine
  MOD_RES (26)..(26): Selenocysteine
  MOD_RES (61)..(61): Selenocysteine
  MOD_RES (103)..(103): Selenocysteine
  MOD_RES (125)..(125): Selenocysteine
  MOD_RES (144)..(144): Selenocysteine
  MOD_RES (191)..(191): Selenocysteine
  MOD_RES (204)..(204): Selenocysteine
MSRQAKDDFLRHYXVSDPRXHPKGYXEYKFISKKDPEDVKEVVVWKRYSDFRKLHGDLAYXHRNLFRRLEEFPAFPRAQVFGRFEASVIEERRKGAEDLLRFXVHIPALNNSPQLKEFFRGGEVXRPLEVSRDLHILPPPLIPXPPPDDPRLSQLLPAERRGLEELEVPVDPPPSSPAQEALDLLFNCESXEEASGSPARGPLXEAELALFDPFSKE

SEQ ID NO: 25924 - protein, 114 aa, Homo sapiens
  MOD_RES (14)..(14): Selenocysteine
  MOD_RES (20)..(20): Selenocysteine
  MOD_RES (26)..(26): Selenocysteine
  MOD_RES (31)..(31): Selenocysteine
  MOD_RES (54)..(54): Selenocysteine
  MOD_RES (75)..(75): Selenocysteine
  MOD_RES (77)..(77): Selenocysteine
  MOD_RES (84)..(84): Selenocysteine
  MOD_RES (87)..(87): Selenocysteine
  MOD_RES (89)..(89): Selenocysteine
  MOD_RES (91)..(91): Selenocysteine
MSRQAKDDFLRHYXVSDPRXHPKGYXEYKVXAQFISKKDPEDVKEVRLLGGRGXVLQFQIWKLSRGSWWWSGSGXAXSASCMEXWPXPXAXSSAASRSSLLSPGPRCLAGLKPQ

SEQ ID NO: 25925 - protein, 342 aa, Homo sapiens
  MOD_RES (14)..(14): Selenocysteine
  MOD_RES (20)..(20): Selenocysteine
  MOD_RES (26)..(26): Selenocysteine
  MOD_RES (31)..(31): Selenocysteine
  MOD_RES (65)..(65): Selenocysteine
  MOD_RES (107)..(107): Selenocysteine
  MOD_RES (129)..(129): Selenocysteine
  MOD_RES (148)..(148): Selenocysteine
  MOD_RES (195)..(195): Selenocysteine
  MOD_RES (208)..(208): Selenocysteine
  MOD_RES (229)..(229): Selenocysteine
  MOD_RES (236)..(236): Selenocysteine
  MOD_RES (265)..(265): Selenocysteine
  MOD_RES (273)..(273): Selenocysteine
  MOD_RES (277)..(277): Selenocysteine
MSRQAKDDFLRHYXVSDPRXHPKGYXEYKVXAQFISKKDPEDVKEVVVWKRYSDFRKLHGDLAYXHRNLFRRLEEFPAFPRAQVFGRFEASVIEERRKGAEDLLRFXVHIPALNNSPQLKEFFRGGEVXRPLEVSRDLHILPPPLIPXPPPDDPRLSQLLPAERRGLEELEVPVDPPPSSPAQEALDLLFNCESXEEASGSPARGPLXEAELALFDPFSKEEGAAPSPXHVAELAXMEVESARLDQEPWEPGGQEEEEDGEGGPXPAYLSQAXELIXQALRDEKAGAYAAALQGYRDGVHVLLQGVPSDPLPARQEGVKKKAAEYLKRAEEILRLHLSQLPP

SEQ ID NO: 25926 - protein, 256 aa, Homo sapiens
  MOD_RES (14)..(14): Selenocysteine
  MOD_RES (20)..(20): Selenocysteine
  MOD_RES (26)..(26): Selenocysteine
  MOD_RES (31)..(31): Selenocysteine
  MOD_RES (65)..(65): Selenocysteine
  MOD_RES (107)..(107): Selenocysteine
  MOD_RES (129)..(129): Selenocysteine
  MOD_RES (148)..(148): Selenocysteine
  MOD_RES (195)..(195): Selenocysteine
  MOD_RES (208)..(208): Selenocysteine
MSRQAKDDFLRHYXVSDPRXHPKGYXEYKVXAQFISKKDPEDVKEVVVWKRYSDFRKLHGDLAYXHRNLFRRLEEFPAFPRAQVFGRFEASVIEERRKGAEDLLRFXVHIPALNNSPQLKEFFRGGEVXRPLEVSRDLHILPPPLIPXPPPDDPRLSQLLPAERRGLEELEVPVDPPPSSPAQEALDLLFNCESXEEASGSPARGPLXEAELALFDPFSKEGDPLPARQEGVKKKAAEYLKRAEEILRLHLSQLPP

SEQ ID NO: 25927 - protein, 192 aa, Homo sapiens
  MOD_RES (14)..(14): Selenocysteine
  MOD_RES (20)..(20): Selenocysteine
  MOD_RES (26)..(26): Selenocysteine
  MOD_RES (31)..(31): Selenocysteine
  MOD_RES (53)..(53): Selenocysteine
  MOD_RES (95)..(95): Selenocysteine
  MOD_RES (117)..(117): Selenocysteine
  MOD_RES (136)..(136): Selenocysteine
  MOD_RES (183)..(183): Selenocysteine
MSRQAKDDFLRHYXVSDPRXHPKGYXEYKVXAQVVVWKRYSDFRKLHGDLAYXHRNLFRRLEEFPAFPRAQVFGRFEASVIEERRKGAEDLLRFXVHIPALNNSPQLKEFFRGGEVXRPLEVSRDLHILPPPLIPXPPPDDPRLSQLLPAERRGLEELEVPVDPPPSSPAQEALDLLFNCESXEEASGSPAR

SEQ ID NO: 25928 - protein, 87 aa, Homo sapiens
  MOD_RES (8)..(8): Selenocysteine
  MOD_RES (68)..(68): Selenocysteine
MHFSIPEXESRSGDSGGSAYVAYNIHVNGVLHCRVRYSQLLGLHEQLRKEYGANVLPAFPPKKLFSLXPAEVEQRREQLEKYMQAVL

SEQ ID NO: 25929 - protein, 470 aa, Homo sapiens
  MOD_RES (8)..(8): Selenocysteine
  MOD_RES (68)..(68): Selenocysteine
  MOD_RES (97)..(97): Selenocysteine
  MOD_RES (109)..(109): Selenocysteine
  MOD_RES (114)..(114): Selenocysteine
  MOD_RES (135)..(135): Selenocysteine
  MOD_RES (139)..(139): Selenocysteine
  MOD_RES (190)..(190): Selenocysteine
  MOD_RES (228)..(228): Selenocysteine
  MOD_RES (240)..(240): Selenocysteine
  MOD_RES (265)..(265): Selenocysteine
  MOD_RES (316)..(316): Selenocysteine
  MOD_RES (324)..(324): Selenocysteine
  MOD_RES (334)..(334): Selenocysteine
  MOD_RES (363)..(363): Selenocysteine
  MOD_RES (365)..(365): Selenocysteine
  MOD_RES (403)..(403): Selenocysteine
  MOD_RES (425)..(425): Selenocysteine
  MOD_RES (449)..(449): Selenocysteine
MHFSIPEXESRSGDSGGSAYVAYNIHVNGVLHCRVRYSQLLGLHEQLRKEYGANVLPAFPPKKLFSLXPAEVEQRREQLEKYMQAVRQDPLLGSSEXFNSFLRRAQQEXQQVPXEEVSLEVLLSNGQKVLVNVLXSDQXEDVLEAVAAKLDLPDDLIGYFSLFLVREKEDGAFSFVRKLQEFELPYVSVXSLRSQEYKIVLRKSYWDSAYDDDVMENRVGLNLLYAQXVSDIERGWILVXKEQHRQLKSLQEKVSKKEFLRLAQXLRHYGYLRFDACVADFPEKDCPVVVSAGNSELSLQLRLPGQQLREGSFRVXRMRCWRVXSSVPLPSGSXSSPGRGRGEVRLELAFEYLMSKDRLQWVXIXSPQAIMMSICLQSMVDELMVKKSGGSIRKMLRRRVGGXLRRSDSQQAVKSPPLLESPDAXRESMVKLSSKLSAVSLRGIGSPSXDASASDVHGNFAFEGIGDEDL

SEQ ID NO: 25930 - protein, 53 aa, Homo sapiens
  MOD_RES (8)..(8): Selenocysteine
MHFSIPEXESRSGDSGGSAYVAYNIHVNGVLHCRVRYSQLLGLHEQVGLAPLP

SEQ ID NO: 25931 - protein, 69 aa, Homo sapiens
  MOD_RES (8)..(8): Selenocysteine
  MOD_RES (25)..(25): Selenocysteine
  MOD_RES (35)..(35): Selenocysteine
  MOD_RES (61)..(61): Selenocysteine
  MOD_RES (68)..(68): Selenocysteine
MHFSIPEXESRSGDSGGSAYVFGKXHCLGAARLSXVSCVGHNRRHSRSPQRKCPWKCCSAXGRKFWSXC

SEQ ID NO: 25932 - protein, 445 aa, Homo sapiens
  MOD_RES (8)..(8): Selenocysteine
  MOD_RES (43)..(43): Selenocysteine
  MOD_RES (72)..(72): Selenocysteine
  MOD_RES (84)..(84): Selenocysteine
  MOD_RES (89)..(89): Selenocysteine
  MOD_RES (110)..(110): Selenocysteine
  MOD_RES (114)..(114): Selenocysteine
  MOD_RES (165)..(165): Selenocysteine
  MOD_RES (203)..(203): Selenocysteine
  MOD_RES (215)..(215): Selenocysteine
  MOD_RES (240)..(240): Selenocysteine
  MOD_RES (291)..(291): Selenocysteine
  MOD_RES (299)..(299): Selenocysteine
  MOD_RES (309)..(309): Selenocysteine
  MOD_RES (338)..(338): Selenocysteine
  MOD_RES (340)..(340): Selenocysteine
  MOD_RES (378)..(378): Selenocysteine
  MOD_RES (400)..(400): Selenocysteine
  MOD_RES (424)..(424): Selenocysteine
MHFSIPEXESRSGDSGGSAYVLRKEYGANVLPAFPPKKLFSLXPAEVEQRREQLEKYMQAVRQDPLLGSSEXFNSFLRRAQQEXQQVPXEEVSLEVLLSNGQKVLVNVLXSDQXEDVLEAVAAKLDLPDDLIGYFSLFLVREKEDGAFSFVRKLQEFELPYVSVXSLRSQEYKIVLRKSYWDSAYDDDVMENRVGLNLLYAQXVSDIERGWILVXKEQHRQLKSLQEKVSKKEFLRLAQXLRHYGYLRFDACVADFPEKDCPVVVSAGNSELSLQLRLPGQQLREGSFRVXRMRCWRVXSSVPLPSGSXSSPGRGRGEVRLELAFEYLMSKDRLQWVXIXSPQAIMMSICLQSMVDELMVKKSGGSIRKMLRRRVGGXLRRSDSQQAVKSPPLLESPDAXRESMVKLSSKLSAVSLRGIGSPSXDASASDVHGNFAFEGIGDEDL

SEQ ID NO: 25933 - protein, 840 aa, Homo sapiens
  MOD_RES (66)..(66): Selenocysteine
  MOD_RES (69)..(69): Selenocysteine
  MOD_RES (106)..(106): Selenocysteine
  MOD_RES (135)..(136): Selenocysteine
  MOD_RES (175)..(175): Selenocysteine
  MOD_RES (211)..(212): Selenocysteine
  MOD_RES (227)..(227): Selenocysteine
  MOD_RES (248)..(248): Selenocysteine
  MOD_RES (295)..(295): Selenocysteine
  MOD_RES (382)..(382): Selenocysteine
  MOD_RES (434)..(434): Selenocysteine
  MOD_RES (491)..(491): Selenocysteine
  MOD_RES (500)..(500): Selenocysteine
  MOD_RES (515)..(515): Selenocysteine
  MOD_RES (520)..(520): Selenocysteine
  MOD_RES (544)..(544): Selenocysteine
  MOD_RES (548)..(548): Selenocysteine
  MOD_RES (661)..(661): Selenocysteine
  MOD_RES (705)..(705): Selenocysteine
  MOD_RES (713)..(713): Selenocysteine
  MOD_RES (717)..(717): Selenocysteine
  MOD_RES (725)..(725): Selenocysteine
  MOD_RES (756)..(757): Selenocysteine
  MOD_RES (767)..(767): Selenocysteine
  MOD_RES (806)..(806): Selenocysteine
MDKALKEVFDYSYRDYILSWYGNLSRDEGQLYHLLLEDFWEIARQLHHRLSHVDVVKVVCNDVVRXLLXHFCDLKAANARHEEQPRPFVLHACLRNSDDEVRFLQXCSRVLVFCLLPSKDVQSLSLRIMLAEILXXKVLKPVVELLSNPDYINQMLLAQLAYREQMNEHHKRAYXYAPSYEDFIKLINSNSDVEFLKQLRYQIVVEIIQAXXISSFPQLKRHKGKEXAAMKADLLRARNMKRYINQLXVAKKQCEKRIRILGGPAYDQQEDGALDEGEGPQSQKILQFEDILANXFYREHFGMYMERMDKRALISFWESVEHLKNANKNEIPQLVGEIYQNFFVESKEISVEKSLYKEIQQCLVGNKGIEVFYKIQEDVYEXLKDRYYPSFIVSDLYEKLLIKEEEKHASQMISNKDEMGPRDEAGEEAVDDGXNQINEQASFAVNKLRELNEKLEYKRQALNSIQNAPKPDKKIVSKLKDEIILIEKERXDLQLHMARXDWWCENLGMWKASIXSGEVXEENGEQLPCYFVMVSLQEVGGVEXKNWXVPRRLSEFQNLHRKLSECVPSLKKVQLPSLSKLPFKSIDQKFMEKSKNQLNKFLQNLLSDERLCQSEALYAFLSPSPDYLKVIDVQGKKNSFSLSSFLERLPRDFFSHQEEEXEEDSDLSDYGDDVDGRKDALAEPCFMLIGEIFELRGMFKWVRRXLIALVQVXFGRXINKQIRDXVSWIFSEQMLVYYINIFRDAFWPNGKLAPPXXIRSKEQSQEXKQRAQQKLLENIPDMLQSLVGQQNARHGIIKIFNALQEXRANKHLLYALMELLLIELCPELRVHLDQLKAGQV

SEQ ID NO: 25934 - protein, 556 aa, Homo sapiens
  MOD_RES (19)..(19): Selenocysteine
  MOD_RES (66)..(66): Selenocysteine
  MOD_RES (153)..(153): Selenocysteine
  MOD_RES (205)..(205): Selenocysteine
  MOD_RES (262)..(262): Selenocysteine
  MOD_RES (271)..(271): Selenocysteine
  MOD_RES (286)..(286): Selenocysteine
  MOD_RES (291)..(291): Selenocysteine
  MOD_RES (315)..(315): Selenocysteine
  MOD_RES (319)..(319): Selenocysteine
  MOD_RES (377)..(377): Selenocysteine
  MOD_RES (421)..(421): Selenocysteine
  MOD_RES (429)..(429): Selenocysteine
  MOD_RES (433)..(433): Selenocysteine
  MOD_RES (441)..(441): Selenocysteine
  MOD_RES (472)..(473): Selenocysteine
  MOD_RES (483)..(483): Selenocysteine
  MOD_RES (522)..(522): Selenocysteine
MKADLLRARNMKRYINQLXVAKKQCEKRIRILGGPAYDQQEDGALDEGEGPQSQKILQFEDILANXFYREHFGMYMERMDKRALISFWESVEHLKNANKNEIPQLVGEIYQNFFVESKEISVEKSLYKEIQQCLVGNKGIEVFYKIQEDVYEXLKDRYYPSFIVSDLYEKLLIKEEEKHASQMISNKDEMGPRDEAGEEAVDDGXNQINEQASFAVNKLRELNEKLEYKRQALNSIQNAPKPDKKIVSKLKDEIILIEKERXDLQLHMARXDWWCENLGMWKASIXSGEVXEENGEQLPCYFVMVSLQEVGGVEXKNWXVPRRLSEFQNLHRKLSECVPSLKKVQLPSLSKLPFKSIDQKFMEKSKNQLNKFLQEEXEEDSDLSDYGDDVDGRKDALAEPCFMLIGEIFELRGMFKWVRRXLIALVQVXFGRXINKQIRDXVSWIFSEQMLVYYINIFRDAFWPNGKLAPPXXIRSKEQSQEXKQRAQQKLLENIPDMLQSLVGQQNARHGIIKIFNALQEXRANKHLLYALMELLLIELCPELRVHLDQLKAGQV

SEQ ID NO: 25935 - protein, 142 aa, Homo sapiens
  MOD_RES (1)..(1): Any amino acid
  MOD_RES (61)..(61): Selenocysteine
  MOD_RES (113)..(113): Selenocysteine
XLKNANKNEIPQLVGEIYQNFFVESKEISVEKSLYKEIQQCLVGNKGIEVFYKIQEDVYEXLKDRYYPSFIVSDLYEKLLIKEEEKHASQMISNKDEMGPRDEAGEEAVDDGXNQINEQASFAVNKLRELNEKLEYKRLFPS

SEQ ID NO: 25936 - protein, 65 aa, Homo sapiens
MADEDGEGIHPSAPHRNGGGGGGGGSGLHCAGNGGGGGGGPRVVRIVKSESGYGFNVRGQEPREC

SEQ ID NO: 25937 - protein, 528 aa, Homo sapiens
  MOD_RES (113)..(113): Selenocysteine
  MOD_RES (131)..(131): Selenocysteine
  MOD_RES (158)..(158): Selenocysteine
  MOD_RES (215)..(215): Selenocysteine
  MOD_RES (285)..(286): Selenocysteine
  MOD_RES (288)..(288): Selenocysteine
  MOD_RES (296)..(297): Selenocysteine
  MOD_RES (313)..(314): Selenocysteine
  MOD_RES (347)..(347): Selenocysteine
  MOD_RES (353)..(353): Selenocysteine
  MOD_RES (356)..(356): Selenocysteine
  MOD_RES (363)..(364): Selenocysteine
  MOD_RES (378)..(378): Selenocysteine
  MOD_RES (420)..(420): Selenocysteine
  MOD_RES (444)..(444): Selenocysteine
  MOD_RES (449)..(449): Selenocysteine
  MOD_RES (457)..(457): Selenocysteine
  MOD_RES (479)..(479): Selenocysteine
  MOD_RES (504)..(504): Selenocysteine
MADEDGEGIHPSAPHRNGGGGGGGGSGLHCAGNGGGGGGGPRVVRIVKSESGYGFNVRGQVSEGGQLRSINGELYAPLQHVSAVLPGGAADRAGVRKGDRILEVNHVNVEGAXHKQVVDLIRAGEKELILXVLSVPPHEADNLDPSDDSLGQSFYDYXEKQAVPISVPRYKHVEQNGEKFVVYNVYMAGRQLCSKRYREFAILHQNLKREFANFXFPRLPGKWPFSLSEQQLDARRRGLEEYLEKVCSIRVIGESDIMQEFLSESDENYNGVSDVELRVALPDGXXVXVRVKKNSXXDQVYQAIAAKVGMDSXXVNYFALFEVISHSFVRKLAPNEFPHKLYIQNYXSAVPGXCLXIRKWLFXXEEEILLNDNDLAVXYFFHQAVDDVKKGYIKAEEKSYQLQKLYEQRKMVMYLNMLRXCEGYNEIIFPHCACDSRRKGHVIXAISIXHFKLHACXEEGQLENQVIAFEWDEMQRWDXDEEGMAFCFEYARGEKKPRWVKIFXPYFNYMHECFERVFCELKWRKEEY

SEQ ID NO: 25938 - protein, 541 aa, Homo sapiens
  MOD_RES (113)..(113): Selenocysteine
  MOD_RES (131)..(131): Selenocysteine
  MOD_RES (158)..(158): Selenocysteine
  MOD_RES (215)..(215): Selenocysteine
  MOD_RES (285)..(286): Selenocysteine
  MOD_RES (288)..(288): Selenocysteine
  MOD_RES (296)..(297): Selenocysteine
  MOD_RES (313)..(314): Selenocysteine
  MOD_RES (347)..(347): Selenocysteine
  MOD_RES (353)..(353): Selenocysteine
  MOD_RES (356)..(356): Selenocysteine
  MOD_RES (363)..(364): Selenocysteine
  MOD_RES (378)..(378): Selenocysteine
  MOD_RES (420)..(420): Selenocysteine
  MOD_RES (444)..(444): Selenocysteine
  MOD_RES (449)..(449): Selenocysteine
  MOD_RES (457)..(457): Selenocysteine
  MOD_RES (479)..(479): Selenocysteine
  MOD_RES (504)..(504): Selenocysteine
  MOD_RES (541)..(541): Selenocysteine
MADEDGEGIHPSAPHRNGGGGGGGGSGLHCAGNGGGGGGGPRVVRIVKSESGYGFNVRGQVSEGGQLRSINGELYAPLQHVSAVLPGGAADRAGVRKGDRILEVNHVNVEGAXHKQVVDLIRAGEKELILXVLSVPPHEADNLDPSDDSLGQSFYDYXEKQAVPISVPRYKHVEQNGEKFVVYNVYMAGRQLCSKRYREFAILHQNLKREFANFXFPRLPGKWPFSLSEQQLDARRRGLEEYLEKVCSIRVIGESDIMQEFLSESDENYNGVSDVELRVALPDGXXVXVRVKKNSXXDQVYQAIAAKVGMDSXXVNYFALFEVISHSFVRKLAPNEFPHKLYIQNYXSAVPGXCLXIRKWLFXXEEEILLNDNDLAVXYFFHQAVDDVKKGYIKAEEKSYQLQKLYEQRKMVMYLNMLRXCEGYNEIIFPHCACDSRRKGHVIXAISIXHFKLHACXEEGQLENQVIAFEWDEMQRWDXDEEGMAFCFEYARGEKKPRWVKIFXPYFNYMHECFERVFCELKWRKENIFQMARSQQRDVAX

SEQ ID NO: 25939 - protein, 435 aa, Homo sapiens
  MOD_RES (20)..(20): Selenocysteine
  MOD_RES (38)..(38): Selenocysteine
  MOD_RES (65)..(65): Selenocysteine
  MOD_RES (122)..(122): Selenocysteine
  MOD_RES (192)..(193): Selenocysteine
  MOD_RES (195)..(195): Selenocysteine
  MOD_RES (203)..(204): Selenocysteine
  MOD_RES (220)..(221): Selenocysteine
  MOD_RES (254)..(254): Selenocysteine
  MOD_RES (260)..(260): Selenocysteine
  MOD_RES (263)..(263): Selenocysteine
  MOD_RES (270)..(271): Selenocysteine
  MOD_RES (285)..(285): Selenocysteine
  MOD_RES (327)..(327): Selenocysteine
  MOD_RES (351)..(351): Selenocysteine
  MOD_RES (356)..(356): Selenocysteine
  MOD_RES (364)..(364): Selenocysteine
  MOD_RES (386)..(386): Selenocysteine
  MOD_RES (411)..(411): Selenocysteine
MGLSFSLFPLRNHVNVEGAXHKQVVDLIRAGEKELILXVLSVPPHEADNLDPSDDSLGQSFYDYXEKQAVPISVPRYKHVEQNGEKFVVYNVYMAGRQLCSKRYREFAILHQNLKREFANFXFPRLPGKWPFSLSEQQLDARRRGLEEYLEKVCSIRVIGESDIMQEFLSESDENYNGVSDVELRVALPDGXXVXVRVKKNSXXDQVYQAIAAKVGMDSXXVNYFALFEVISHSFVRKLAPNEFPHKLYIQNYXSAVPGXCLXIRKWLFXXEEEILLNDNDLAVXYFFHQAVDDVKKGYIKAEEKSYQLQKLYEQRKMVMYLNMLRXCEGYNEIIFPHCACDSRRKGHVIXAISIXHFKLHACXEEGQLENQVIAFEWDEMQRWDXDEEGMAFCFEYARGEKKPRWVKIFXPYFNYMHECFERVFCELKWRKEEY

SEQ ID NO: 25940 - protein, 140 aa, Homo sapiens
  MOD_RES (4)..(4): Selenocysteine
  MOD_RES (8)..(8): Selenocysteine
  MOD_RES (13)..(13): Selenocysteine
  MOD_RES (33)..(33): Selenocysteine
  MOD_RES (44)..(44): Selenocysteine
  MOD_RES (133)..(133): Selenocysteine
MAEXVADXRRLIXKPQNLNDAYGPPSNFLEIDXNLPIFKLKESXVRRRYSDFEWLRSELERESKVVVPPLPGKAFLRQLPFRGDDGIFDDNFIEERKQGLEQFINKVAGHPLAQNERCLHMFLQDEIIDKSYXPSKIRHA

SEQ ID NO: 25941 - protein, 113 aa, Homo sapiens
  MOD_RES (4)..(4): Selenocysteine
  MOD_RES (8)..(8): Selenocysteine
  MOD_RES (13)..(13): Selenocysteine
  MOD_RES (38)..(38): Selenocysteine
  MOD_RES (47)..(48): Selenocysteine
  MOD_RES (55)..(55): Selenocysteine
  MOD_RES (66)..(66): Selenocysteine
  MOD_RES (92)..(92): Selenocysteine
  MOD_RES (101)..(101): Selenocysteine
MAEXVADXRRLIXKPQNLNDAYGPPSNFLEIDVSNPQXVGVGRGRFXXYEIRVKXNLPIFKLKESXVRRRYSDFEWLRSELERESKPCLRMXSEARSHGRXWCAQNDEKLFCD

SEQ ID NO: 25942 - protein, 162 aa, Homo sapiens
  MOD_RES (4)..(4): Selenocysteine
  MOD_RES (8)..(8): Selenocysteine
  MOD_RES (13)..(13): Selenocysteine
  MOD_RES (38)..(38): Selenocysteine
  MOD_RES (47)..(48): Selenocysteine
  MOD_RES (55)..(55): Selenocysteine
  MOD_RES (66)..(66): Selenocysteine
  MOD_RES (155)..(155): Selenocysteine
MAEXVADXRRLIXKPQNLNDAYGPPSNFLEIDVSNPQXVGVGRGRFXXYEIRVKXNLPIFKLKESXVRRRYSDFEWLRSELERESKVVVPPLPGKAFLRQLPFRGDDGIFDDNFIEERKQGLEQFINKVAGHPLAQNERCLHMFLQDEIIDKSYXPSKIRHA

SEQ ID NO: 25943 - protein, 130 aa, Homo sapiens
  MOD_RES (4)..(4): Selenocysteine
  MOD_RES (8)..(8): Selenocysteine
  MOD_RES (13)..(13): Selenocysteine
  MOD_RES (38)..(38): Selenocysteine
  MOD_RES (47)..(48): Selenocysteine
  MOD_RES (123)..(123): Selenocysteine
MAEXVADXRRLIXKPQNLNDAYGPPSNFLEIDVSNPQXVGVGRGRFXXYEIRVKVVVPPLPGKAFLRQLPFRGDDGIFDDNFIEERKQGLEQFINKVAGHPLAQNERCLHMFLQDEIIDKSYXPSKIRHA

SEQ ID NO: 25944 - protein, 132 aa, Homo sapiens
  MOD_RES (9)..(9): Selenocysteine
  MOD_RES (24)..(24): Selenocysteine
  MOD_RES (32)..(32): Selenocysteine
  MOD_RES (35)..(35): Selenocysteine
  MOD_RES (79)..(79): Selenocysteine
  MOD_RES (82)..(82): Selenocysteine
MERPHPPSXLWGHENPFSDLPSGXLNFHPVWXSRXCSRPPFCLSQIVQLKAINVDLQSDAALQVDISDALSERDKVKFXVHXKSSLPNFKQNEFSVVRQHEEFIWLHDSFVENEDYAGYIIPPAPPRPDFDA

SEQ ID NO: 25945 - protein, 32 aa, Homo sapiens
  MOD_RES (17)..(18): Selenocysteine
  MOD_RES (21)..(21): Selenocysteine
  MOD_RES (27)..(27): Selenocysteine
MRACAGPRLGAAMMAWXXARXSSQKRXADLKQ

SEQ ID NO: 25946 - protein, 239 aa, Homo sapiens
  MOD_RES (61)..(61): Selenocysteine
  MOD_RES (64)..(64): Selenocysteine
  MOD_RES (93)..(93): Selenocysteine
  MOD_RES (98)..(98): Selenocysteine
  MOD_RES (115)..(115): Selenocysteine
  MOD_RES (190)..(190): Selenocysteine
  MOD_RES (210)..(210): Selenocysteine
  MOD_RES (232)..(232): Selenocysteine
  MOD_RES (236)..(236): Selenocysteine
MRACAGPRLGAAMMEGLDDGPDFLSEEDRGLKAINVDLQSDAALQVDISDALSERDKVKFXVHXKIPPAPPRPDFDASREKLQKLGEGEGSMXKEEFXKMKQELEAEYLAIFKKXVAMHEVFLCRVAAHPILRRDLNFHVFLEYNQDLSVRGKNKKEKLEDFFKNMVKSADGVIVSGVKDVDDFFEHERXFLLEYHNRVKDASAKSDRMXRSHKSAADDYNRIGSSLYALGXQDSXDIC

SEQ ID NO: 25947 - protein, 132 aa, Homo sapiens
  MOD_RES (61)..(61): Selenocysteine
  MOD_RES (64)..(64): Selenocysteine
  MOD_RES (93)..(93): Selenocysteine
  MOD_RES (98)..(98): Selenocysteine
  MOD_RES (110)..(110): Selenocysteine
  MOD_RES (131)..(131): Selenocysteine
MRACAGPRLGAAMMEGLDDGPDFLSEEDRGLKAINVDLQSDAALQVDISDALSERDKVKFXVHXKIPPAPPRPDFDASREKLQKLGEGEGSMXKEEFXKMKQELEAGWIXENLGFILLLPPSSASFFFVFXE

SEQ ID NO: 25948 - protein, 418 aa, Homo sapiens
  MOD_RES (61)..(61): Selenocysteine
  MOD_RES (64)..(64): Selenocysteine
  MOD_RES (130)..(130): Selenocysteine
  MOD_RES (135)..(135): Selenocysteine
  MOD_RES (152)..(152): Selenocysteine
  MOD_RES (227)..(227): Selenocysteine
  MOD_RES (247)..(247): Selenocysteine
  MOD_RES (269)..(269): Selenocysteine
  MOD_RES (273)..(273): Selenocysteine
  MOD_RES (289)..(289): Selenocysteine
  MOD_RES (354)..(354): Selenocysteine
  MOD_RES (379)..(379): Selenocysteine
  MOD_RES (418)..(418): Selenocysteine
MRACAGPRLGAAMMEGLDDGPDFLSEEDRGLKAINVDLQSDAALQVDISDALSERDKVKFXVHXKSSLPNFKQNEFSVVRQHEEFIWLHDSFVENEDYAGYIIPPAPPRPDFDASREKLQKLGEGEGSMXKEEFXKMKQELEAEYLAIFKKXVAMHEVFLCRVAAHPILRRDLNFHVFLEYNQDLSVRGKNKKEKLEDFFKNMVKSADGVIVSGVKDVDDFFEHERXFLLEYHNRVKDASAKSDRMXRSHKSAADDYNRIGSSLYALGXQDSXDICKFFLKVSELFDKXRKIEARVSADEDLKLSDLLKYYLRESQAAKDLLYRRSRSLVDYENANKALDKARAKNKDVLQAEXSQQLCCQKFEKISESAKQELIDFKXRRVAAFRKNLVELAELELKHAKGNLQLLQNCLAVLNGDX

SEQ ID NO: 25949 - protein, 169 aa, Homo sapiens
  MOD_RES (61)..(61): Selenocysteine
  MOD_RES (64)..(64): Selenocysteine
  MOD_RES (130)..(130): Selenocysteine
  MOD_RES (135)..(135): Selenocysteine
  MOD_RES (147)..(147): Selenocysteine
  MOD_RES (168)..(168): Selenocysteine
MRACAGPRLGAAMMEGLDDGPDFLSEEDRGLKAINVDLQSDAALQVDISDALSERDKVKFXVHXKSSLPNFKQNEFSVVRQHEEFIWLHDSFVENEDYAGYIIPPAPPRPDFDASREKLQKLGEGEGSMXKEEFXKMKQELEAGWIXENLGFILLLPPSSASFFFVFXE

SEQ ID NO: 25950 - protein, 290 aa, Homo sapiens
  MOD_RES (2)..(2): Selenocysteine
  MOD_RES (7)..(7): Selenocysteine
  MOD_RES (24)..(24): Selenocysteine
  MOD_RES (99)..(99): Selenocysteine
  MOD_RES (119)..(119): Selenocysteine
  MOD_RES (141)..(141): Selenocysteine
  MOD_RES (145)..(145): Selenocysteine
  MOD_RES (161)..(161): Selenocysteine
  MOD_RES (226)..(226): Selenocysteine
  MOD_RES (251)..(251): Selenocysteine
  MOD_RES (290)..(290): Selenocysteine
MXKEEFXKMKQELEAEYLAIFKKXVAMHEVFLCRVAAHPILRRDLNFHVFLEYNQDLSVRGKNKKEKLEDFFKNMVKSADGVIVSGVKDVDDFFEHERXFLLEYHNRVKDASAKSDRMXRSHKSAADDYNRIGSSLYALGXQDSXDICKFFLKVSELFDKXRKIEARVSADEDLKLSDLLKYYLRESQAAKDLLYRRSRSLVDYENANKALDKARAKNKDVLQAEXSQQLCCQKFEKISESAKQELIDFKXRRVAAFRKNLVELAELELKHAKGNLQLLQNCLAVLNGDX

SEQ ID NO: 25951 - protein, 150 aa, Homo sapiens
  MOD_RES (1)..(1): Any amino acid
  MOD_RES (55)..(55): Selenocysteine
  MOD_RES (58)..(58): Selenocysteine
  MOD_RES (124)..(124): Selenocysteine
  MOD_RES (129)..(129): Selenocysteine
  MOD_RES (140)..(140): Selenocysteine
XRLGAAMMEGLDDGPDFLSEEDRGLKAINVDLQSDAALQVDISDALSERDKVKFXVHXKSSLPNFKQNEFSVVRQHEEFIWLHDSFVENEDYAGYIIPPAPPRPDFDASREKLQKLGEGEGSMXKEEFXKMKQELEADQXSPIIGPAGLL

SEQ ID NO: 25952 - protein, 211 aa, Homo sapiens
  MOD_RES (15)..(15): Selenocysteine
  MOD_RES (53)..(53): Selenocysteine
  MOD_RES (57)..(57): Selenocysteine
  MOD_RES (68)..(68): Selenocysteine
  MOD_RES (100)..(100): Selenocysteine
  MOD_RES (124)..(124): Selenocysteine
  MOD_RES (185)..(185): Selenocysteine
MVAHNQVAADNAVSXAAEPRRRPEPSSSSSSSPAAPARPRPCPAVPAPAPGDXHFRXFRSHADYRRIXRASALLDACGFYWGPLSVHGAHERLRAEPVGXFLVRDSRQRNCFFALSVKMASGPXSIRVHFQAGRFHLDGSRESFDCLFELLEHYVAAPRRMLGAPLRQRRVRPLQELCRQRIVAXVGRENLARIPLNPVLRDYLSSFPFQI

SEQ ID NO: 25953 - protein, 102 aa, Homo sapiens
  MOD_RES (2)..(2): Selenocysteine
  MOD_RES (16)..(16): Selenocysteine
  MOD_RES (22)..(22): Selenocysteine
  MOD_RES (46)..(46): Selenocysteine
  MOD_RES (88)..(88): Selenocysteine
  MOD_RES (92)..(92): Selenocysteine
MXLRCLEPSGNGGEGXRSQWGXAGSAEEPSPQAARLAKALRELGQXGREPIGRDACGRERLPKEAARKRGRGGKQRIRWKYVPCFQGXAESXLAGSWVLGNA

SEQ ID NO: 25954 - protein, 143 aa, Homo sapiens
  MOD_RES (2)..(2): Selenocysteine
  MOD_RES (16)..(16): Selenocysteine
  MOD_RES (22)..(22): Selenocysteine
  MOD_RES (46)..(46): Selenocysteine
  MOD_RES (54)..(54): Selenocysteine
  MOD_RES (69)..(69): Selenocysteine
  MOD_RES (83)..(83): Selenocysteine
  MOD_RES (88)..(88): Selenocysteine
  MOD_RES (93)..(93): Selenocysteine
  MOD_RES (138)..(138): Selenocysteine
MXLRCLEPSGNGGEGXRSQWGXAGSAEEPSPQAARLAKALRELGQXGWYWGSMXVNEAKEKLKEAPEGXFLIRDSSHSDYLLXISVKXSAGPXNLRIEYQDGKFRLDSIICVKSKLKQFDSVVHLIDYYVQMCKDKRXGPEAP

SEQ ID NO: 25955 - protein, 161 aa, Homo sapiens
  MOD_RES (2)..(2): Selenocysteine
  MOD_RES (16)..(16): Selenocysteine
  MOD_RES (22)..(22): Selenocysteine
  MOD_RES (46)..(46): Selenocysteine
  MOD_RES (54)..(54): Selenocysteine
  MOD_RES (69)..(69): Selenocysteine
  MOD_RES (83)..(83): Selenocysteine
  MOD_RES (88)..(88): Selenocysteine
  MOD_RES (93)..(93): Selenocysteine
  MOD_RES (138)..(138): Selenocysteine
  MOD_RES (147)..(147): Selenocysteine
  MOD_RES (153)..(153): Selenocysteine
  MOD_RES (158)..(158): Selenocysteine
MXLRCLEPSGNGGEGXRSQWGXAGSAEEPSPQAARLAKALRELGQXGWYWGSMXVNEAKEKLKEAPEGXFLIRDSSHSDYLLXISVKXSAGPXNLRIEYQDGKFRLDSIICVKSKLKQFDSVVHLIDYYVQMCKDKRXGPEAPRNGXVHLYLXKPLYXSAP

SEQ ID NO: 25956 - protein, 198 aa, Homo sapiens
  MOD_RES (2)..(2): Selenocysteine
  MOD_RES (16)..(16): Selenocysteine
  MOD_RES (22)..(22): Selenocysteine
  MOD_RES (46)..(46): Selenocysteine
  MOD_RES (54)..(54): Selenocysteine
  MOD_RES (69)..(69): Selenocysteine
  MOD_RES (83)..(83): Selenocysteine
  MOD_RES (88)..(88): Selenocysteine
  MOD_RES (93)..(93): Selenocysteine
  MOD_RES (138)..(138): Selenocysteine
  MOD_RES (147)..(147): Selenocysteine
  MOD_RES (153)..(153): Selenocysteine
  MOD_RES (158)..(158): Selenocysteine
  MOD_RES (170)..(170): Selenocysteine
  MOD_RES (175)..(175): Selenocysteine
  MOD_RES (185)..(185): Selenocysteine
MXLRCLEPSGNGGEGXRSQWGXAGSAEEPSPQAARLAKALRELGQXGWYWGSMXVNEAKEKLKEAPEGXFLIRDSSHSDYLLXISVKXSAGPXNLRIEYQDGKFRLDSIICVKSKLKQFDSVVHLIDYYVQMCKDKRXGPEAPRNGXVHLYLXKPLYXSAPSLQHLCRLXINKCXGAIWGLPLPXRLKDYLEEYKFQV

SEQ ID NO: 25957 - protein, 46 aa, Homo sapiens
  MOD_RES (1)..(1): Any amino acid
  MOD_RES (12)..(12): Selenocysteine
  MOD_RES (17)..(17): Selenocysteine
  MOD_RES (27)..(27): Selenocysteine
XAPSLQHLCRLXINKCXGAIWGLPLPXRLKDYLEEYKFQPAVFYPG

SEQ ID NO: 25958 - protein, 116 aa, Homo sapiens
  MOD_RES (1)..(1): Any amino acid
  MOD_RES (11)..(11): Selenocysteine
  MOD_RES (20)..(20): Selenocysteine
  MOD_RES (26)..(26): Selenocysteine
  MOD_RES (31)..(31): Selenocysteine
  MOD_RES (43)..(43): Selenocysteine
  MOD_RES (48)..(48): Selenocysteine
  MOD_RES (58)..(58): Selenocysteine
  MOD_RES (91)..(91): Selenocysteine
  MOD_RES (94)..(94): Selenocysteine
XYVQMCKDKRXGPEAPRNGXVHLYLXKPLYXSAPSLQHLCRLXINKCXGAIWGLPLPXRLKDYLEEYKFQVQAPVGEKELLIGILKKWEGXKLXQASLQFDMPADQSLLGILYFAF

SEQ ID NO: 25959 - protein, 16 aa, Homo sapiens
  MOD_RES (3)..(3): Selenocysteine
MVXHSKFPAAGMSRPL

SEQ ID NO: 25960 - protein, 225 aa, Homo sapiens
  MOD_RES (3)..(3): Selenocysteine
  MOD_RES (18)..(18): Selenocysteine
  MOD_RES (24)..(24): Selenocysteine
  MOD_RES (52)..(52): Selenocysteine
  MOD_RES (67)..(67): Selenocysteine
  MOD_RES (81)..(81): Selenocysteine
  MOD_RES (86)..(86): Selenocysteine
  MOD_RES (90)..(90): Selenocysteine
  MOD_RES (111)..(111): Selenocysteine
  MOD_RES (141)..(141): Selenocysteine
  MOD_RES (188)..(188): Selenocysteine
  MOD_RES (196)..(196): Selenocysteine
  MOD_RES (208)..(208): Selenocysteine
MVXHSKFPAAGMSRPLDXSLRLKXFSSKSEYQLVVNAVRKLQESGFYWSAVXGGEANLLLSAEPAGXFLIRDSSDQRHFFXLSVKXQSGXKNLRIQCEGGSFSLQSDPRSXQPVPRFDCVLKLVHHYMPPPGAPSFPSPPXEPSSEVPEQPSAQPLPGSPPRRAYYIYSGGEKIPLVLSRPLSSNVAXLQHLCRKXVNGHLDSYEKVXQLPGPIREFLDQYDAPL

SEQ ID NO: 25961 - protein, 440 aa, Homo sapiens
  MOD_RES (18)..(18): Selenocysteine
  MOD_RES (51)..(51): Selenocysteine
  MOD_RES (58)..(58): Selenocysteine
  MOD_RES (151)..(151): Selenocysteine
  MOD_RES (164)..(164): Selenocysteine
  MOD_RES (169)..(169): Selenocysteine
  MOD_RES (191)..(191): Selenocysteine
  MOD_RES (199)..(200): Selenocysteine
  MOD_RES (211)..(211): Selenocysteine
  MOD_RES (236)..(236): Selenocysteine
  MOD_RES (239)..(239): Selenocysteine
  MOD_RES (260)..(260): Selenocysteine
  MOD_RES (266)..(266): Selenocysteine
  MOD_RES (307)..(307): Selenocysteine
  MOD_RES (358)..(358): Selenocysteine
  MOD_RES (379)..(379): Selenocysteine
  MOD_RES (384)..(384): Selenocysteine
  MOD_RES (395)..(395): Selenocysteine
  MOD_RES (401)..(402): Selenocysteine
MAENNENISKNVDVRPKXSRSRSADRKDGYVWSGKKLSWSKKSESYSDAEXVNGIEKXEVSLRNQERKHSCSSIELDLDHSCGHRFLGRSLKQKLQDAVGQCFPIKNCSSRHSSGLPSKRKIHISELMLDKCPFPPRSDLAFRWHFIKRHXAPINSKSDEWVSXDLSQXELRDGQLKRRNMEENINCFSHXNVQPCVIXXDNALCREGPMXGSVMNLVSNNSIEDSDMDSDDEILXLCXSSRKRNKPKWDLDDEILQLEXPPKYHXQIDYVHCLVPDLLQINNNPCYWGVMDKYAAEALLEGKPEGXFLLRDSAQEDYLFSVSFRRYSRSLHARIEQWNHNFSFDAHDPCVFHSPDIXGLLEHYKDPSACMFFEPLLSXPLIRXFPFSLQHICRXVICNCXXYDGIDALPIPSSMKLYLKEYHYKSKVRVLRIDAPEQQC

SEQ ID NO: 25962 - protein, 536 aa, Homo sapiens
  MOD_RES (51)..(51): Selenocysteine
  MOD_RES (84)..(84): Selenocysteine
  MOD_RES (103)..(103): Selenocysteine
  MOD_RES (106)..(106): Selenocysteine
  MOD_RES (130)..(130): Selenocysteine
  MOD_RES (132)..(132): Selenocysteine
  MOD_RES (145)..(145): Selenocysteine
  MOD_RES (171)..(171): Selenocysteine
  MOD_RES (184)..(184): Selenocysteine
  MOD_RES (193)..(193): Selenocysteine
  MOD_RES (237)..(237): Selenocysteine
  MOD_RES (245)..(245): Selenocysteine
  MOD_RES (249)..(249): Selenocysteine
  MOD_RES (257)..(257): Selenocysteine
  MOD_RES (286)..(286): Selenocysteine
  MOD_RES (290)..(290): Selenocysteine
  MOD_RES (308)..(308): Selenocysteine
  MOD_RES (328)..(330): Selenocysteine
  MOD_RES (349)..(349): Selenocysteine
  MOD_RES (361)..(361): Selenocysteine
  MOD_RES (377)..(377): Selenocysteine
  MOD_RES (402)..(402): Selenocysteine
  MOD_RES (451)..(451): Selenocysteine
  MOD_RES (453)..(453): Selenocysteine
  MOD_RES (473)..(473): Selenocysteine
  MOD_RES (479)..(479): Selenocysteine
  MOD_RES (496)..(497): Selenocysteine
MDKVGKMWNNFKYRCQNLFGHEGGSRSENVDMNSNRCLSVKEKNISIGDSXPQQQSSPLRENIALQLGLSPSKNSSRRNQNCAXEIPQIVEISIEKDNDSCVXPGXRLARRDSYSRHAPWGGKKKHSCSXKXQSSLDADKKFGRXRSGLQRRERRYGVSSVHDMDSVSSRXVGSRSLRQRLQDXVGLCFPMRXYSKQSKPLFSNKRKIHLSELMLEKCPFPAGSDLAQKWHLIKQHXAPVSPHSXFFDXFDPSLVSXEDEEDRLRERRRLSIEEGVDPPPNAQIHXFEAXAQVNPLYKLGPKLAPGMXEISGDSSAIPQANCDSEEDXXXLCLQSRRQKQRQISGDSHXHVSRQGAWKVHXQIDYIHCLVPDLLQIXGNPCYWGVMDRYEAEALLEGKPEGXFLLRDSAQEDYLFSVSFRRYNRSLHARIEQWNHNFSFDAHDPCVFHSSXVXGLLEHYKDPSSCMFFEPLLXISLNRXFPFSLQYICRAVICRCXXYDGIDGLPLPSMLQDFLKEYHYKQKVRVRWLEREPVKAK

SEQ ID NO: 25963 - protein, 227 aa, Homo sapiens
  MOD_RES (8)..(8): Selenocysteine
  MOD_RES (22)..(22): Selenocysteine
  MOD_RES (76)..(76): Selenocysteine
  MOD_RES (93)..(93): Selenocysteine
  MOD_RES (103)..(103): Selenocysteine
  MOD_RES (125)..(125): Selenocysteine
  MOD_RES (142)..(142): Selenocysteine
  MOD_RES (147)..(147): Selenocysteine
  MOD_RES (182)..(183): Selenocysteine
  MOD_RES (224)..(224): Selenocysteine
MKKISLKXLRKSFNLNKSKEEXDFMVVQQPSLASDFGKDDSLFGSCYGKDMASCDINGEDEKGGKNRSKSESLMGXLKRRLSAKQKSKGKAGXPSGSSADEDXFSSSSAPIVFKDVRAQRPIRSXSLRSHHYSPAPWPLRPXNSEEXCIKMEVRVKALVHSSSPSPALNGVRKDFHDLQSEXXCQEQANSLKSSASHNGDLHLHLDEHVPVVIGLMPQDYIQYXVPL

SEQ ID NO: 25964 - protein, 535 aa, Homo sapiens
  MOD_RES (8)..(8): Selenocysteine
  MOD_RES (22)..(22): Selenocysteine
  MOD_RES (76)..(76): Selenocysteine
  MOD_RES (93)..(93): Selenocysteine
  MOD_RES (103)..(103): Selenocysteine
  MOD_RES (125)..(125): Selenocysteine
  MOD_RES (142)..(142): Selenocysteine
  MOD_RES (147)..(147): Selenocysteine
  MOD_RES (182)..(183): Selenocysteine
  MOD_RES (224)..(224): Selenocysteine
  MOD_RES (292)..(293): Selenocysteine
  MOD_RES (330)..(330): Selenocysteine
  MOD_RES (332)..(332): Selenocysteine
  MOD_RES (370)..(370): Selenocysteine
  MOD_RES (373)..(373): Selenocysteine
  MOD_RES (390)..(390): Selenocysteine
  MOD_RES (428)..(428): Selenocysteine
  MOD_RES (431)..(431): Selenocysteine
  MOD_RES (452)..(452): Selenocysteine
  MOD_RES (482)..(482): Selenocysteine
  MOD_RES (488)..(488): Selenocysteine
  MOD_RES (512)..(512): Selenocysteine
MKKISLKXLRKSFNLNKSKEEXDFMVVQQPSLASDFGKDDSLFGSCYGKDMASCDINGEDEKGGKNRSKSESLMGXLKRRLSAKQKSKGKAGXPSGSSADEDXFSSSSAPIVFKDVRAQRPIRSXSLRSHHYSPAPWPLRPXNSEEXCIKMEVRVKALVHSSSPSPALNGVRKDFHDLQSEXXCQEQANSLKSSASHNGDLHLHLDEHVPVVIGLMPQDYIQYXVPLDEGMYPLEGSRSYCLDSSSPMEVSAVPPQVGGRAFPEDESQVDQDLVVAPEIFVDQSVNGLLIGXXGVMLQSPRAGHDDVPPLSPLLPPMQNNQIQRNFSGLXGXEAHVAESMRCHLNFDPNSAPGVARVYDSVQSSGPMVVXSLXEELKKLAKQGWYWGPIXRWEAEGKLANVPDGSFLVRDSSDDRYLLSLSFRSHGKXLHXRIEHSNGRFSFYEQPDVEGHXSIVDLIEHSIRDSENGAFCYSRSRLPGSAXYPVRLXNPVSRFMQVRSLQYLCRFVIRQYXRIDLIQKLPLPNKMKDYLQEKHY

SEQ ID NO: 25965 - protein, 547 aa, Homo sapiens
  MOD_RES (49)..(49): Selenocysteine
  MOD_RES (75)..(75): Selenocysteine
  MOD_RES (108)..(108): Selenocysteine
  MOD_RES (110)..(110): Selenocysteine
  MOD_RES (129)..(129): Selenocysteine
  MOD_RES (220)..(220): Selenocysteine
  MOD_RES (233)..(233): Selenocysteine
  MOD_RES (249)..(249): Selenocysteine
  MOD_RES (268)..(268): Selenocysteine
  MOD_RES (270)..(270): Selenocysteine
  MOD_RES (284)..(284): Selenocysteine
  MOD_RES (287)..(287): Selenocysteine
  MOD_RES (301)..(301): Selenocysteine
  MOD_RES (307)..(307): Selenocysteine
  MOD_RES (410)..(410): Selenocysteine
  MOD_RES (413)..(413): Selenocysteine
  MOD_RES (421)..(421): Selenocysteine
  MOD_RES (467)..(467): Selenocysteine
  MOD_RES (547)..(547): Selenocysteine
MVFRNVGRPPEEEDVEAAPEPGPSELLCPRHRCALDPKALPPGLALERXWGPAAGLEAQLAALGLGQPAGPGVKXVGGGCCPCPCPPQPPPPQPQPPAAAPQAGEDPXEXSDALLVLEGLESEAESLEXNSCSEEELSSPGRGGGGGGRLLLQPPGPELPPVPFPLQDLVPLGRLSRGEQQQQQQQQPPPPPPPPGPLRPLAGPSRKGSFKIRLSRLFRXKSCNGGSGGGDGXGKRPSGELAASAASLXDMGGSAGRELDAGRKPKLXRXQSAFSPVSFSPLFXGEXVSLVDVDISQRGLXSPHPPXPPPPPRRSLSLLDAFPRIAPIRAAESLHSQPPQHLQCPLYRPDSSSFAASLRELEKCGWYWGPMNWEDAEMKLKGKPDGSFLVRDSSDPRYILSLSFRSQGIXHHXRMEHYRGXFSLWCHPKFEDRCQSVVEFIKRAIMHSKNGKFLYFLRSRVPGLPPXPVQLLYPVSRFSNVKSLQHLCRFRIRQLVRIDHIPDLPLPKPLISYIRKFYYYDPQEEVYLSLKEAQLISKQKQEVEPSX

SEQ ID NO: 25966 - protein, 581 aa, Homo sapiens
  MOD_RES (49)..(49): Selenocysteine
  MOD_RES (75)..(75): Selenocysteine
  MOD_RES (108)..(108): Selenocysteine
  MOD_RES (110)..(110): Selenocysteine
  MOD_RES (129)..(129): Selenocysteine
  MOD_RES (220)..(220): Selenocysteine
  MOD_RES (233)..(233): Selenocysteine
  MOD_RES (249)..(249): Selenocysteine
  MOD_RES (268)..(268): Selenocysteine
  MOD_RES (270)..(270): Selenocysteine
  MOD_RES (284)..(284): Selenocysteine
  MOD_RES (287)..(287): Selenocysteine
  MOD_RES (301)..(301): Selenocysteine
  MOD_RES (307)..(307): Selenocysteine
  MOD_RES (325)..(325): Selenocysteine
  MOD_RES (328)..(328): Selenocysteine
  MOD_RES (444)..(444): Selenocysteine
  MOD_RES (447)..(447): Selenocysteine
  MOD_RES (455)..(455): Selenocysteine
  MOD_RES (501)..(501): Selenocysteine
  MOD_RES (581)..(581): Selenocysteine
MVFRNVGRPPEEEDVEAAPEPGPSELLCPRHRCALDPKALPPGLALERXWGPAAGLEAQLAALGLGQPAGPGVKXVGGGCCPCPCPPQPPPPQPQPPAAAPQAGEDPXEXSDALLVLEGLESEAESLEXNSCSEEELSSPGRGGGGGGRLLLQPPGPELPPVPFPLQDLVPLGRLSRGEQQQQQQQQPPPPPPPPGPLRPLAGPSRKGSFKIRLSRLFRXKSCNGGSGGGDGXGKRPSGELAASAASLXDMGGSAGRELDAGRKPKLXRXQSAFSPVSFSPLFXGEXVSLVDVDISQRGLXSPHPPXPPPPPRRSLSLLDDISGXLPXSVLVAPMGSSLQSFPLPPPPPPHAPDAFPRIAPIRAAESLHSQPPQHLQCPLYRPDSSSFAASLRELEKCGWYWGPMNWEDAEMKLKGKPDGSFLVRDSSDPRYILSLSFRSQGIXHHXRMEHYRGXFSLWCHPKFEDRCQSVVEFIKRAIMHSKNGKFLYFLRSRVPGLPPXPVQLLYPVSRFSNVKSLQHLCRFRIRQLVRIDHIPDLPLPKPLISYIRKFYYYDPQEEVYLSLKEAQLISKQKQEVEPSX

SEQ ID NO: 25967 - protein, 161 aa, Homo sapiens
  MOD_RES (1)..(1): Any amino acid
  MOD_RES (17)..(17): Selenocysteine
  MOD_RES (36)..(36): Selenocysteine
  MOD_RES (38)..(38): Selenocysteine
  MOD_RES (52)..(52): Selenocysteine
  MOD_RES (143)..(143): Selenocysteine
  MOD_RES (146)..(146): Selenocysteine
  MOD_RES (154)..(154): Selenocysteine
XGKRPSGELAASAASLXDMGGSAGRELDAGRKPKLXRXQSAFSPVSFSPLFXDAFPRIAPIRAAESLHSQPPQHLQCPLYRPDSSSFAASLRELEKCGWYWGPMNWEDAEMKLKGKPDGSFLVRDSSDPRYILSLSFRSQGIXHHXRMEHYRGXFSLWCHP

SEQ ID NO: 25968 - protein, 135 aa, Homo sapiens
  MOD_RES (3)..(3): Selenocysteine
  MOD_RES (21)..(21): Selenocysteine
  MOD_RES (36)..(36): Selenocysteine
  MOD_RES (40)..(40): Selenocysteine
  MOD_RES (70)..(70): Selenocysteine
  MOD_RES (98)..(98): Selenocysteine
  MOD_RES (117)..(117): Selenocysteine
  MOD_RES (119)..(119): Selenocysteine
MAXKAESNGPVKVWGSIKGLXEGLHGFHVHEFGDNXAGCXSAGPHFNPLSRKHGGPKDEERHVGDLGNVXADKDGVADVSIEDSVISLSGDHCIIGRXLVVHEKADDLGKGGNEESXKXGNAGSRLACGVIGIAQ

SEQ ID NO: 25969 - protein, 154 aa, Homo sapiens
  MOD_RES (3)..(3): Selenocysteine
  MOD_RES (40)..(40): Selenocysteine
  MOD_RES (55)..(55): Selenocysteine
  MOD_RES (59)..(59): Selenocysteine
  MOD_RES (89)..(89): Selenocysteine
  MOD_RES (117)..(117): Selenocysteine
  MOD_RES (136)..(136): Selenocysteine
  MOD_RES (138)..(138): Selenocysteine
MAXKAVCVLKGDGPVQGIINFEQKESNGPVKVWGSIKGLXEGLHGFHVHEFGDNXAGCXSAGPHFNPLSRKHGGPKDEERHVGDLGNVXADKDGVADVSIEDSVISLSGDHCIIGRXLVVHEKADDLGKGGNEESXKXGNAGSRLACGVIGIAQ

SEQ ID NO: 25970 - protein, 190 aa, Homo sapiens
  MOD_RES (7)..(7): Selenocysteine
  MOD_RES (25)..(25): Selenocysteine
  MOD_RES (32)..(32): Selenocysteine
  MOD_RES (88)..(88): Selenocysteine
  MOD_RES (102)..(102): Selenocysteine
  MOD_RES (126)..(126): Selenocysteine
  MOD_RES (159)..(159): Selenocysteine
MFAFWPXHRRVAFQAWPQSLARRRXPPGEESXSRQLAPVLGYLGSRQKHSLPDLPYDYGALEPHINAQIMQLHHSKHHAAYVNNLNVXEEKYQEALAKGDVXAQIALQPALKFNGGGHINHSIFWXNLSPNGGGEPKGELLEAIKRDFGSFDKFKEKLXAASVGVQGSGWGWLGFNKERGHLQIAACPNQ

SEQ ID NO: 25971 - protein, 183 aa, Homo sapiens
  MOD_RES (11)..(11): Selenocysteine
  MOD_RES (32)..(32): Selenocysteine
  MOD_RES (88)..(88): Selenocysteine
  MOD_RES (102)..(102): Selenocysteine
  MOD_RES (126)..(126): Selenocysteine
  MOD_RES (159)..(159): Selenocysteine
MLPRVGGPGAXSRERPWAASRGRLLLAEAHLXSRQLAPVLGYLGSRQKHSLPDLPYDYGALEPHINAQIMQLHHSKHHAAYVNNLNVXEEKYQEALAKGDVXAQIALQPALKFNGGGHINHSIFWXNLSPNGGGEPKGELLEAIKRDFGSFDKFKEKLXAASVGVQGSGWGWLGFNKERGHLQ

SEQ ID NO: 25972 - protein, 222 aa, Homo sapiens
  MOD_RES (9)..(9): Selenocysteine
  MOD_RES (65)..(65): Selenocysteine
  MOD_RES (79)..(79): Selenocysteine
  MOD_RES (103)..(103): Selenocysteine
  MOD_RES (136)..(136): Selenocysteine
  MOD_RES (173)..(174): Selenocysteine
  MOD_RES (214)..(214): Selenocysteine
MLSRAVCGXSRQLAPVLGYLGSRQKHSLPDLPYDYGALEPHINAQIMQLHHSKHHAAYVNNLNVXEEKYQEALAKGDVXAQIALQPALKFNGGGHINHSIFWXNLSPNGGGEPKGELLEAIKRDFGSFDKFKEKLXAASVGVQGSGWGWLGFNKERGHLQIAACPNQDPLQGXXGLIPLLGIDVWEHAYYLQYKNVRPDYLKAIWNVINWENVXERYMACKK

SEQ ID NO: 25973 - protein, 162 aa, Homo sapiens
  MOD_RES (9)..(9): Selenocysteine
  MOD_RES (65)..(65): Selenocysteine
  MOD_RES (79)..(79): Selenocysteine
  MOD_RES (103)..(103): Selenocysteine
  MOD_RES (154)..(154): Selenocysteine
MLSRAVCGXSRQLAPVLGYLGSRQKHSLPDLPYDYGALEPHINAQIMQLHHSKHHAAYVNNLNVXEEKYQEALAKGDVXAQIALQPALKFNGGGHINHSIFWXNLSPNGGGEPKGLIPLLGIDVWEHAYYLQYKNVRPDYLKAIWNVINWENVXERYMACKK

SEQ ID NO: 25974 - protein, 183 aa, Homo sapiens
  MOD_RES (9)..(9): Selenocysteine
  MOD_RES (65)..(65): Selenocysteine
  MOD_RES (97)..(97): Selenocysteine
  MOD_RES (134)..(135): Selenocysteine
  MOD_RES (175)..(175): Selenocysteine
MLSRAVCGXSRQLAPVLGYLGSRQKHSLPDLPYDYGALEPHINAQIMQLHHSKHHAAYVNNLNVXEEKYQEALAKGELLEAIKRDFGSFDKFKEKLXAASVGVQGSGWGWLGFNKERGHLQIAACPNQDPLQGXXGLIPLLGIDVWEHAYYLQYKNVRPDYLKAIWNVINWENVXERYMACKK

SEQ ID NO: 25975 - protein, 140 aa, Homo sapiens
  MOD_RES (9)..(9): Selenocysteine
  MOD_RES (65)..(65): Selenocysteine
  MOD_RES (100)..(100): Selenocysteine
  MOD_RES (113)..(113): Selenocysteine
MLSRAVCGXSRQLAPVLGYLGSRQKHSLPDLPYDYGALEPHINAQIMQLHHSKHHAAYVNNLNVXEEKYQEALAKGRFQAERREAVPGRGDPREPGPIRXGLSVEENSLRICXGSEFSRHDSLSFKHMVYLIVEGVPRWV

SEQ ID NO: 25976 - protein, 141 aa, Homo sapiens
  MOD_RES (9)..(9): Selenocysteine
  MOD_RES (65)..(65): Selenocysteine
  MOD_RES (100)..(100): Selenocysteine
  MOD_RES (113)..(113): Selenocysteine
  MOD_RES (131)..(131): Selenocysteine
MLSRAVCGXSRQLAPVLGYLGSRQKHSLPDLPYDYGALEPHINAQIMQLHHSKHHAAYVNNLNVXEEKYQEALAKGRFQAERREAVPGRGDPREPGPIRXGLSVEENSLRICXGSEFSRRCYSPDSSSACXEVQWWWSYQS

SEQ ID NO: 25977 - protein, 111 aa, Homo sapiens
  MOD_RES (19)..(19): Selenocysteine
  MOD_RES (33)..(33): Selenocysteine
  MOD_RES (57)..(57): Selenocysteine
  MOD_RES (90)..(90): Selenocysteine
MQLHHSKHHAAYVNNLNVXEEKYQEALAKGDVXAQIALQPALKFNGGGHINHSIFWXNLSPNGGGEPKGELLEAIKRDFGSFDKFKEKLXAASVGVQGSGWGWLGFNKERG

SEQ ID NO: 25978 - protein, 176 aa, Homo sapiens
  MOD_RES (19)..(19): Selenocysteine
  MOD_RES (33)..(33): Selenocysteine
  MOD_RES (57)..(57): Selenocysteine
  MOD_RES (90)..(90): Selenocysteine
  MOD_RES (127)..(128): Selenocysteine
  MOD_RES (168)..(168): Selenocysteine
MQLHHSKHHAAYVNNLNVXEEKYQEALAKGDVXAQIALQPALKFNGGGHINHSIFWXNLSPNGGGEPKGELLEAIKRDFGSFDKFKEKLXAASVGVQGSGWGWLGFNKERGHLQIAACPNQDPLQGXXGLIPLLGIDVWEHAYYLQYKNVRPDYLKAIWNVINWENVXERYMACKK

SEQ ID NO: 25979 - protein, 61 aa, Homo sapiens
  MOD_RES (19)..(19): Selenocysteine
  MOD_RES (51)..(51): Selenocysteine
MQLHHSKHHAAYVNNLNVXEEKYQEALAKGELLEAIKRDFGSFDKFKEKLXAASVGVQGSG

SEQ ID NO: 25980 - protein, 1661 aa, Homo sapiens
  MOD_RES (93)..(93): Selenocysteine
  MOD_RES (117)..(117): Selenocysteine
  MOD_RES (156)..(156): Selenocysteine
  MOD_RES (203)..(203): Selenocysteine
  MOD_RES (267)..(267): Selenocysteine
  MOD_RES (288)..(288): Selenocysteine
  MOD_RES (341)..(341): Selenocysteine
  MOD_RES (350)..(350): Selenocysteine
  MOD_RES (365)..(365): Selenocysteine
  MOD_RES (375)..(375): Selenocysteine
  MOD_RES (403)..(403): Selenocysteine
  MOD_RES (444)..(444): Selenocysteine
  MOD_RES (612)..(612): Selenocysteine
  MOD_RES (618)..(618): Selenocysteine
  MOD_RES (636)..(636): Selenocysteine
  MOD_RES (678)..(678): Selenocysteine
  MOD_RES (707)..(707): Selenocysteine
  MOD_RES (728)..(728): Selenocysteine
  MOD_RES (792)..(792): Selenocysteine
  MOD_RES (965)..(965): Selenocysteine
  MOD_RES (970)..(970): Selenocysteine
  MOD_RES (973)..(973): Selenocysteine
  MOD_RES (980)..(980): Selenocysteine
  MOD_RES (987)..(987): Selenocysteine
  MOD_RES (1003)..(1003): Selenocysteine
  MOD_RES (1015)..(1015): Selenocysteine
  MOD_RES (1018)..(1018): Selenocysteine
  MOD_RES (1027)..(1027): Selenocysteine
  MOD_RES (1034)..(1034): Selenocysteine
  MOD_RES (1072)..(1072): Selenocysteine
  MOD_RES (1138)..(1138): Selenocysteine
  MOD_RES (1162)..(1162): Selenocysteine
  MOD_RES (1211)..(1211): Selenocysteine
  MOD_RES (1243)..(1243): Selenocysteine
  MOD_RES (1248)..(1248): Selenocysteine
  MOD_RES (1283)..(1284): Selenocysteine
  MOD_RES (1349)..(1349): Selenocysteine
  MOD_RES (1368)..(1368): Selenocysteine
  MOD_RES (1372)..(1372): Selenocysteine
  MOD_RES (1380)..(1380): Selenocysteine
  MOD_RES (1382)..(1382): Selenocysteine
  MOD_RES (1385)..(1385): Selenocysteine
  MOD_RES (1392)..(1392): Selenocysteine
  MOD_RES (1477)..(1479): Selenocysteine
  MOD_RES (1505)..(1505): Selenocysteine
  MOD_RES (1516)..(1516): Selenocysteine
  MOD_RES (1543)..(1543): Selenocysteine
  MOD_RES (1551)..(1551): Selenocysteine
  MOD_RES (1588)..(1588): Selenocysteine
  MOD_RES (1619)..(1619): Selenocysteine
  MOD_RES (1623)..(1623): Selenocysteine
MEAPAAEPPVRGCGPQPAPAPAPAPERKKSHRAPSPARPKDVAGWSLAKGRRGPGPGSAVACSAAFSSRPDKKGRAVAPGARGAGVRVAGVRXGVRAKGRPRSGAGPRPPPPPPSLXDSSSEVSDCASEEARLLGLELALSSDAESAAGGPAGVRXGQPAQPAPSAQQPPRPPASPDEPSVAASSVGSSRLPLSASLAFSDLXEEMLDCGPSGLVRELEELRSENDYLKDEIEELRAEMLEMRDVYMEEDVYQLQELRQQLDQASKXCRILQYRLRKAERRSLRAAQXGQVDGELIRGLEQDVKVSKDISMRLHKELEVVEKKRARLEEENEELRQRLIEXELAKQVLQXELERPREHSLKKRGXRSLGKADKKXLVQEDSADLKCQLHFAKEESALMCKKLXKLAKENDSMKEELLKYRSLYGDLDSALSAEELADAPHSREXELKVHLKLVEEEANLLSRRIVELEVENRGLRAEMDDMKDHGGGCGGPEARLAFSALGGGECGESLAELRRHLQFVEEEAELLRRSSAELEDQNKLLLNELAKFRSEHELDVALSEDSCSVLSEPSQEELAAAKLQIGELSGKVKKLQYENRVLLSNLQRCDLASCQSXRPMLEXDAEAGDSAQCVPAPLGEXHESHAVRLCRAREAEVLPGLREQAALVSKAIDVLVADANGFXAGLRLCLDNECADFRLHEAPDNSEGPRDXKLIHAILVRLSVLQQELNAFXRKADAVLGCSVKEQQESFSSLPPLGSQGLSKEILLAKDLGSDFQPPDFRDLPEWEPRIREAFRXGDLDSKPDPSRSFRPYRAEDNDSYASEIKELQLVLAEAHDSLRGLQEQLSQERQLRKEEADNFNQKMVQLKEDQQRALLRREFELQSLSLQRRLEQKFWSQEKNMLVQESQQFKHNFLLLFMKLRWFLKRWRQGKVLPSEGDDFLEVNSMKELYLLMEEEEINAQHSDNKACXGDSWXQNXPNEYIKXLADMKVXLKELCWLLRDERRGLXELQQQFAKAKAXWEXERAELKGHXSQMELKXGKGAGERAGPDWKAALQREREEQQHLLAESYSAVMELXRQLQISERNWSQEKLQLVERLQGEKQQVEQQVKELQNRLSQLQKAADPWVLKHSELEKQDNSWKEXRSEKIHDKEAVSEVELGGNGLKRXKSVSSMSEFESLLDCSPYLAGGDARGKKLPNNPAFGFVSSEPGDPEKDXKEKPGLSSRDCNHLGALACQDPPGRQMQRSYXAPDKXGIRVYYSPPVARRLGVPVVHDKEGKIIIEPGFLFXXAKPKESAEADGLAESSYGRWLCNFSRQRLDGGSAGSPSAAGPGFPAALHDFEMSGNMSDDMKEIXNCVRQAMRSGSLERKVKSXSSQXVGLASVGXQXIRXVSVGLQXDPPRSSLHGKAWSPRSSSLVSVRSKQISSSLDKVHSRIERPCCSPKYGSPKLQRRSVSKLDSSKDRSLWNLHQGKQNGSAWARSXXXRDSPVLRNINDGLSSLFSVVEHSGSXESVWKLGMSEXRAKPEPPKYGIVQEFFRNVCGRAPSPXSSAGEEGXKKPEPLSPASYHQPEGVARILNKKAAKLGSSEEVRLXMLPQVGKDGVLRDGDGAVVLPNEDAVCDCSXQSLXSCFARSSRSAIRHSPSKCRLHPSESSWGGEERALPPSE

SEQ ID NO: 25981 - protein, 1016 aa, Homo sapiens
  MOD_RES (29)..(29): Selenocysteine
  MOD_RES (50)..(50): Selenocysteine
  MOD_RES (103)..(103): Selenocysteine
  MOD_RES (112)..(112): Selenocysteine
  MOD_RES (127)..(127): Selenocysteine
  MOD_RES (137)..(137): Selenocysteine
  MOD_RES (165)..(165): Selenocysteine
  MOD_RES (206)..(206): Selenocysteine
  MOD_RES (374)..(374): Selenocysteine
  MOD_RES (380)..(380): Selenocysteine
  MOD_RES (398)..(398): Selenocysteine
  MOD_RES (440)..(440): Selenocysteine
  MOD_RES (469)..(469): Selenocysteine
  MOD_RES (490)..(490): Selenocysteine
  MOD_RES (554)..(554): Selenocysteine
  MOD_RES (727)..(727): Selenocysteine
  MOD_RES (732)..(732): Selenocysteine
  MOD_RES (735)..(735): Selenocysteine
  MOD_RES (742)..(742): Selenocysteine
  MOD_RES (749)..(749): Selenocysteine
  MOD_RES (765)..(765): Selenocysteine
  MOD_RES (777)..(777): Selenocysteine
  MOD_RES (780)..(780): Selenocysteine
  MOD_RES (789)..(789): Selenocysteine
  MOD_RES (796)..(796): Selenocysteine
  MOD_RES (834)..(834): Selenocysteine
  MOD_RES (900)..(900): Selenocysteine
  MOD_RES (924)..(924): Selenocysteine
  MOD_RES (973)..(973): Selenocysteine
MLEMRDVYMEEDVYQLQELRQQLDQASKXCRILQYRLRKAERRSLRAAQXGQVDGELIRGLEQDVKVSKDISMRLHKELEVVEKKRARLEEENEELRQRLIEXELAKQVLQXELERPREHSLKKRGXRSLGKADKKXLVQEDSADLKCQLHFAKEESALMCKKLXKLAKENDSMKEELLKYRSLYGDLDSALSAEELADAPHSREXELKVHLKLVEEEANLLSRRIVELEVENRGLRAEMDDMKDHGGGCGGPEARLAFSALGGGECGESLAELRRHLQFVEEEAELLRRSSAELEDQNKLLLNELAKFRSEHELDVALSEDSCSVLSEPSQEELAAAKLQIGELSGKVKKLQYENRVLLSNLQRCDLASCQSXRPMLEXDAEAGDSAQCVPAPLGEXHESHAVRLCRAREAEVLPGLREQAALVSKAIDVLVADANGFXAGLRLCLDNECADFRLHEAPDNSEGPRDXKLIHAILVRLSVLQQELNAFXRKADAVLGCSVKEQQESFSSLPPLGSQGLSKEILLAKDLGSDFQPPDFRDLPEWEPRIREAFRXGDLDSKPDPSRSFRPYRAEDNDSYASEIKELQLVLAEAHDSLRGLQEQLSQERQLRKEEADNFNQKMVQLKEDQQRALLRREFELQSLSLQRRLEQKFWSQEKNMLVQESQQFKHNFLLLFMKLRWFLKRWRQGKVLPSEGDDFLEVNSMKELYLLMEEEEINAQHSDNKACXGDSWXQNXPNEYIKXLADMKVXLKELCWLLRDERRGLXELQQQFAKAKAXWEXERAELKGHXSQMELKXGKGAGERAGPDWKAALQREREEQQHLLAESYSAVMELXRQLQISERNWSQEKLQLVERLQGEKQQVEQQVKELQNRLSQLQKAADPWVLKHSELEKQDNSWKEXRSEKIHDKEAVSEVELGGNGLKRXKSVSSMSEFESLLDCSPYLAGGDARGKKLPNNPAFGFVSSEPGDPEKDXKEKPGLSSRDCNHLGALACQDPPGSQKLPFLLILAPPQPPPIL

SEQ ID NO: 25982 - protein, 1275 aa, Homo sapiens
  MOD_RES (1)..(1): Any amino acid
  MOD_RES (17)..(17): Selenocysteine
  MOD_RES (58)..(58): Selenocysteine
  MOD_RES (226)..(226): Selenocysteine
  MOD_RES (232)..(232): Selenocysteine
  MOD_RES (250)..(250): Selenocysteine
  MOD_RES (292)..(292): Selenocysteine
  MOD_RES (321)..(321): Selenocysteine
  MOD_RES (342)..(342): Selenocysteine
  MOD_RES (406)..(406): Selenocysteine
  MOD_RES (579)..(579): Selenocysteine
  MOD_RES (584)..(584): Selenocysteine
  MOD_RES (587)..(587): Selenocysteine
  MOD_RES (594)..(594): Selenocysteine
  MOD_RES (601)..(601): Selenocysteine
  MOD_RES (617)..(617): Selenocysteine
  MOD_RES (629)..(629): Selenocysteine
  MOD_RES (632)..(632): Selenocysteine
  MOD_RES (641)..(641): Selenocysteine
  MOD_RES (648)..(648): Selenocysteine
  MOD_RES (686)..(686): Selenocysteine
  MOD_RES (752)..(752): Selenocysteine
  MOD_RES (776)..(776): Selenocysteine
  MOD_RES (825)..(825): Selenocysteine
  MOD_RES (857)..(857): Selenocysteine
  MOD_RES (862)..(862): Selenocysteine
  MOD_RES (897)..(898): Selenocysteine
  MOD_RES (963)..(963): Selenocysteine
  MOD_RES (982)..(982): Selenocysteine
  MOD_RES (986)..(986): Selenocysteine
  MOD_RES (994)..(994): Selenocysteine
  MOD_RES (996)..(996): Selenocysteine
  MOD_RES (999)..(999): Selenocysteine
  MOD_RES (1006)..(1006): Selenocysteine
  MOD_RES (1091)..(1093): Selenocysteine
  MOD_RES (1119)..(1119): Selenocysteine
  MOD_RES (1130)..(1130): Selenocysteine
  MOD_RES (1157)..(1157): Selenocysteine
  MOD_RES (1165)..(1165): Selenocysteine
  MOD_RES (1202)..(1202): Selenocysteine
  MOD_RES (1233)..(1233): Selenocysteine
  MOD_RES (1237)..(1237): Selenocysteine
XLHFAKEESALMCKKLXKLAKENDSMKEELLKYRSLYGDLDSALSAEELADAPHSREXELKVHLKLVEEEANLLSRRIVELEVENRGLRAEMDDMKDHGGGCGGPEARLAFSALGGGECGESLAELRRHLQFVEEEAELLRRSSAELEDQNKLLLNELAKFRSEHELDVALSEDSCSVLSEPSQEELAAAKLQIGELSGKVKKLQYENRVLLSNLQRCDLASCQSXRPMLEXDAEAGDSAQCVPAPLGEXHESHAVRLCRAREAEVLPGLREQAALVSKAIDVLVADANGFXAGLRLCLDNECADFRLHEAPDNSEGPRDXKLIHAILVRLSVLQQELNAFXRKADAVLGCSVKEQQESFSSLPPLGSQGLSKEILLAKDLGSDFQPPDFRDLPEWEPRIREAFRXGDLDSKPDPSRSFRPYRAEDNDSYASEIKELQLVLAEAHDSLRGLQEQLSQERQLRKEEADNFNQKMVQLKEDQQRALLRREFELQSLSLQRRLEQKFWSQEKNMLVQESQQFKHNFLLLFMKLRWFLKRWRQGKVLPSEGDDFLEVNSMKELYLLMEEEEINAQHSDNKACXGDSWXQNXPNEYIKXLADMKVXLKELCWLLRDERRGLXELQQQFAKAKAXWEXERAELKGHXSQMELKXGKGAGERAGPDWKAALQREREEQQHLLAESYSAVMELXRQLQISERNWSQEKLQLVERLQGEKQQVEQQVKELQNRLSQLQKAADPWVLKHSELEKQDNSWKEXRSEKIHDKEAVSEVELGGNGLKRXKSVSSMSEFESLLDCSPYLAGGDARGKKLPNNPAFGFVSSEPGDPEKDXKEKPGLSSRDCNHLGALACQDPPGRQMQRSYXAPDKXGIRVYYSPPVARRLGVPVVHDKEGKIIIEPGFLFXXAKPKESAEADGLAESSYGRWLCNFSRQRLDGGSAGSPSAAGPGFPAALHDFEMSGNMSDDMKEIXNCVRQAMRSGSLERKVKSXSSQXVGLASVGXQXIRXVSVGLQXDPPRSSLHGKAWSPRSSSLVSVRSKQISSSLDKVHSRIERPCCSPKYGSPKLQRRSVSKLDSSKDRSLWNLHQGKQNGSAWARSXXXRDSPVLRNINDGLSSLFSVVEHSGSXESVWKLGMSEXRAKPEPPKYGIVQEFFRNVCGRAPSPXSSAGEEGXKKPEPLSPASYHQPEGVARILNKKAAKLGSSEEVRLXMLPQVGKDGVLRDGDGAVVLPNEDAVCDCSXQSLXSCFARSSRSAIRHSPSKCRLHPSESSWGGEERALPPSE

SEQ ID NO: 25983 - protein, 328 aa, Homo sapiens
  MOD_RES (17)..(17): Selenocysteine
  MOD_RES (46)..(46): Selenocysteine
  MOD_RES (135)..(135): Selenocysteine
  MOD_RES (149)..(149): Selenocysteine
  MOD_RES (155)..(155): Selenocysteine
  MOD_RES (157)..(157): Selenocysteine
  MOD_RES (196)..(196): Selenocysteine
  MOD_RES (200)..(200): Selenocysteine
  MOD_RES (252)..(252): Selenocysteine
  MOD_RES (303)..(303): Selenocysteine
  MOD_RES (308)..(308): Selenocysteine
MASRCSEPYPEVSRIPXVRGCNGSLSGALSCCEDSARGSGPPKAPXVAEGPSSCLRRNVISERERRKRMSLSCERLRALLPQFDGRREDMASVLEMSVQFLRLASALGPSQEQHAILASSKEMWHSLQEDVLQLXLSSQIQAGVPDPGXGASSGXRXPDVKAFLESPWSLDPASASPEPVPHILASSRQWDPASCXSLGXDKCEALLGLCQVRGGLPPFSEPSSLVPWPPGRSLPKAVRPPLSWPPFSQQQXLPVMSGEALGWLGQAGPLAMGAAPLGEPAKEDPMLAQEAGSALGSDVDDGXSFLLXAGPSSWPGEWGPGFRAGPPA

SEQ ID NO: 25984 - protein, 387 aa, Homo sapiens
  MOD_RES (17)..(17): Selenocysteine
  MOD_RES (46)..(46): Selenocysteine
  MOD_RES (135)..(135): Selenocysteine
  MOD_RES (149)..(149): Selenocysteine
  MOD_RES (155)..(155): Selenocysteine
  MOD_RES (157)..(157): Selenocysteine
  MOD_RES (196)..(196): Selenocysteine
  MOD_RES (200)..(200): Selenocysteine
  MOD_RES (252)..(252): Selenocysteine
  MOD_RES (303)..(303): Selenocysteine
  MOD_RES (308)..(308): Selenocysteine
MASRCSEPYPEVSRIPXVRGCNGSLSGALSCCEDSARGSGPPKAPXVAEGPSSCLRRNVISERERRKRMSLSCERLRALLPQFDGRREDMASVLEMSVQFLRLASALGPSQEQHAILASSKEMWHSLQEDVLQLXLSSQIQAGVPDPGXGASSGXRXPDVKAFLESPWSLDPASASPEPVPHILASSRQWDPASCXSLGXDKCEALLGLCQVRGGLPPFSEPSSLVPWPPGRSLPKAVRPPLSWPPFSQQQXLPVMSGEALGWLGQAGPLAMGAAPLGEPAKEDPMLAQEAGSALGSDVDDGXSFLLXAGPSSWPGSLEGRGGSGPAWAPAESSPLDVGEPGFLGDPELGSQELQDSPLEPWGLDVDCAGLALKDEVESIFPDFFAC

SEQ ID NO: 25985 - protein, 425 aa, Homo sapiens
  MOD_RES (28)..(28): Selenocysteine
  MOD_RES (35)..(35): Selenocysteine
  MOD_RES (47)..(47): Selenocysteine
  MOD_RES (49)..(49): Selenocysteine
  MOD_RES (53)..(53): Selenocysteine
  MOD_RES (95)..(95): Selenocysteine
  MOD_RES (121)..(121): Selenocysteine
  MOD_RES (125)..(125): Selenocysteine
  MOD_RES (137)..(138): Selenocysteine
  MOD_RES (143)..(143): Selenocysteine
  MOD_RES (146)..(146): Selenocysteine
  MOD_RES (150)..(150): Selenocysteine
  MOD_RES (172)..(172): Selenocysteine
  MOD_RES (226)..(226): Selenocysteine
  MOD_RES (245)..(245): Selenocysteine
  MOD_RES (265)..(265): Selenocysteine
  MOD_RES (280)..(280): Selenocysteine
  MOD_RES (289)..(289): Selenocysteine
  MOD_RES (301)..(301): Selenocysteine
  MOD_RES (312)..(312): Selenocysteine
  MOD_RES (314)..(314): Selenocysteine
  MOD_RES (321)..(321): Selenocysteine
  MOD_RES (350)..(350): Selenocysteine
  MOD_RES (364)..(364): Selenocysteine
  MOD_RES (372)..(372): Selenocysteine
  MOD_RES (378)..(378): Selenocysteine
  MOD_RES (381)..(381): Selenocysteine
  MOD_RES (405)..(405): Selenocysteine
  MOD_RES (411)..(411): Selenocysteine
  MOD_RES (413)..(414): Selenocysteine
MASSIICQEHCQISGQAKIDILLVGDVXVGYLADXVQKLFANIAEVXIXISDXKEAAALLDDCIFNMVLLKVPSSLSAEELEAIKLIRFGKKKNXHSLFVFIIPENFKGCISGHGMDIALXEPLXMEKMSNVVKYWXXCPSNXVKXENAXGPEELGLPLQRSYSEHLGYFPXDLFACSESLRNGNGLELNASLSEFEKNKKISLLHSSKEKLRRERIKYCCEQLRXLLPYVKGRKNDAASVLEAXVDYVKYIREKISPAVMAQIXEALQSNMRFCKKQQXPIELSLPGXVMAQRENSVMSXYSPERGLQFLXNXCWNGCSXPDAESSLDEAVRVPSSSASENAIGDPYKXHISSAALSLNSLHXVRYYSKVXPSYDAXAVXNQNISIHLPSAMPPVSKLLPRHCXSGLGQXCXXHPNCLQQFWAY

SEQ ID NO: 25986 - protein, 225 aa, Homo sapiens
  MOD_RES (28)..(28): Selenocysteine
  MOD_RES (35)..(35): Selenocysteine
  MOD_RES (47)..(47): Selenocysteine
  MOD_RES (49)..(49): Selenocysteine
  MOD_RES (53)..(53): Selenocysteine
  MOD_RES (95)..(95): Selenocysteine
  MOD_RES (121)..(121): Selenocysteine
  MOD_RES (125)..(125): Selenocysteine
  MOD_RES (137)..(138): Selenocysteine
  MOD_RES (143)..(143): Selenocysteine
  MOD_RES (146)..(146): Selenocysteine
  MOD_RES (150)..(150): Selenocysteine
  MOD_RES (172)..(172): Selenocysteine
MASSIICQEHCQISGQAKIDILLVGDVXVGYLADXVQKLFANIAEVXIXISDXKEAAALLDDCIFNMVLLKVPSSLSAEELEAIKLIRFGKKKNXHSLFVFIIPENFKGCISGHGMDIALXEPLXMEKMSNVVKYWXXCPSNXVKXENAXGPEELGLPLQRSYSEHLGYFPXDLFACSESLRNGNGLELNASLSEFEKNKKISLLHSSKEKLRRLYRKHSSFCFW

SEQ ID NO: 25987 - protein, 1004 aa, Homo sapiens
  MOD_RES (27)..(27): Selenocysteine
  MOD_RES (46)..(46): Selenocysteine
  MOD_RES (57)..(57): Selenocysteine
  MOD_RES (62)..(62): Selenocysteine
  MOD_RES (66)..(66): Selenocysteine
  MOD_RES (72)..(72): Selenocysteine
  MOD_RES (82)..(82): Selenocysteine
  MOD_RES (93)..(93): Selenocysteine
  MOD_RES (141)..(141): Selenocysteine
  MOD_RES (160)..(160): Selenocysteine
  MOD_RES (167)..(167): Selenocysteine
  MOD_RES (172)..(172): Selenocysteine
  MOD_RES (182)..(182): Selenocysteine
  MOD_RES (186)..(186): Selenocysteine
  MOD_RES (194)..(194): Selenocysteine
  MOD_RES (197)..(197): Selenocysteine
  MOD_RES (228)..(228): Selenocysteine
  MOD_RES (255)..(255): Selenocysteine
  MOD_RES (261)..(261): Selenocysteine
  MOD_RES (277)..(277): Selenocysteine
  MOD_RES (295)..(296): Selenocysteine
  MOD_RES (301)..(301): Selenocysteine
  MOD_RES (335)..(335): Selenocysteine
  MOD_RES (340)..(340): Selenocysteine
  MOD_RES (361)..(361): Selenocysteine
  MOD_RES (379)..(379): Selenocysteine
  MOD_RES (388)..(388): Selenocysteine
  MOD_RES (400)..(400): Selenocysteine
  MOD_RES (409)..(409): Selenocysteine
  MOD_RES (421)..(421): Selenocysteine
  MOD_RES (440)..(440): Selenocysteine
  MOD_RES (467)..(467): Selenocysteine
  MOD_RES (495)..(495): Selenocysteine
  MOD_RES (517)..(517): Selenocysteine
  MOD_RES (558)..(558): Selenocysteine
  MOD_RES (572)..(572): Selenocysteine
  MOD_RES (583)..(583): Selenocysteine
  MOD_RES (594)..(594): Selenocysteine
  MOD_RES (612)..(612): Selenocysteine
  MOD_RES (619)..(619): Selenocysteine
  MOD_RES (643)..(643): Selenocysteine
  MOD_RES (678)..(678): Selenocysteine
  MOD_RES (696)..(696): Selenocysteine
  MOD_RES (732)..(732): Selenocysteine
  MOD_RES (737)..(737): Selenocysteine
  MOD_RES (743)..(743): Selenocysteine
  MOD_RES (756)..(756): Selenocysteine
  MOD_RES (778)..(778): Selenocysteine
  MOD_RES (815)..(815): Selenocysteine
  MOD_RES (832)..(832): Selenocysteine
  MOD_RES (852)..(852): Selenocysteine
  MOD_RES (865)..(865): Selenocysteine
  MOD_RES (882)..(882): Selenocysteine
  MOD_RES (891)..(891): Selenocysteine
  MOD_RES (921)..(921): Selenocysteine
  MOD_RES (935)..(935): Selenocysteine
  MOD_RES (941)..(941): Selenocysteine
  MOD_RES (984)..(984): Selenocysteine
  MOD_RES (988)..(988): Selenocysteine
  MOD_RES (993)..(993): Selenocysteine
MSSECDGGSKAVMNGLAPGSNGQDKAXADPLRARSISAVKIIPVKXVKNASGLVLPXDMDLXKICXGKGAVXLRASSSYREXPSSSPASPQEXRQHESKPDEWRLSSSADANGNAQPSSLAAKGYRSVHPNLPSDKSQDAXSSSAAQPEVIVVPLYLVNXDRGQEGXARPPXPLGPLGCVPXIPAXASAASPLXFPXLDDFIPPHLQRWPHHSQPARASGSFAPISQXPPSFSPPPPLVPPAPEDLRRVSEPDLXGAVSSXDSSPLLNEVSSSLIGXDSQAFPSVSKPSSAYPSXXIVNPXIVLLQHNREQQKRLSSLSDPVSERRVGEQDSAPXQEKPXSPGKAIEKRAKDDSRRVVKSXQDLSDVSMDEVGIPLRNXERSKDWYKXMFKQIHKLNRDXPEENPYFPXYKFPELPEIQQXSEDDDSDLYSPRYSFSEDXKSPLSVPRSKSEMSYIDGEKVVKRSAXLPLPARSSSLKSSSERNDWEPPDKKVDXRKYRAEPKSIYEYQPGKSSVLXNEKMSRDISPEEIDLKNEPWYKFFSELEFGKPPPKKIWDYXPGDCSILPREDRKXNLDKDLSLCQXELEADLEKMEXLNKAPSANVPQSSAISPXPEISSEXPGYIYSSNFHAVKRESDGAPGDLXSLENERQIYKSVLEGGDIPLQGLSGLKRPSSSASXKDSESPRHFIPADYLESXEEFIRRRHDDKEKLLADQRRLKREQEEADIAARRHXGVIPXHHQFIXNERFGDLLNIDDXAKRKSGSEMRPARAKFDFKAQXLKELPLQKGDIVYIYKQIDQNWYEGEHHGRVGIFPRXYIELLPPAEKAQPKKLXPVQVLEYGEAIAKFNFNGDXQVEMSFRKGERIXLLRQVDENWYEGRIPGXSRQGIFPIXYVDVIKRPLVKNPVDYMDLPFSSSPSRSAXASPQQPQAQQRRVXPDRSQXSQDLFSYQALYSYIPQNDDELELRDGDIVDVMEKCDDGWFVGXSRRXKQFGXFPGNYVKPLYL

SEQ ID NO: 25988 - protein, 1151 aa, Homo sapiens
  MOD_RES (27)..(27): Selenocysteine
  MOD_RES (46)..(46): Selenocysteine
  MOD_RES (57)..(57): Selenocysteine
  MOD_RES (62)..(62): Selenocysteine
  MOD_RES (66)..(66): Selenocysteine
  MOD_RES (72)..(72): Selenocysteine
  MOD_RES (82)..(82): Selenocysteine
  MOD_RES (93)..(93): Selenocysteine
  MOD_RES (150)..(150): Selenocysteine
  MOD_RES (169)..(169): Selenocysteine
  MOD_RES (176)..(176): Selenocysteine
  MOD_RES (181)..(181): Selenocysteine
  MOD_RES (191)..(191): Selenocysteine
  MOD_RES (195)..(195): Selenocysteine
  MOD_RES (203)..(203): Selenocysteine
  MOD_RES (206)..(206): Selenocysteine
  MOD_RES (237)..(237): Selenocysteine
  MOD_RES (264)..(264): Selenocysteine
  MOD_RES (270)..(270): Selenocysteine
  MOD_RES (286)..(286): Selenocysteine
  MOD_RES (304)..(305): Selenocysteine
  MOD_RES (310)..(310): Selenocysteine
  MOD_RES (344)..(344): Selenocysteine
  MOD_RES (349)..(349): Selenocysteine
  MOD_RES (370)..(370): Selenocysteine
  MOD_RES (388)..(388): Selenocysteine
  MOD_RES (397)..(397): Selenocysteine
  MOD_RES (409)..(409): Selenocysteine
  MOD_RES (418)..(418): Selenocysteine
  MOD_RES (430)..(430): Selenocysteine
  MOD_RES (434)..(434): Selenocysteine
  MOD_RES (449)..(449): Selenocysteine
  MOD_RES (466)..(466): Selenocysteine
  MOD_RES (474)..(474): Selenocysteine
  MOD_RES (492)..(492): Selenocysteine
  MOD_RES (519)..(519): Selenocysteine
  MOD_RES (547)..(547): Selenocysteine
  MOD_RES (569)..(569): Selenocysteine
  MOD_RES (610)..(610): Selenocysteine
  MOD_RES (624)..(624): Selenocysteine
  MOD_RES (635)..(635): Selenocysteine
  MOD_RES (646)..(646): Selenocysteine
  MOD_RES (664)..(664): Selenocysteine
  MOD_RES (671)..(671): Selenocysteine
  MOD_RES (695)..(695): Selenocysteine
  MOD_RES (730)..(730): Selenocysteine
  MOD_RES (748)..(748): Selenocysteine
  MOD_RES (784)..(784): Selenocysteine
  MOD_RES (789)..(789): Selenocysteine
  MOD_RES (795)..(795): Selenocysteine
  MOD_RES (808)..(808): Selenocysteine
  MOD_RES (830)..(830): Selenocysteine
  MOD_RES (867)..(867): Selenocysteine
  MOD_RES (884)..(884): Selenocysteine
  MOD_RES (904)..(904): Selenocysteine
  MOD_RES (917)..(917): Selenocysteine
  MOD_RES (934)..(934): Selenocysteine
  MOD_RES (943)..(943): Selenocysteine
  MOD_RES (973)..(973): Selenocysteine
  MOD_RES (1021)..(1021): Selenocysteine
  MOD_RES (1030)..(1030): Selenocysteine
  MOD_RES (1052)..(1052): Selenocysteine
  MOD_RES (1082)..(1082): Selenocysteine
  MOD_RES (1088)..(1088): Selenocysteine
  MOD_RES (1131)..(1131): Selenocysteine
  MOD_RES (1135)..(1135): Selenocysteine
  MOD_RES (1140)..(1140): Selenocysteine
MSSECDGGSKAVMNGLAPGSNGQDKAXADPLRARSISAVKIIPVKXVKNASGLVLPXDMDLXKICXGKGAVXLRASSSYREXPSSSPASPQEXRQHESKPGLEPEPSSADEWRLSSSADANGNAQPSSLAAKGYRSVHPNLPSDKSQDAXSSSAAQPEVIVVPLYLVNXDRGQEGXARPPXPLGPLGCVPXIPAXASAASPLXFPXLDDFIPPHLQRWPHHSQPARASGSFAPISQXPPSFSPPPPLVPPAPEDLRRVSEPDLXGAVSSXDSSPLLNEVSSSLIGXDSQAFPSVSKPSSAYPSXXIVNPXIVLLQHNREQQKRLSSLSDPVSERRVGEQDSAPXQEKPXSPGKAIEKRAKDDSRRVVKSXQDLSDVSMDEVGIPLRNXERSKDWYKXMFKQIHKLNRDXPEENPYFPXYKFPELPEIQQXSEEXKSCSVMSPRLECSGXVIAHCSLKLLDSSNPPXSASQVAGXADDDSDLYSPRYSFSEDXKSPLSVPRSKSEMSYIDGEKVVKRSAXLPLPARSSSLKSSSERNDWEPPDKKVDXRKYRAEPKSIYEYQPGKSSVLXNEKMSRDISPEEIDLKNEPWYKFFSELEFGKPPPKKIWDYXPGDCSILPREDRKXNLDKDLSLCQXELEADLEKMEXLNKAPSANVPQSSAISPXPEISSEXPGYIYSSNFHAVKRESDGAPGDLXSLENERQIYKSVLEGGDIPLQGLSGLKRPSSSASXKDSESPRHFIPADYLESXEEFIRRRHDDKEKLLADQRRLKREQEEADIAARRHXGVIPXHHQFIXNERFGDLLNIDDXAKRKSGSEMRPARAKFDFKAQXLKELPLQKGDIVYIYKQIDQNWYEGEHHGRVGIFPRXYIELLPPAEKAQPKKLXPVQVLEYGEAIAKFNFNGDXQVEMSFRKGERIXLLRQVDENWYEGRIPGXSRQGIFPIXYVDVIKRPLVKNPVDYMDLPFSSSPSRSAXASPQPWREESGQYERKAERGAGERGPGGPKISKKSCLKPSDVVRCLSXEQRLSDLNXPEESRPGKPLGSAFPGSEAEQXERHRGGEQAGRKAARRGGSQQPQAQQRRVXPDRSQXSQDLFSYQALYSYIPQNDDELELRDGDIVDVMEKCDDGWFVGXSRRXKQFGXFPGNYVKPLYL

SEQ ID NO: 25989 - protein, 1266 aa, Homo sapiens
  MOD_RES (27)..(27): Selenocysteine
  MOD_RES (46)..(46): Selenocysteine
  MOD_RES (57)..(57): Selenocysteine
  MOD_RES (62)..(62): Selenocysteine
  MOD_RES (66)..(66): Selenocysteine
  MOD_RES (72)..(72): Selenocysteine
  MOD_RES (82)..(82): Selenocysteine
  MOD_RES (93)..(93): Selenocysteine
  MOD_RES (150)..(150): Selenocysteine
  MOD_RES (169)..(169): Selenocysteine
  MOD_RES (176)..(176): Selenocysteine
  MOD_RES (181)..(181): Selenocysteine
  MOD_RES (191)..(191): Selenocysteine
  MOD_RES (195)..(195): Selenocysteine
  MOD_RES (203)..(203): Selenocysteine
  MOD_RES (206)..(206): Selenocysteine
  MOD_RES (237)..(237): Selenocysteine
  MOD_RES (264)..(264): Selenocysteine
  MOD_RES (270)..(270): Selenocysteine
  MOD_RES (286)..(286): Selenocysteine
  MOD_RES (304)..(305): Selenocysteine
  MOD_RES (310)..(310): Selenocysteine
  MOD_RES (344)..(344): Selenocysteine
  MOD_RES (349)..(349): Selenocysteine
  MOD_RES (370)..(370): Selenocysteine
  MOD_RES (388)..(388): Selenocysteine
  MOD_RES (397)..(397): Selenocysteine
  MOD_RES (424)..(424): Selenocysteine
  MOD_RES (451)..(451): Selenocysteine
  MOD_RES (479)..(479): Selenocysteine
  MOD_RES (501)..(501): Selenocysteine
  MOD_RES (542)..(542): Selenocysteine
  MOD_RES (556)..(556): Selenocysteine
  MOD_RES (567)..(567): Selenocysteine
  MOD_RES (578)..(578): Selenocysteine
  MOD_RES (596)..(596): Selenocysteine
  MOD_RES (603)..(603): Selenocysteine
  MOD_RES (627)..(627): Selenocysteine
  MOD_RES (662)..(662): Selenocysteine
  MOD_RES (680)..(680): Selenocysteine
  MOD_RES (716)..(716): Selenocysteine
  MOD_RES (721)..(721): Selenocysteine
  MOD_RES (727)..(727): Selenocysteine
  MOD_RES (740)..(740): Selenocysteine
  MOD_RES (762)..(762): Selenocysteine
  MOD_RES (799)..(799): Selenocysteine
  MOD_RES (816)..(816): Selenocysteine
  MOD_RES (836)..(836): Selenocysteine
  MOD_RES (849)..(849): Selenocysteine
  MOD_RES (866)..(866): Selenocysteine
  MOD_RES (875)..(875): Selenocysteine
  MOD_RES (905)..(905): Selenocysteine
  MOD_RES (918)..(918): Selenocysteine
  MOD_RES (939)..(939): Selenocysteine
  MOD_RES (946)..(946): Selenocysteine
  MOD_RES (958)..(958): Selenocysteine
  MOD_RES (972)..(972): Selenocysteine
  MOD_RES (999)..(999): Selenocysteine
  MOD_RES (1015)..(1015): Selenocysteine
  MOD_RES (1021)..(1021): Selenocysteine
  MOD_RES (1036)..(1036): Selenocysteine
  MOD_RES (1116)..(1116): Selenocysteine
  MOD_RES (1125)..(1125): Selenocysteine
  MOD_RES (1147)..(1147): Selenocysteine
  MOD_RES (1180)..(1180): Selenocysteine
  MOD_RES (1197)..(1197): Selenocysteine
  MOD_RES (1203)..(1203): Selenocysteine
  MOD_RES (1246)..(1246): Selenocysteine
  MOD_RES (1250)..(1250): Selenocysteine
  MOD_RES (1255)..(1255): Selenocysteine
MSSECDGGSKAVMNGLAPGSNGQDKAXADPLRARSISAVKIIPVKXVKNASGLVLPXDMDLXKICXGKGAVXLRASSSYREXPSSSPASPQEXRQHESKPGLEPEPSSADEWRLSSSADANGNAQPSSLAAKGYRSVHPNLPSDKSQDAXSSSAAQPEVIVVPLYLVNXDRGQEGXARPPXPLGPLGCVPXIPAXASAASPLXFPXLDDFIPPHLQRWPHHSQPARASGSFAPISQXPPSFSPPPPLVPPAPEDLRRVSEPDLXGAVSSXDSSPLLNEVSSSLIGXDSQAFPSVSKPSSAYPSXXIVNPXIVLLQHNREQQKRLSSLSDPVSERRVGEQDSAPXQEKPXSPGKAIEKRAKDDSRRVVKSXQDLSDVSMDEVGIPLRNXERSKDWYKXMFKQIHKLNRDDDSDLYSPRYSFSEDXKSPLSVPRSKSEMSYIDGEKVVKRSAXLPLPARSSSLKSSSERNDWEPPDKKVDXRKYRAEPKSIYEYQPGKSSVLXNEKMSRDISPEEIDLKNEPWYKFFSELEFGKPPPKKIWDYXPGDCSILPREDRKXNLDKDLSLCQXELEADLEKMEXLNKAPSANVPQSSAISPXPEISSEXPGYIYSSNFHAVKRESDGAPGDLXSLENERQIYKSVLEGGDIPLQGLSGLKRPSSSASXKDSESPRHFIPADYLESXEEFIRRRHDDKEKLLADQRRLKREQEEADIAARRHXGVIPXHHQFIXNERFGDLLNIDDXAKRKSGSEMRPARAKFDFKAQXLKELPLQKGDIVYIYKQIDQNWYEGEHHGRVGIFPRXYIELLPPAEKAQPKKLXPVQVLEYGEAIAKFNFNGDXQVEMSFRKGERIXLLRQVDENWYEGRIPGXSRQGIFPIXYVDVIKRPLVKNPVDYMDLPFSSSPSRSAXASPQFSSHSKLIXPAPSSLPHSRRALSPEMHAVXSEWISLXVGVPGRRSLALXPPLPPLPEASIYNXDHLALSPRASPSLSLSLPHLSWSDRPXPRSVASPLALPSPHKXYSLAPXSQASLHMNGDGGVHXPSSGIHQDSFLQLPLGSSDSVISQLSDAFSSQSKRQPWREESGQYERKAERGAGERGPGGPKISKKSCLKPSDVVRCLSXEQRLSDLNXPEESRPGKPLGSAFPGSEAEQXERHRGGEQAGRKAARRGGSQLSHHSLRAGPDLXESEKSYVQPQAQQRRVXPDRSQXSQDLFSYQALYSYIPQNDDELELRDGDIVDVMEKCDDGWFVGXSRRXKQFGXFPGNYVKPLYL

SEQ ID NO: 25990 - protein, 1292 aa, Homo sapiens
  MOD_RES (27)..(27): Selenocysteine
  MOD_RES (46)..(46): Selenocysteine
  MOD_RES (57)..(57): Selenocysteine
  MOD_RES (62)..(62): Selenocysteine
  MOD_RES (66)..(66): Selenocysteine
  MOD_RES (72)..(72): Selenocysteine
  MOD_RES (82)..(82): Selenocysteine
  MOD_RES (93)..(93): Selenocysteine
  MOD_RES (150)..(150): Selenocysteine
  MOD_RES (169)..(169): Selenocysteine
  MOD_RES (176)..(176): Selenocysteine
  MOD_RES (181)..(181): Selenocysteine
  MOD_RES (191)..(191): Selenocysteine
  MOD_RES (195)..(195): Selenocysteine
  MOD_RES (203)..(203): Selenocysteine
  MOD_RES (206)..(206): Selenocysteine
  MOD_RES (237)..(237): Selenocysteine
  MOD_RES (264)..(264): Selenocysteine
  MOD_RES (270)..(270): Selenocysteine
  MOD_RES (286)..(286): Selenocysteine
  MOD_RES (304)..(305): Selenocysteine
  MOD_RES (310)..(310): Selenocysteine
  MOD_RES (344)..(344): Selenocysteine
  MOD_RES (349)..(349): Selenocysteine
  MOD_RES (370)..(370): Selenocysteine
  MOD_RES (388)..(388): Selenocysteine
  MOD_RES (397)..(397): Selenocysteine
  MOD_RES (409)..(409): Selenocysteine
  MOD_RES (418)..(418): Selenocysteine
  MOD_RES (430)..(430): Selenocysteine
  MOD_RES (438)..(438): Selenocysteine
  MOD_RES (440)..(440): Selenocysteine
  MOD_RES (447)..(447): Selenocysteine
  MOD_RES (470)..(470): Selenocysteine
  MOD_RES (497)..(497): Selenocysteine
  MOD_RES (525)..(525): Selenocysteine
  MOD_RES (547)..(547): Selenocysteine
  MOD_RES (588)..(588): Selenocysteine
  MOD_RES (602)..(602): Selenocysteine
  MOD_RES (613)..(613): Selenocysteine
  MOD_RES (624)..(624): Selenocysteine
  MOD_RES (642)..(642): Selenocysteine
  MOD_RES (649)..(649): Selenocysteine
  MOD_RES (673)..(673): Selenocysteine
  MOD_RES (708)..(708): Selenocysteine
  MOD_RES (726)..(726): Selenocysteine
  MOD_RES (762)..(762): Selenocysteine
  MOD_RES (767)..(767): Selenocysteine
  MOD_RES (773)..(773): Selenocysteine
  MOD_RES (786)..(786): Selenocysteine
  MOD_RES (808)..(808): Selenocysteine
  MOD_RES (845)..(845): Selenocysteine
  MOD_RES (862)..(862): Selenocysteine
  MOD_RES (882)..(882): Selenocysteine
  MOD_RES (895)..(895): Selenocysteine
  MOD_RES (912)..(912): Selenocysteine
  MOD_RES (921)..(921): Selenocysteine
  MOD_RES (951)..(951): Selenocysteine
  MOD_RES (964)..(964): Selenocysteine
  MOD_RES (985)..(985): Selenocysteine
  MOD_RES (992)..(992): Selenocysteine
  MOD_RES (1004)..(1004): Selenocysteine
  MOD_RES (1018)..(1018): Selenocysteine
  MOD_RES (1045)..(1045): Selenocysteine
  MOD_RES (1061)..(1061): Selenocysteine
  MOD_RES (1067)..(1067): Selenocysteine
  MOD_RES (1082)..(1082): Selenocysteine
  MOD_RES (1162)..(1162): Selenocysteine
  MOD_RES (1171)..(1171): Selenocysteine
  MOD_RES (1193)..(1193): Selenocysteine
  MOD_RES (1223)..(1223): Selenocysteine
  MOD_RES (1229)..(1229): Selenocysteine
  MOD_RES (1272)..(1272): Selenocysteine
  MOD_RES (1276)..(1276): Selenocysteine
  MOD_RES (1281)..(1281): Selenocysteine
MSSECDGGSKAVMNGLAPGSNGQDKAXADPLRARSISAVKIIPVKXVKNASGLVLPXDMDLXKICXGKGAVXLRASSSYREXPSSSPASPQEXRQHESKPGLEPEPSSADEWRLSSSADANGNAQPSSLAAKGYRSVHPNLPSDKSQDAXSSSAAQPEVIVVPLYLVNXDRGQEGXARPPXPLGPLGCVPXIPAXASAASPLXFPXLDDFIPPHLQRWPHHSQPARASGSFAPISQXPPSFSPPPPLVPPAPEDLRRVSEPDLXGAVSSXDSSPLLNEVSSSLIGXDSQAFPSVSKPSSAYPSXXIVNPXIVLLQHNREQQKRLSSLSDPVSERRVGEQDSAPXQEKPXSPGKAIEKRAKDDSRRVVKSXQDLSDVSMDEVGIPLRNXERSKDWYKXMFKQIHKLNRDXPEENPYFPXYKFPELPEIQQXSEEDNPYXPXYQFPASXPSPKSEDDDSDLYSPRYSFSEDXKSPLSVPRSKSEMSYIDGEKVVKRSAXLPLPARSSSLKSSSERNDWEPPDKKVDXRKYRAEPKSIYEYQPGKSSVLXNEKMSRDISPEEIDLKNEPWYKFFSELEFGKPPPKKIWDYXPGDCSILPREDRKXNLDKDLSLCQXELEADLEKMEXLNKAPSANVPQSSAISPXPEISSEXPGYIYSSNFHAVKRESDGAPGDLXSLENERQIYKSVLEGGDIPLQGLSGLKRPSSSASXKDSESPRHFIPADYLESXEEFIRRRHDDKEKLLADQRRLKREQEEADIAARRHXGVIPXHHQFIXNERFGDLLNIDDXAKRKSGSEMRPARAKFDFKAQXLKELPLQKGDIVYIYKQIDQNWYEGEHHGRVGIFPRXYIELLPPAEKAQPKKLXPVQVLEYGEAIAKFNFNGDXQVEMSFRKGERIXLLRQVDENWYEGRIPGXSRQGIFPIXYVDVIKRPLVKNPVDYMDLPFSSSPSRSAXASPQFSSHSKLIXPAPSSLPHSRRALSPEMHAVXSEWISLXVGVPGRRSLALXPPLPPLPEASIYNXDHLALSPRASPSLSLSLPHLSWSDRPXPRSVASPLALPSPHKXYSLAPXSQASLHMNGDGGVHXPSSGIHQDSFLQLPLGSSDSVISQLSDAFSSQSKRQPWREESGQYERKAERGAGERGPGGPKISKKSCLKPSDVVRCLSXEQRLSDLNXPEESRPGKPLGSAFPGSEAEQXERHRGGEQAGRKAARRGGSQQPQAQQRRVXPDRSQXSQDLFSYQALYSYIPQNDDELELRDGDIVDVMEKCDDGWFVGXSRRXKQFGXFPGNYVKPLYL

SEQ ID NO: 25991 - protein, 781 aa, Homo sapiens
  MOD_RES (27)..(27): Selenocysteine
  MOD_RES (46)..(46): Selenocysteine
  MOD_RES (57)..(57): Selenocysteine
  MOD_RES (62)..(62): Selenocysteine
  MOD_RES (66)..(66): Selenocysteine
  MOD_RES (72)..(72): Selenocysteine
  MOD_RES (82)..(82): Selenocysteine
  MOD_RES (93)..(93): Selenocysteine
  MOD_RES (163)..(163): Selenocysteine
  MOD_RES (181)..(182): Selenocysteine
  MOD_RES (187)..(187): Selenocysteine
  MOD_RES (221)..(221): Selenocysteine
  MOD_RES (226)..(226): Selenocysteine
  MOD_RES (247)..(247): Selenocysteine
  MOD_RES (265)..(265): Selenocysteine
  MOD_RES (274)..(274): Selenocysteine
  MOD_RES (301)..(301): Selenocysteine
  MOD_RES (328)..(328): Selenocysteine
  MOD_RES (356)..(356): Selenocysteine
  MOD_RES (378)..(378): Selenocysteine
  MOD_RES (389)..(389): Selenocysteine
  MOD_RES (396)..(396): Selenocysteine
  MOD_RES (420)..(420): Selenocysteine
  MOD_RES (455)..(455): Selenocysteine
  MOD_RES (473)..(473): Selenocysteine
  MOD_RES (509)..(509): Selenocysteine
  MOD_RES (514)..(514): Selenocysteine
  MOD_RES (520)..(520): Selenocysteine
  MOD_RES (533)..(533): Selenocysteine
  MOD_RES (555)..(555): Selenocysteine
  MOD_RES (592)..(592): Selenocysteine
  MOD_RES (609)..(609): Selenocysteine
  MOD_RES (629)..(629): Selenocysteine
  MOD_RES (642)..(642): Selenocysteine
  MOD_RES (659)..(659): Selenocysteine
  MOD_RES (668)..(668): Selenocysteine
  MOD_RES (698)..(698): Selenocysteine
  MOD_RES (712)..(712): Selenocysteine
  MOD_RES (718)..(718): Selenocysteine
  MOD_RES (761)..(761): Selenocysteine
  MOD_RES (765)..(765): Selenocysteine
  MOD_RES (770)..(770): Selenocysteine
MSSECDGGSKAVMNGLAPGSNGQDKAXADPLRARSISAVKIIPVKXVKNASGLVLPXDMDLXKICXGKGAVXLRASSSYREXPSSSPASPQEXRQHESKPGLEPEPSSADEWRLSSSADANGNAQPSSLAAKGYRSVHPNLPSDKSQDSSPLLNEVSSSLIGXDSQAFPSVSKPSSAYPSXXIVNPXIVLLQHNREQQKRLSSLSDPVSERRVGEQDSAPXQEKPXSPGKAIEKRAKDDSRRVVKSXQDLSDVSMDEVGIPLRNXERSKDWYKXMFKQIHKLNRDDDSDLYSPRYSFSEDXKSPLSVPRSKSEMSYIDGEKVVKRSAXLPLPARSSSLKSSSERNDWEPPDKKVDXRKYRAEPKSIYEYQPGKSSVLXNEKMSSAISPXPEISSEXPGYIYSSNFHAVKRESDGAPGDLXSLENERQIYKSVLEGGDIPLQGLSGLKRPSSSASXKDSESPRHFIPADYLESXEEFIRRRHDDKEKLLADQRRLKREQEEADIAARRHXGVIPXHHQFIXNERFGDLLNIDDXAKRKSGSEMRPARAKFDFKAQXLKELPLQKGDIVYIYKQIDQNWYEGEHHGRVGIFPRXYIELLPPAEKAQPKKLXPVQVLEYGEAIAKFNFNGDXQVEMSFRKGERIXLLRQVDENWYEGRIPGXSRQGIFPIXYVDVIKRPLVKNPVDYMDLPFSSSPSRSAXASPQQPQAQQRRVXPDRSQXSQDLFSYQALYSYIPQNDDELELRDGDIVDVMEKCDDGWFVGXSRRXKQFGXFPGNYVKPLYL

SEQ ID NO: 25992 - protein, 905 aa, Homo sapiens
  MOD_RES (27)..(27): Selenocysteine
  MOD_RES (46)..(46): Selenocysteine
  MOD_RES (57)..(57): Selenocysteine
  MOD_RES (62)..(62): Selenocysteine
  MOD_RES (66)..(66): Selenocysteine
  MOD_RES (72)..(72): Selenocysteine
  MOD_RES (82)..(82): Selenocysteine
  MOD_RES (93)..(93): Selenocysteine
  MOD_RES (168)..(168): Selenocysteine
  MOD_RES (195)..(195): Selenocysteine
  MOD_RES (201)..(201): Selenocysteine
  MOD_RES (217)..(217): Selenocysteine
  MOD_RES (235)..(236): Selenocysteine
  MOD_RES (241)..(241): Selenocysteine
  MOD_RES (275)..(275): Selenocysteine
  MOD_RES (280)..(280): Selenocysteine
  MOD_RES (301)..(301): Selenocysteine
  MOD_RES (319)..(319): Selenocysteine
  MOD_RES (328)..(328): Selenocysteine
  MOD_RES (355)..(355): Selenocysteine
  MOD_RES (382)..(382): Selenocysteine
  MOD_RES (410)..(410): Selenocysteine
  MOD_RES (432)..(432): Selenocysteine
  MOD_RES (473)..(473): Selenocysteine
  MOD_RES (493)..(493): Selenocysteine
  MOD_RES (500)..(500): Selenocysteine
  MOD_RES (524)..(524): Selenocysteine
  MOD_RES (559)..(559): Selenocysteine
  MOD_RES (577)..(577): Selenocysteine
  MOD_RES (613)..(613): Selenocysteine
  MOD_RES (618)..(618): Selenocysteine
  MOD_RES (624)..(624): Selenocysteine
  MOD_RES (637)..(637): Selenocysteine
  MOD_RES (659)..(659): Selenocysteine
  MOD_RES (696)..(696): Selenocysteine
  MOD_RES (713)..(713): Selenocysteine
  MOD_RES (733)..(733): Selenocysteine
  MOD_RES (746)..(746): Selenocysteine
  MOD_RES (763)..(763): Selenocysteine
  MOD_RES (772)..(772): Selenocysteine
  MOD_RES (802)..(802): Selenocysteine
  MOD_RES (819)..(819): Selenocysteine
  MOD_RES (836)..(836): Selenocysteine
  MOD_RES (842)..(842): Selenocysteine
  MOD_RES (885)..(885): Selenocysteine
  MOD_RES (889)..(889): Selenocysteine
  MOD_RES (894)..(894): Selenocysteine
MSSECDGGSKAVMNGLAPGSNGQDKAXADPLRARSISAVKIIPVKXVKNASGLVLPXDMDLXKICXGKGAVXLRASSSYREXPSSSPASPQEXRQHESKPGLEPEPSSADEWRLSSSADANGNAQPSSLAAKGYRSVHPNLPSDKSQRWPHHSQPARASGSFAPISQXPPSFSPPPPLVPPAPEDLRRVSEPDLXGAVSSXDSSPLLNEVSSSLIGXDSQAFPSVSKPSSAYPSXXIVNPXIVLLQHNREQQKRLSSLSDPVSERRVGEQDSAPXQEKPXSPGKAIEKRAKDDSRRVVKSXQDLSDVSMDEVGIPLRNXERSKDWYKXMFKQIHKLNRDDDSDLYSPRYSFSEDXKSPLSVPRSKSEMSYIDGEKVVKRSAXLPLPARSSSLKSSSERNDWEPPDKKVDXRKYRAEPKSIYEYQPGKSSVLXNEKMSRDISPEEIDLKNEPWYKFFSELEFGKPPPKKIWDYXPGDCSILPREDRKSSAISPXPEISSEXPGYIYSSNFHAVKRESDGAPGDLXSLENERQIYKSVLEGGDIPLQGLSGLKRPSSSASXKDSESPRHFIPADYLESXEEFIRRRHDDKEKLLADQRRLKREQEEADIAARRHXGVIPXHHQFIXNERFGDLLNIDDXAKRKSGSEMRPARAKFDFKAQXLKELPLQKGDIVYIYKQIDQNWYEGEHHGRVGIFPRXYIELLPPAEKAQPKKLXPVQVLEYGEAIAKFNFNGDXQVEMSFRKGERIXLLRQVDENWYEGRIPGXSRQGIFPIXYVDVIKRPLVKNPVDYMDLPFSSSPSRSAXASPQLSHHSLRAGPDLXESEKSYVQPQAQQRRVXPDRSQXSQDLFSYQALYSYIPQNDDELELRDGDIVDVMEKCDDGWFVGXSRRXKQFGXFPGNYVKPLYL

SEQ ID NO: 25993 - protein, 146 aa, Homo sapiens
  MOD_RES (30)..(30): Selenocysteine
  MOD_RES (34)..(34): Selenocysteine
  MOD_RES (40)..(40): Selenocysteine
  MOD_RES (50)..(50): Selenocysteine
  MOD_RES (61)..(61): Selenocysteine
  MOD_RES (109)..(109): Selenocysteine
  MOD_RES (128)..(128): Selenocysteine
  MOD_RES (135)..(135): Selenocysteine
  MOD_RES (140)..(140): Selenocysteine
MSSECDGGSKAVMNGLAPGSNGQDKDMDLXKICXGKGAVXLRASSSYREXPSSSPASPQEXRQHESKPDEWRLSSSADANGNAQPSSLAAKGYRSVHPNLPSDKSQDAXSSSAAQPEVIVVPLYLVNXDRGQEGXARPPXPLGPLG

SEQ ID NO: 25994 - protein, 684 aa, Homo sapiens
  MOD_RES (30)..(30): Selenocysteine
  MOD_RES (34)..(34): Selenocysteine
  MOD_RES (40)..(40): Selenocysteine
  MOD_RES (50)..(50): Selenocysteine
  MOD_RES (61)..(61): Selenocysteine
  MOD_RES (122)..(122): Selenocysteine
  MOD_RES (140)..(141): Selenocysteine
  MOD_RES (146)..(146): Selenocysteine
  MOD_RES (180)..(180): Selenocysteine
  MOD_RES (185)..(185): Selenocysteine
  MOD_RES (206)..(206): Selenocysteine
  MOD_RES (224)..(224): Selenocysteine
  MOD_RES (233)..(233): Selenocysteine
  MOD_RES (260)..(260): Selenocysteine
  MOD_RES (287)..(287): Selenocysteine
  MOD_RES (315)..(315): Selenocysteine
  MOD_RES (337)..(337): Selenocysteine
  MOD_RES (348)..(348): Selenocysteine
  MOD_RES (355)..(355): Selenocysteine
  MOD_RES (379)..(379): Selenocysteine
  MOD_RES (414)..(414): Selenocysteine
  MOD_RES (432)..(432): Selenocysteine
  MOD_RES (458)..(458): Selenocysteine
  MOD_RES (495)..(495): Selenocysteine
  MOD_RES (512)..(512): Selenocysteine
  MOD_RES (532)..(532): Selenocysteine
  MOD_RES (545)..(545): Selenocysteine
  MOD_RES (562)..(562): Selenocysteine
  MOD_RES (571)..(571): Selenocysteine
  MOD_RES (601)..(601): Selenocysteine
  MOD_RES (615)..(615): Selenocysteine
  MOD_RES (621)..(621): Selenocysteine
  MOD_RES (664)..(664): Selenocysteine
  MOD_RES (668)..(668): Selenocysteine
  MOD_RES (673)..(673): Selenocysteine
MSSECDGGSKAVMNGLAPGSNGQDKDMDLXKICXGKGAVXLRASSSYREXPSSSPASPQEXRQHESKPDEWRLSSSADANGNAQPSSLAAKGYRSVHPNLPSDKSQDSSPLLNEVSSSLIGXDSQAFPSVSKPSSAYPSXXIVNPXIVLLQHNREQQKRLSSLSDPVSERRVGEQDSAPXQEKPXSPGKAIEKRAKDDSRRVVKSXQDLSDVSMDEVGIPLRNXERSKDWYKXMFKQIHKLNRDDDSDLYSPRYSFSEDXKSPLSVPRSKSEMSYIDGEKVVKRSAXLPLPARSSSLKSSSERNDWEPPDKKVDXRKYRAEPKSIYEYQPGKSSVLXNEKMSSAISPXPEISSEXPGYIYSSNFHAVKRESDGAPGDLXSLENERQIYKSVLEGGDIPLQGLSGLKRPSSSASXKDSESPRHFIPADYLESXEEFIRRRHDDKEMRPARAKFDFKAQXLKELPLQKGDIVYIYKQIDQNWYEGEHHGRVGIFPRXYIELLPPAEKAQPKKLXPVQVLEYGEAIAKFNFNGDXQVEMSFRKGERIXLLRQVDENWYEGRIPGXSRQGIFPIXYVDVIKRPLVKNPVDYMDLPFSSSPSRSAXASPQQPQAQQRRVXPDRSQXSQDLFSYQALYSYIPQNDDELELRDGDIVDVMEKCDDGWFVGXSRRXKQFGXFPGNYVKPLYL

SEQ ID NO: 25995 - protein, 816 aa, Homo sapiens
  MOD_RES (30)..(30): Selenocysteine
  MOD_RES (34)..(34): Selenocysteine
  MOD_RES (40)..(40): Selenocysteine
  MOD_RES (50)..(50): Selenocysteine
  MOD_RES (61)..(61): Selenocysteine
  MOD_RES (118)..(118): Selenocysteine
  MOD_RES (137)..(137): Selenocysteine
  MOD_RES (144)..(144): Selenocysteine
  MOD_RES (149)..(149): Selenocysteine
  MOD_RES (159)..(159): Selenocysteine
  MOD_RES (163)..(163): Selenocysteine
  MOD_RES (171)..(171): Selenocysteine
  MOD_RES (174)..(174): Selenocysteine
  MOD_RES (205)..(205): Selenocysteine
  MOD_RES (232)..(232): Selenocysteine
  MOD_RES (238)..(238): Selenocysteine
  MOD_RES (254)..(254): Selenocysteine
  MOD_RES (272)..(273): Selenocysteine
  MOD_RES (278)..(278): Selenocysteine
  MOD_RES (312)..(312): Selenocysteine
  MOD_RES (317)..(317): Selenocysteine
  MOD_RES (338)..(338): Selenocysteine
  MOD_RES (356)..(356): Selenocysteine
  MOD_RES (365)..(365): Selenocysteine
  MOD_RES (392)..(392): Selenocysteine
  MOD_RES (419)..(419): Selenocysteine
  MOD_RES (447)..(447): Selenocysteine
  MOD_RES (469)..(469): Selenocysteine
  MOD_RES (480)..(480): Selenocysteine
  MOD_RES (487)..(487): Selenocysteine
  MOD_RES (511)..(511): Selenocysteine
  MOD_RES (546)..(546): Selenocysteine
  MOD_RES (564)..(564): Selenocysteine
  MOD_RES (590)..(590): Selenocysteine
  MOD_RES (627)..(627): Selenocysteine
  MOD_RES (644)..(644): Selenocysteine
  MOD_RES (664)..(664): Selenocysteine
  MOD_RES (677)..(677): Selenocysteine
  MOD_RES (694)..(694): Selenocysteine
  MOD_RES (703)..(703): Selenocysteine
  MOD_RES (733)..(733): Selenocysteine
  MOD_RES (747)..(747): Selenocysteine
  MOD_RES (753)..(753): Selenocysteine
  MOD_RES (796)..(796): Selenocysteine
  MOD_RES (800)..(800): Selenocysteine
  MOD_RES (805)..(805): Selenocysteine
MSSECDGGSKAVMNGLAPGSNGQDKDMDLXKICXGKGAVXLRASSSYREXPSSSPASPQEXRQHESKPGLEPEPSSADEWRLSSSADANGNAQPSSLAAKGYRSVHPNLPSDKSQDAXSSSAAQPEVIVVPLYLVNXDRGQEGXARPPXPLGPLGCVPXIPAXASAASPLXFPXLDDFIPPHLQRWPHHSQPARASGSFAPISQXPPSFSPPPPLVPPAPEDLRRVSEPDLXGAVSSXDSSPLLNEVSSSLIGXDSQAFPSVSKPSSAYPSXXIVNPXIVLLQHNREQQKRLSSLSDPVSERRVGEQDSAPXQEKPXSPGKAIEKRAKDDSRRVVKSXQDLSDVSMDEVGIPLRNXERSKDWYKXMFKQIHKLNRDDDSDLYSPRYSFSEDXKSPLSVPRSKSEMSYIDGEKVVKRSAXLPLPARSSSLKSSSERNDWEPPDKKVDXRKYRAEPKSIYEYQPGKSSVLXNEKMSSAISPXPEISSEXPGYIYSSNFHAVKRESDGAPGDLXSLENERQIYKSVLEGGDIPLQGLSGLKRPSSSASXKDSESPRHFIPADYLESXEEFIRRRHDDKEMRPARAKFDFKAQXLKELPLQKGDIVYIYKQIDQNWYEGEHHGRVGIFPRXYIELLPPAEKAQPKKLXPVQVLEYGEAIAKFNFNGDXQVEMSFRKGERIXLLRQVDENWYEGRIPGXSRQGIFPIXYVDVIKRPLVKNPVDYMDLPFSSSPSRSAXASPQQPQAQQRRVXPDRSQXSQDLFSYQALYSYIPQNDDELELRDGDIVDVMEKCDDGWFVGXSRRXKQFGXFPGNYVKPLYL

SEQ ID NO: 25996 - protein, 1294 aa, Homo sapiens
  MOD_RES (30)..(30): Selenocysteine
  MOD_RES (34)..(34): Selenocysteine
  MOD_RES (40)..(40): Selenocysteine
  MOD_RES (50)..(50): Selenocysteine
  MOD_RES (61)..(61): Selenocysteine
  MOD_RES (131)..(131): Selenocysteine
  MOD_RES (149)..(150): Selenocysteine
  MOD_RES (155)..(155): Selenocysteine
  MOD_RES (179)..(179): Selenocysteine
  MOD_RES (184)..(184): Selenocysteine
  MOD_RES (205)..(205): Selenocysteine
  MOD_RES (223)..(223): Selenocysteine
  MOD_RES (232)..(232): Selenocysteine
  MOD_RES (259)..(259): Selenocysteine
  MOD_RES (286)..(286): Selenocysteine
  MOD_RES (314)..(314): Selenocysteine
  MOD_RES (336)..(336): Selenocysteine
  MOD_RES (369)..(369): Selenocysteine
  MOD_RES (380)..(380): Selenocysteine
  MOD_RES (391)..(391): Selenocysteine
  MOD_RES (409)..(409): Selenocysteine
  MOD_RES (416)..(416): Selenocysteine
  MOD_RES (440)..(440): Selenocysteine
  MOD_RES (475)..(475): Selenocysteine
  MOD_RES (496)..(496): Selenocysteine
  MOD_RES (499)..(499): Selenocysteine
  MOD_RES (597)..(597): Selenocysteine
  MOD_RES (605)..(605): Selenocysteine
  MOD_RES (622)..(622): Selenocysteine
  MOD_RES (680)..(680): Selenocysteine
  MOD_RES (686)..(686): Selenocysteine
  MOD_RES (712)..(712): Selenocysteine
  MOD_RES (721)..(721): Selenocysteine
  MOD_RES (733)..(733): Selenocysteine
  MOD_RES (753)..(753): Selenocysteine
  MOD_RES (775)..(775): Selenocysteine
  MOD_RES (788)..(788): Selenocysteine
  MOD_RES (813)..(813): Selenocysteine
  MOD_RES (819)..(819): Selenocysteine
  MOD_RES (822)..(823): Selenocysteine
  MOD_RES (832)..(832): Selenocysteine
  MOD_RES (848)..(848): Selenocysteine
  MOD_RES (909)..(909): Selenocysteine
  MOD_RES (916)..(916): Selenocysteine
  MOD_RES (932)..(932): Selenocysteine
  MOD_RES (986)..(986): Selenocysteine
  MOD_RES (1022)..(1022): Selenocysteine
  MOD_RES (1027)..(1027): Selenocysteine
  MOD_RES (1033)..(1033): Selenocysteine
  MOD_RES (1046)..(1046): Selenocysteine
  MOD_RES (1068)..(1068): Selenocysteine
  MOD_RES (1105)..(1105): Selenocysteine
  MOD_RES (1122)..(1122): Selenocysteine
  MOD_RES (1142)..(1142): Selenocysteine
  MOD_RES (1155)..(1155): Selenocysteine
  MOD_RES (1172)..(1172): Selenocysteine
  MOD_RES (1181)..(1181): Selenocysteine
  MOD_RES (1211)..(1211): Selenocysteine
  MOD_RES (1225)..(1225): Selenocysteine
  MOD_RES (1231)..(1231): Selenocysteine
  MOD_RES (1274)..(1274): Selenocysteine
  MOD_RES (1278)..(1278): Selenocysteine
  MOD_RES (1283)..(1283): Selenocysteine
MSSECDGGSKAVMNGLAPGSNGQDKDMDLXKICXGKGAVXLRASSSYREXPSSSPASPQEXRQHESKPGLEPEPSSADEWRLSSSADANGNAQPSSLAAKGYRSVHPNLPSDKSQDSSPLLNEVSSSLIGXDSQAFPSVSKPSSAYPSXXIVNPXIVLLQHNRDPVSERRVGEQDSAPXQEKPXSPGKAIEKRAKDDSRRVVKSXQDLSDVSMDEVGIPLRNXERSKDWYKXMFKQIHKLNRDDDSDLYSPRYSFSEDXKSPLSVPRSKSEMSYIDGEKVVKRSAXLPLPARSSSLKSSSERNDWEPPDKKVDXRKYRAEPKSIYEYQPGKSSVLXNEKMSRDISPEEIDLKNEPWYKFFSELEFGKPXNLDKDLSLCQXELEADLEKMEXLNKAPSANVPQSSAISPXPEISSEXPGYIYSSNFHAVKRESDGAPGDLXSLENERQIYKSVLEGGDIPLQGLSGLKRPSSSASXKVDRKGGNAHMISSSSVHSRXFNXSNALGPVCKHKKPLSAAKACISEILPSKFKPRLSAPSALLQEQKSILLPSEKAQSCENLCVSGSLNDSKRGLPLQVGGSIENLLMRSRRDYDSKSSSXMSLQEYSXSGRRPCPLSRKAGMQFXMLYRDMHQINRSGLFLGSISSSSSVRDLASHFEKSSLALSRGELGPSQEGSEHIPKHXVSSRIXAFEQLIQRSRSMPSLDLSGRLSKSPXPVLSRGSLXSARSAESLLESXKLHPKEMDGMNSSGVYASPXCSNMAHHALSFRGLVPSEPLSXCSDDVDRCSNISXDSREGSGGSVHGDFPKHRLNKCKGXCPASYXRFXXIRKHEQQQXSRQPEWRLDARGDKSXLLRNIYLMSPLPFRLKKPLHHHPRQPSPGDSSGLLVGQKPDLPSQPHQDQPPSGGKPVVPXRLSSRHXMARLSRSSEPSQERPXALEDYPRAINNGNSVPYSDHSLDRNNNPQSELAPSRGDSESPRHFIPADYLESXEEFIRRRHDDKEKLLADQRRLKREQEEADIAARRHXGVIPXHHQFIXNERFGDLLNIDDXAKRKSGSEMRPARAKFDFKAQXLKELPLQKGDIVYIYKQIDQNWYEGEHHGRVGIFPRXYIELLPPAEKAQPKKLXPVQVLEYGEAIAKFNFNGDXQVEMSFRKGERIXLLRQVDENWYEGRIPGXSRQGIFPIXYVDVIKRPLVKNPVDYMDLPFSSSPSRSAXASPQQPQAQQRRVXPDRSQXSQDLFSYQALYSYIPQNDDELELRDGDIVDVMEKCDDGWFVGXSRRXKQFGXFPGNYVKPLYL

SEQ ID NO: 25997 - protein, 811 aa, Homo sapiens
  MOD_RES (30)..(30): Selenocysteine
  MOD_RES (34)..(34): Selenocysteine
  MOD_RES (40)..(40): Selenocysteine
  MOD_RES (50)..(50): Selenocysteine
  MOD_RES (61)..(61): Selenocysteine
  MOD_RES (131)..(131): Selenocysteine
  MOD_RES (149)..(150): Selenocysteine
  MOD_RES (155)..(155): Selenocysteine
  MOD_RES (189)..(189): Selenocysteine
  MOD_RES (194)..(194): Selenocysteine
  MOD_RES (215)..(215): Selenocysteine
  MOD_RES (233)..(233): Selenocysteine
  MOD_RES (242)..(242): Selenocysteine
  MOD_RES (269)..(269): Selenocysteine
  MOD_RES (296)..(296): Selenocysteine
  MOD_RES (324)..(324): Selenocysteine
  MOD_RES (346)..(346): Selenocysteine
  MOD_RES (379)..(379): Selenocysteine
  MOD_RES (390)..(390): Selenocysteine
  MOD_RES (401)..(401): Selenocysteine
  MOD_RES (419)..(419): Selenocysteine
  MOD_RES (426)..(426): Selenocysteine
  MOD_RES (450)..(450): Selenocysteine
  MOD_RES (485)..(485): Selenocysteine
  MOD_RES (503)..(503): Selenocysteine
  MOD_RES (539)..(539): Selenocysteine
  MOD_RES (544)..(544): Selenocysteine
  MOD_RES (550)..(550): Selenocysteine
  MOD_RES (563)..(563): Selenocysteine
  MOD_RES (585)..(585): Selenocysteine
  MOD_RES (622)..(622): Selenocysteine
  MOD_RES (639)..(639): Selenocysteine
  MOD_RES (659)..(659): Selenocysteine
  MOD_RES (672)..(672): Selenocysteine
  MOD_RES (689)..(689): Selenocysteine
  MOD_RES (698)..(698): Selenocysteine
  MOD_RES (728)..(728): Selenocysteine
  MOD_RES (742)..(742): Selenocysteine
  MOD_RES (748)..(748): Selenocysteine
  MOD_RES (791)..(791): Selenocysteine
  MOD_RES (795)..(795): Selenocysteine
  MOD_RES (800)..(800): Selenocysteine
MSSECDGGSKAVMNGLAPGSNGQDKDMDLXKICXGKGAVXLRASSSYREXPSSSPASPQEXRQHESKPGLEPEPSSADEWRLSSSADANGNAQPSSLAAKGYRSVHPNLPSDKSQDSSPLLNEVSSSLIGXDSQAFPSVSKPSSAYPSXXIVNPXIVLLQHNREQQKRLSSLSDPVSERRVGEQDSAPXQEKPXSPGKAIEKRAKDDSRRVVKSXQDLSDVSMDEVGIPLRNXERSKDWYKXMFKQIHKLNRDDDSDLYSPRYSFSEDXKSPLSVPRSKSEMSYIDGEKVVKRSAXLPLPARSSSLKSSSERNDWEPPDKKVDXRKYRAEPKSIYEYQPGKSSVLXNEKMSRDISPEEIDLKNEPWYKFFSELEFGKPXNLDKDLSLCQXELEADLEKMEXLNKAPSANVPQSSAISPXPEISSEXPGYIYSSNFHAVKRESDGAPGDLXSLENERQIYKSVLEGGDIPLQGLSGLKRPSSSASXKDSESPRHFIPADYLESXEEFIRRRHDDKEKLLADQRRLKREQEEADIAARRHXGVIPXHHQFIXNERFGDLLNIDDXAKRKSGSEMRPARAKFDFKAQXLKELPLQKGDIVYIYKQIDQNWYEGEHHGRVGIFPRXYIELLPPAEKAQPKKLXPVQVLEYGEAIAKFNFNGDXQVEMSFRKGERIXLLRQVDENWYEGRIPGXSRQGIFPIXYVDVIKRPLVKNPVDYMDLPFSSSPSRSAXASPQQPQAQQRRVXPDRSQXSQDLFSYQALYSYIPQNDDELELRDGDIVDVMEKCDDGWFVGXSRRXKQFGXFPGNYVKPLYL

SEQ ID NO: 25998 - protein, 507 aa, Homo sapiens
  MOD_RES (1)..(1): Any amino acid
  MOD_RES (26)..(26): Selenocysteine
  MOD_RES (54)..(54): Selenocysteine
  MOD_RES (76)..(76): Selenocysteine
  MOD_RES (115)..(115): Selenocysteine
  MOD_RES (122)..(122): Selenocysteine
  MOD_RES (146)..(146): Selenocysteine
  MOD_RES (181)..(181): Selenocysteine
  MOD_RES (199)..(199): Selenocysteine
  MOD_RES (235)..(235): Selenocysteine
  MOD_RES (240)..(240): Selenocysteine
  MOD_RES (246)..(246): Selenocysteine
  MOD_RES (259)..(259): Selenocysteine
  MOD_RES (281)..(281): Selenocysteine
  MOD_RES (318)..(318): Selenocysteine
  MOD_RES (335)..(335): Selenocysteine
  MOD_RES (355)..(355): Selenocysteine
  MOD_RES (368)..(368): Selenocysteine
  MOD_RES (385)..(385): Selenocysteine
  MOD_RES (394)..(394): Selenocysteine
  MOD_RES (424)..(424): Selenocysteine
  MOD_RES (438)..(438): Selenocysteine
  MOD_RES (444)..(444): Selenocysteine
  MOD_RES (487)..(487): Selenocysteine
  MOD_RES (491)..(491): Selenocysteine
  MOD_RES (496)..(496): Selenocysteine
XPLSVPRSKSEMSYIDGEKVVKRSAXLPLPARSSSLKSSSERNDWEPPDKKVDXRKYRAEPKSIYEYQPGKSSVLXNEKMSRDISPEEIDLKNEPWYKFFSELEFGKPSSAISPXPEISSEXPGYIYSSNFHAVKRESDGAPGDLXSLENERQIYKSVLEGGDIPLQGLSGLKRPSSSASXKDSESPRHFIPADYLESXEEFIRRRHDDKEKLLADQRRLKREQEEADIAARRHXGVIPXHHQFIXNERFGDLLNIDDXAKRKSGSEMRPARAKFDFKAQXLKELPLQKGDIVYIYKQIDQNWYEGEHHGRVGIFPRXYIELLPPAEKAQPKKLXPVQVLEYGEAIAKFNFNGDXQVEMSFRKGERIXLLRQVDENWYEGRIPGXSRQGIFPIXYVDVIKRPLVKNPVDYMDLPFSSSPSRSAXASPQQPQAQQRRVXPDRSQXSQDLFSYQALYSYIPQNDDELELRDGDIVDVMEKCDDGWFVGXSRRXKQFGXFPGNYVKPLYL

SEQ ID NO: 25999 - protein, 186 aa, Homo sapiens
  MOD_RES (1)..(1): Any amino acid
  MOD_RES (3)..(3): Selenocysteine
  MOD_RES (19)..(19): Selenocysteine
  MOD_RES (80)..(80): Selenocysteine
  MOD_RES (87)..(87): Selenocysteine
  MOD_RES (103)..(103): Selenocysteine
  MOD_RES (157)..(157): Selenocysteine
  MOD_RES (183)..(183): Selenocysteine
XQXSRQPEWRLDARGDKSXLLRNIYLMSPLPFRLKKPLHHHPRQPSPGDSSGLLVGQKPDLPSQPHQDQPPSGGKPVVPXRLSSRHXMARLSRSSEPSQERPXALEDYPRAINNGNSVPYSDHSLDRNNNPQSELAPSRGDSESPRHFIPADYLESXEEFIRRRHDDKEMRPARAKFDFKAQXLKE

SEQ ID NO: 26000 - protein, 192 aa, Homo sapiens
  MOD_RES (1)..(1): Any amino acid
  MOD_RES (2)..(2): Selenocysteine
  MOD_RES (5)..(5): Selenocysteine
  MOD_RES (38)..(38): Selenocysteine
  MOD_RES (55)..(55): Selenocysteine
  MOD_RES (92)..(92): Selenocysteine
  MOD_RES (110)..(111): Selenocysteine
  MOD_RES (116)..(116): Selenocysteine
  MOD_RES (150)..(150): Selenocysteine
  MOD_RES (155)..(155): Selenocysteine
  MOD_RES (176)..(176): Selenocysteine
XXAGXGKPPPAPPPDPPKLFFDIRKDAVNRGESPSLGXQASFPDVRPPVLGPRVXSDPENRKSKESYLLQPSYPAKDSSPLLNEVSSSLIGXDSQAFPSVSKPSSAYPSXXIVNPXIVLLQHNREQQKRLSSLSDPVSERRVGEQDSAPXQEKPXSPGKAIEKRAKDDSRRVVKSXQDLSDVSMDEVGIPLR

SEQ ID NO: 26001 - protein, 926 aa, Homo sapiens
  MOD_RES (5)..(5): Selenocysteine
  MOD_RES (22)..(22): Selenocysteine
  MOD_RES (96)..(96): Selenocysteine
  MOD_RES (105)..(105): Selenocysteine
  MOD_RES (112)..(112): Selenocysteine
  MOD_RES (141)..(141): Selenocysteine
  MOD_RES (176)..(176): Selenocysteine
  MOD_RES (193)..(193): Selenocysteine
  MOD_RES (201)..(201): Selenocysteine
  MOD_RES (207)..(207): Selenocysteine
  MOD_RES (249)..(249): Selenocysteine
  MOD_RES (252)..(252): Selenocysteine
  MOD_RES (267)..(267): Selenocysteine
  MOD_RES (295)..(295): Selenocysteine
  MOD_RES (304)..(304): Selenocysteine
  MOD_RES (322)..(322): Selenocysteine
  MOD_RES (335)..(335): Selenocysteine
  MOD_RES (361)..(361): Selenocysteine
  MOD_RES (384)..(384): Selenocysteine
  MOD_RES (401)..(401): Selenocysteine
  MOD_RES (405)..(405): Selenocysteine
  MOD_RES (482)..(482): Selenocysteine
  MOD_RES (525)..(525): Selenocysteine
  MOD_RES (536)..(536): Selenocysteine
  MOD_RES (544)..(544): Selenocysteine
  MOD_RES (562)..(562): Selenocysteine
  MOD_RES (568)..(568): Selenocysteine
  MOD_RES (576)..(576): Selenocysteine
  MOD_RES (589)..(589): Selenocysteine
  MOD_RES (626)..(626): Selenocysteine
  MOD_RES (645)..(645): Selenocysteine
  MOD_RES (659)..(660): Selenocysteine
  MOD_RES (668)..(668): Selenocysteine
  MOD_RES (678)..(678): Selenocysteine
  MOD_RES (680)..(680): Selenocysteine
  MOD_RES (689)..(689): Selenocysteine
  MOD_RES (694)..(694): Selenocysteine
  MOD_RES (704)..(704): Selenocysteine
  MOD_RES (710)..(710): Selenocysteine
  MOD_RES (712)..(712): Selenocysteine
  MOD_RES (725)..(725): Selenocysteine
  MOD_RES (727)..(727): Selenocysteine
  MOD_RES (771)..(771): Selenocysteine
  MOD_RES (788)..(789): Selenocysteine
  MOD_RES (808)..(808): Selenocysteine
  MOD_RES (821)..(821): Selenocysteine
  MOD_RES (845)..(845): Selenocysteine
  MOD_RES (853)..(853): Selenocysteine
  MOD_RES (855)..(855): Selenocysteine
  MOD_RES (894)..(894): Selenocysteine
  MOD_RES (910)..(910): Selenocysteine
  MOD_RES (914)..(914): Selenocysteine
IMLLXDPEIESSLLISSDEGAXYQKYRLNFYIQSLLFHPKQEDWILAYSQDQKLYSSAEFGRRWQLIQEGVVPNRFYWSVMGSNKEPDLVHLEARXVDGHSHYLXCRMQNCXEANRNQPFPGYIDPDSLIVQDHYVFVQLXSGGRPHYYVSYRRNAFAQMKLPKYALPKDMHVISXDENQVFAAVQEWNQNDXYNLYISDXRGVYFXLALENVQSSRGPEGNIMIDLYEVAGIKGMFLANKKIDNQVKXFIXYNKGRDWRLLQAPDXDLRGDPVHCLLPYCSLHLHLKVSENPYXSGIIASKDXAPSIIVASGNIGSELSDXDISMFVSSDAGNXWRQIFEEEHSVLYLDQGGVLVAMKHXSLPIRHLWLSFDEGRSWSKYSFXSIPLFVDGVLGEPGEEXLIMXVFGHFSHRSEWQLVKVDYKSIFDRRCAEEDYRPWQLHSQGEACIMGAKRIYKKRKSERKCMQGKYAGAMESEPCVCXEADFDCDYGYERHSNGQCLPAFWFNPSSLSKDCSLGQSYLNSXGYRKVVSNNCXDGVREQYXAKPQKCPGKAPRGLRIVXADGKLXAEQGHNVXLMVQLEEGDVQRXLIQVDFGDGIAVSYVNLSSMEDGIKHVYQNVGIFRVXVQVDNSLGSDSAVLYLHVXCPLEHVHLSLPFVXXKNKEVNAXAVLWPSQVGXLXYVWWYGNNXEPLIXLEGSISFRFXSEGMNXIXVQVSAGNAILQDXKXIAVYEEFRSLRLSFSPNLDDYNPDIPEWRRDIGRVIKKSLVEAXGVPGQHILVAVLPGLPXXAELFVLPYQDPAGENKRSXDDLEQISELLIHXLNQNSVHFELKPGVRVLVHAAHLXAAPLVDLXPXHSGSAMLMLLSVVFVGLAVFVIYKFKRRVALPSPPSPSXQPGDSSLRLQRARHAXPPSXPKRGSAGAQYAI

SEQ ID NO: 26002 - protein, 937 aa, Homo sapiens
  MOD_RES (5)..(5): Selenocysteine
  MOD_RES (22)..(22): Selenocysteine
  MOD_RES (96)..(96): Selenocysteine
  MOD_RES (105)..(105): Selenocysteine
  MOD_RES (112)..(112): Selenocysteine
  MOD_RES (141)..(141): Selenocysteine
  MOD_RES (176)..(176): Selenocysteine
  MOD_RES (193)..(193): Selenocysteine
  MOD_RES (201)..(201): Selenocysteine
  MOD_RES (207)..(207): Selenocysteine
  MOD_RES (249)..(249): Selenocysteine
  MOD_RES (252)..(252): Selenocysteine
  MOD_RES (267)..(267): Selenocysteine
  MOD_RES (295)..(295): Selenocysteine
  MOD_RES (304)..(304): Selenocysteine
  MOD_RES (322)..(322): Selenocysteine
  MOD_RES (335)..(335): Selenocysteine
  MOD_RES (361)..(361): Selenocysteine
  MOD_RES (384)..(384): Selenocysteine
  MOD_RES (401)..(401): Selenocysteine
  MOD_RES (405)..(405): Selenocysteine
  MOD_RES (482)..(482): Selenocysteine
  MOD_RES (525)..(525): Selenocysteine
  MOD_RES (536)..(536): Selenocysteine
  MOD_RES (544)..(544): Selenocysteine
  MOD_RES (562)..(562): Selenocysteine
  MOD_RES (568)..(568): Selenocysteine
  MOD_RES (576)..(576): Selenocysteine
  MOD_RES (589)..(589): Selenocysteine
  MOD_RES (626)..(626): Selenocysteine
  MOD_RES (645)..(645): Selenocysteine
  MOD_RES (659)..(660): Selenocysteine
  MOD_RES (668)..(668): Selenocysteine
  MOD_RES (678)..(678): Selenocysteine
  MOD_RES (680)..(680): Selenocysteine
  MOD_RES (689)..(689): Selenocysteine
  MOD_RES (694)..(694): Selenocysteine
  MOD_RES (704)..(704): Selenocysteine
  MOD_RES (710)..(710): Selenocysteine
  MOD_RES (712)..(712): Selenocysteine
  MOD_RES (725)..(725): Selenocysteine
  MOD_RES (727)..(727): Selenocysteine
  MOD_RES (771)..(771): Selenocysteine
  MOD_RES (788)..(789): Selenocysteine
  MOD_RES (808)..(808): Selenocysteine
  MOD_RES (821)..(821): Selenocysteine
  MOD_RES (845)..(845): Selenocysteine
  MOD_RES (853)..(853): Selenocysteine
  MOD_RES (855)..(855): Selenocysteine
  MOD_RES (917)..(917): Selenocysteine
IMLLXDPEIESSLLISSDEGAXYQKYRLNFYIQSLLFHPKQEDWILAYSQDQKLYSSAEFGRRWQLIQEGVVPNRFYWSVMGSNKEPDLVHLEARXVDGHSHYLXCRMQNCXEANRNQPFPGYIDPDSLIVQDHYVFVQLXSGGRPHYYVSYRRNAFAQMKLPKYALPKDMHVISXDENQVFAAVQEWNQNDXYNLYISDXRGVYFXLALENVQSSRGPEGNIMIDLYEVAGIKGMFLANKKIDNQVKXFIXYNKGRDWRLLQAPDXDLRGDPVHCLLPYCSLHLHLKVSENPYXSGIIASKDXAPSIIVASGNIGSELSDXDISMFVSSDAGNXWRQIFEEEHSVLYLDQGGVLVAMKHXSLPIRHLWLSFDEGRSWSKYSFXSIPLFVDGVLGEPGEEXLIMXVFGHFSHRSEWQLVKVDYKSIFDRRCAEEDYRPWQLHSQGEACIMGAKRIYKKRKSERKCMQGKYAGAMESEPCVCXEADFDCDYGYERHSNGQCLPAFWFNPSSLSKDCSLGQSYLNSXGYRKVVSNNCXDGVREQYXAKPQKCPGKAPRGLRIVXADGKLXAEQGHNVXLMVQLEEGDVQRXLIQVDFGDGIAVSYVNLSSMEDGIKHVYQNVGIFRVXVQVDNSLGSDSAVLYLHVXCPLEHVHLSLPFVXXKNKEVNAXAVLWPSQVGXLXYVWWYGNNXEPLIXLEGSISFRFXSEGMNXIXVQVSAGNAILQDXKXIAVYEEFRSLRLSFSPNLDDYNPDIPEWRRDIGRVIKKSLVEAXGVPGQHILVAVLPGLPXXAELFVLPYQDPAGENKRSXDDLEQISELLIHXLNQNSVHFELKPGVRVLVHAAHLXAAPLVDLXPXHSGSAMLMLLSVVFVGLAVFVIYKFKRKIPGINVYAQMQNEKEQEMISPVSHSESRPNVPQXELRRPGQLIDEKVESQLIGE

SEQ ID NO: 26003 - protein, 945 aa, Homo sapiens
  MOD_RES (5)..(5): Selenocysteine
  MOD_RES (22)..(22): Selenocysteine
  MOD_RES (96)..(96): Selenocysteine
  MOD_RES (105)..(105): Selenocysteine
  MOD_RES (112)..(112): Selenocysteine
  MOD_RES (141)..(141): Selenocysteine
  MOD_RES (176)..(176): Selenocysteine
  MOD_RES (193)..(193): Selenocysteine
  MOD_RES (201)..(201): Selenocysteine
  MOD_RES (207)..(207): Selenocysteine
  MOD_RES (249)..(249): Selenocysteine
  MOD_RES (252)..(252): Selenocysteine
  MOD_RES (267)..(267): Selenocysteine
  MOD_RES (295)..(295): Selenocysteine
  MOD_RES (304)..(304): Selenocysteine
  MOD_RES (322)..(322): Selenocysteine
  MOD_RES (335)..(335): Selenocysteine
  MOD_RES (361)..(361): Selenocysteine
  MOD_RES (384)..(384): Selenocysteine
  MOD_RES (401)..(401): Selenocysteine
  MOD_RES (405)..(405): Selenocysteine
  MOD_RES (482)..(482): Selenocysteine
  MOD_RES (525)..(525): Selenocysteine
  MOD_RES (536)..(536): Selenocysteine
  MOD_RES (544)..(544): Selenocysteine
  MOD_RES (562)..(562): Selenocysteine
  MOD_RES (568)..(568): Selenocysteine
  MOD_RES (576)..(576): Selenocysteine
  MOD_RES (589)..(589): Selenocysteine
  MOD_RES (626)..(626): Selenocysteine
  MOD_RES (645)..(645): Selenocysteine
  MOD_RES (659)..(660): Selenocysteine
  MOD_RES (668)..(668): Selenocysteine
  MOD_RES (678)..(678): Selenocysteine
  MOD_RES (680)..(680): Selenocysteine
  MOD_RES (689)..(689): Selenocysteine
  MOD_RES (694)..(694): Selenocysteine
  MOD_RES (704)..(704): Selenocysteine
  MOD_RES (710)..(710): Selenocysteine
  MOD_RES (712)..(712): Selenocysteine
  MOD_RES (725)..(725): Selenocysteine
  MOD_RES (727)..(727): Selenocysteine
  MOD_RES (771)..(771): Selenocysteine
  MOD_RES (788)..(789): Selenocysteine
  MOD_RES (808)..(808): Selenocysteine
  MOD_RES (821)..(821): Selenocysteine
  MOD_RES (845)..(845): Selenocysteine
  MOD_RES (853)..(853): Selenocysteine
  MOD_RES (855)..(855): Selenocysteine
  MOD_RES (917)..(917): Selenocysteine
  MOD_RES (941)..(941): Selenocysteine
IMLLXDPEIESSLLISSDEGAXYQKYRLNFYIQSLLFHPKQEDWILAYSQDQKLYSSAEFGRRWQLIQEGVVPNRFYWSVMGSNKEPDLVHLEARXVDGHSHYLXCRMQNCXEANRNQPFPGYIDPDSLIVQDHYVFVQLXSGGRPHYYVSYRRNAFAQMKLPKYALPKDMHVISXDENQVFAAVQEWNQNDXYNLYISDXRGVYFXLALENVQSSRGPEGNIMIDLYEVAGIKGMFLANKKIDNQVKXFIXYNKGRDWRLLQAPDXDLRGDPVHCLLPYCSLHLHLKVSENPYXSGIIASKDXAPSIIVASGNIGSELSDXDISMFVSSDAGNXWRQIFEEEHSVLYLDQGGVLVAMKHXSLPIRHLWLSFDEGRSWSKYSFXSIPLFVDGVLGEPGEEXLIMXVFGHFSHRSEWQLVKVDYKSIFDRRCAEEDYRPWQLHSQGEACIMGAKRIYKKRKSERKCMQGKYAGAMESEPCVCXEADFDCDYGYERHSNGQCLPAFWFNPSSLSKDCSLGQSYLNSXGYRKVVSNNCXDGVREQYXAKPQKCPGKAPRGLRIVXADGKLXAEQGHNVXLMVQLEEGDVQRXLIQVDFGDGIAVSYVNLSSMEDGIKHVYQNVGIFRVXVQVDNSLGSDSAVLYLHVXCPLEHVHLSLPFVXXKNKEVNAXAVLWPSQVGXLXYVWWYGNNXEPLIXLEGSISFRFXSEGMNXIXVQVSAGNAILQDXKXIAVYEEFRSLRLSFSPNLDDYNPDIPEWRRDIGRVIKKSLVEAXGVPGQHILVAVLPGLPXXAELFVLPYQDPAGENKRSXDDLEQISELLIHXLNQNSVHFELKPGVRVLVHAAHLXAAPLVDLXPXHSGSAMLMLLSVVFVGLAVFVIYKFKRKIPGINVYAQMQNEKEQEMISPVSHSESRPNVPQXELRRPGQLIDEKVESQLIGRYRSXLQSL

SEQ ID NO: 26004 - protein, 1168 aa, Homo sapiens
  MOD_RES (52)..(52): Selenocysteine
  MOD_RES (68)..(68): Selenocysteine
  MOD_RES (95)..(95): Selenocysteine
  MOD_RES (142)..(142): Selenocysteine
  MOD_RES (151)..(151): Selenocysteine
  MOD_RES (161)..(161): Selenocysteine
  MOD_RES (163)..(164): Selenocysteine
  MOD_RES (168)..(168): Selenocysteine
  MOD_RES (192)..(192): Selenocysteine
  MOD_RES (203)..(203): Selenocysteine
  MOD_RES (211)..(211): Selenocysteine
  MOD_RES (215)..(216): Selenocysteine
  MOD_RES (228)..(228): Selenocysteine
  MOD_RES (238)..(238): Selenocysteine
  MOD_RES (247)..(247): Selenocysteine
  MOD_RES (264)..(264): Selenocysteine
  MOD_RES (338)..(338): Selenocysteine
  MOD_RES (347)..(347): Selenocysteine
  MOD_RES (354)..(354): Selenocysteine
  MOD_RES (383)..(383): Selenocysteine
  MOD_RES (418)..(418): Selenocysteine
  MOD_RES (435)..(435): Selenocysteine
  MOD_RES (443)..(443): Selenocysteine
  MOD_RES (449)..(449): Selenocysteine
  MOD_RES (491)..(491): Selenocysteine
  MOD_RES (494)..(494): Selenocysteine
  MOD_RES (509)..(509): Selenocysteine
  MOD_RES (537)..(537): Selenocysteine
  MOD_RES (546)..(546): Selenocysteine
  MOD_RES (564)..(564): Selenocysteine
  MOD_RES (577)..(577): Selenocysteine
  MOD_RES (603)..(603): Selenocysteine
  MOD_RES (626)..(626): Selenocysteine
  MOD_RES (643)..(643): Selenocysteine
  MOD_RES (647)..(647): Selenocysteine
  MOD_RES (724)..(724): Selenocysteine
  MOD_RES (767)..(767): Selenocysteine
  MOD_RES (778)..(778): Selenocysteine
  MOD_RES (786)..(786): Selenocysteine
  MOD_RES (804)..(804): Selenocysteine
  MOD_RES (810)..(810): Selenocysteine
  MOD_RES (818)..(818): Selenocysteine
  MOD_RES (831)..(831): Selenocysteine
  MOD_RES (868)..(868): Selenocysteine
  MOD_RES (887)..(887): Selenocysteine
  MOD_RES (901)..(902): Selenocysteine
  MOD_RES (910)..(910): Selenocysteine
  MOD_RES (920)..(920): Selenocysteine
  MOD_RES (922)..(922): Selenocysteine
  MOD_RES (931)..(931): Selenocysteine
  MOD_RES (936)..(936): Selenocysteine
  MOD_RES (946)..(946): Selenocysteine
  MOD_RES (952)..(952): Selenocysteine
  MOD_RES (954)..(954): Selenocysteine
  MOD_RES (967)..(967): Selenocysteine
  MOD_RES (969)..(969): Selenocysteine
  MOD_RES (1013)..(1013): Selenocysteine
  MOD_RES (1030)..(1031): Selenocysteine
  MOD_RES (1050)..(1050): Selenocysteine
  MOD_RES (1063)..(1063): Selenocysteine
  MOD_RES (1087)..(1087): Selenocysteine
  MOD_RES (1095)..(1095): Selenocysteine
  MOD_RES (1097)..(1097): Selenocysteine
  MOD_RES (1136)..(1136): Selenocysteine
  MOD_RES (1152)..(1152): Selenocysteine
  MOD_RES (1156)..(1156): Selenocysteine
MGKVGAGGGSQARLSALLAGAGLLILCAPGVCGGGSCCPSPHPSSAPRSASXPRGFSHQGRPGRAPAXPLPLVVRPLFSVAPGDRALSLERARGXGASMAVAARSGRRRRSGADQEKAERGEGASRSPRGVLRDGGQQEPGXRERDPDKAXRFRMEELRLXSXXFALXGDSAHNQAMVHWSGHNSSVILILXKLYDYNLGSIXESSLWRSXDYGXXYEKLNDKVGLKXILSYLYVCPXNKRKIMLLXDPEIESSLLISSDEGAXYQKYRLNFYIQSLLFHPKQEDWILAYSQDQKLYSSAEFGRRWQLIQEGVVPNRFYWSVMGSNKEPDLVHLEARXVDGHSHYLXCRMQNCXEANRNQPFPGYIDPDSLIVQDHYVFVQLXSGGRPHYYVSYRRNAFAQMKLPKYALPKDMHVISXDENQVFAAVQEWNQNDXYNLYISDXRGVYFXLALENVQSSRGPEGNIMIDLYEVAGIKGMFLANKKIDNQVKXFIXYNKGRDWRLLQAPDXDLRGDPVHCLLPYCSLHLHLKVSENPYXSGIIASKDXAPSIIVASGNIGSELSDXDISMFVSSDAGNXWRQIFEEEHSVLYLDQGGVLVAMKHXSLPIRHLWLSFDEGRSWSKYSFXSIPLFVDGVLGEPGEEXLIMXVFGHFSHRSEWQLVKVDYKSIFDRRCAEEDYRPWQLHSQGEACIMGAKRIYKKRKSERKCMQGKYAGAMESEPCVCXEADFDCDYGYERHSNGQCLPAFWFNPSSLSKDCSLGQSYLNSXGYRKVVSNNCXDGVREQYXAKPQKCPGKAPRGLRIVXADGKLXAEQGHNVXLMVQLEEGDVQRXLIQVDFGDGIAVSYVNLSSMEDGIKHVYQNVGIFRVXVQVDNSLGSDSAVLYLHVXCPLEHVHLSLPFVXXKNKEVNAXAVLWPSQVGXLXYVWWYGNNXEPLIXLEGSISFRFXSEGMNXIXVQVSAGNAILQDXKXIAVYEEFRSLRLSFSPNLDDYNPDIPEWRRDIGRVIKKSLVEAXGVPGQHILVAVLPGLPXXAELFVLPYQDPAGENKRSXDDLEQISELLIHXLNQNSVHFELKPGVRVLVHAAHLXAAPLVDLXPXHSGSAMLMLLSVVFVGLAVFVIYKFKRRVALPSPPSPSXQPGDSSLRLQRARHAXPPSXPKRGSAGAQYAI

SEQ ID NO: 26005 - protein, 714 aa, Homo sapiens
  MOD_RES (26)..(26): Selenocysteine
  MOD_RES (29)..(29): Selenocysteine
  MOD_RES (44)..(44): Selenocysteine
  MOD_RES (72)..(72): Selenocysteine
  MOD_RES (81)..(81): Selenocysteine
  MOD_RES (99)..(99): Selenocysteine
  MOD_RES (112)..(112): Selenocysteine
  MOD_RES (138)..(138): Selenocysteine
  MOD_RES (161)..(161): Selenocysteine
  MOD_RES (178)..(178): Selenocysteine
  MOD_RES (182)..(182): Selenocysteine
  MOD_RES (259)..(259): Selenocysteine
  MOD_RES (302)..(302): Selenocysteine
  MOD_RES (313)..(313): Selenocysteine
  MOD_RES (321)..(321): Selenocysteine
  MOD_RES (339)..(339): Selenocysteine
  MOD_RES (345)..(345): Selenocysteine
  MOD_RES (353)..(353): Selenocysteine
  MOD_RES (366)..(366): Selenocysteine
  MOD_RES (403)..(403): Selenocysteine
  MOD_RES (422)..(422): Selenocysteine
  MOD_RES (436)..(437): Selenocysteine
  MOD_RES (445)..(445): Selenocysteine
  MOD_RES (455)..(455): Selenocysteine
  MOD_RES (457)..(457): Selenocysteine
  MOD_RES (466)..(466): Selenocysteine
  MOD_RES (471)..(471): Selenocysteine
  MOD_RES (481)..(481): Selenocysteine
  MOD_RES (487)..(487): Selenocysteine
  MOD_RES (489)..(489): Selenocysteine
  MOD_RES (502)..(502): Selenocysteine
  MOD_RES (504)..(504): Selenocysteine
  MOD_RES (548)..(548): Selenocysteine
  MOD_RES (565)..(566): Selenocysteine
  MOD_RES (585)..(585): Selenocysteine
  MOD_RES (598)..(598): Selenocysteine
  MOD_RES (622)..(622): Selenocysteine
  MOD_RES (630)..(630): Selenocysteine
  MOD_RES (632)..(632): Selenocysteine
  MOD_RES (694)..(694): Selenocysteine
MIDLYEVAGIKGMFLANKKIDNQVKXFIXYNKGRDWRLLQAPDXDLRGDPVHCLLPYCSLHLHLKVSENPYXSGIIASKDXAPSIIVASGNIGSELSDXDISMFVSSDAGNXWRQIFEEEHSVLYLDQGGVLVAMKHXSLPIRHLWLSFDEGRSWSKYSFXSIPLFVDGVLGEPGEEXLIMXVFGHFSHRSEWQLVKVDYKSIFDRRCAEEDYRPWQLHSQGEACIMGAKRIYKKRKSERKCMQGKYAGAMESEPCVCXEADFDCDYGYERHSNGQCLPAFWFNPSSLSKDCSLGQSYLNSXGYRKVVSNNCXDGVREQYXAKPQKCPGKAPRGLRIVXADGKLXAEQGHNVXLMVQLEEGDVQRXLIQVDFGDGIAVSYVNLSSMEDGIKHVYQNVGIFRVXVQVDNSLGSDSAVLYLHVXCPLEHVHLSLPFVXXKNKEVNAXAVLWPSQVGXLXYVWWYGNNXEPLIXLEGSISFRFXSEGMNXIXVQVSAGNAILQDXKXIAVYEEFRSLRLSFSPNLDDYNPDIPEWRRDIGRVIKKSLVEAXGVPGQHILVAVLPGLPXXAELFVLPYQDPAGENKRSXDDLEQISELLIHXLNQNSVHFELKPGVRVLVHAAHLXAAPLVDLXPXHSGSAMLMLLSVVFVGLAVFVIYKFKRKIPGINVYAQMQNEKEQEMISPVSHSESRPNVPQXELRRPGQLIDEKVESQLIGE

SEQ ID NO: 26006 - protein, 213 aa, Homo sapiens
  MOD_RES (1)..(1): Any amino acid
  MOD_RES (28)..(28): Selenocysteine
  MOD_RES (45)..(46): Selenocysteine
  MOD_RES (65)..(65): Selenocysteine
  MOD_RES (78)..(78): Selenocysteine
  MOD_RES (102)..(102): Selenocysteine
  MOD_RES (110)..(110): Selenocysteine
  MOD_RES (112)..(112): Selenocysteine
  MOD_RES (174)..(174): Selenocysteine
  MOD_RES (204)..(204): Selenocysteine
  MOD_RES (209)..(209): Selenocysteine
XLDDYNPDIPEWRRDIGRVIKKSLVEAXGVPGQHILVAVLPGLPXXAELFVLPYQDPAGENKRSXDDLEQISELLIHXLNQNSVHFELKPGVRVLVHAAHLXAAPLVDLXPXHSGSAMLMLLSVVFVGLAVFVIYKFKRKIPGINVYAQMQNEKEQEMISPVSHSESRPNVPQXELRRPGQLIDEKVESQLIGSISIVAENQSXKEIPXYVNV

SEQ ID NO: 26007 - protein, 1159 aa, Homo sapiens
  MOD_RES (16)..(16): Selenocysteine
  MOD_RES (65)..(65): Selenocysteine
  MOD_RES (89)..(89): Selenocysteine
  MOD_RES (137)..(137): Selenocysteine
  MOD_RES (146)..(146): Selenocysteine
  MOD_RES (155)..(155): Selenocysteine
  MOD_RES (166)..(166): Selenocysteine
  MOD_RES (189)..(189): Selenocysteine
  MOD_RES (192)..(192): Selenocysteine
  MOD_RES (195)..(195): Selenocysteine
  MOD_RES (201)..(202): Selenocysteine
  MOD_RES (212)..(212): Selenocysteine
  MOD_RES (240)..(240): Selenocysteine
  MOD_RES (252)..(252): Selenocysteine
  MOD_RES (267)..(267): Selenocysteine
  MOD_RES (283)..(283): Selenocysteine
  MOD_RES (290)..(290): Selenocysteine
  MOD_RES (323)..(323): Selenocysteine
  MOD_RES (335)..(335): Selenocysteine
  MOD_RES (348)..(348): Selenocysteine
  MOD_RES (359)..(359): Selenocysteine
  MOD_RES (364)..(364): Selenocysteine
  MOD_RES (394)..(394): Selenocysteine
  MOD_RES (411)..(411): Selenocysteine
  MOD_RES (467)..(467): Selenocysteine
  MOD_RES (470)..(470): Selenocysteine
  MOD_RES (492)..(492): Selenocysteine
  MOD_RES (516)..(516): Selenocysteine
  MOD_RES (519)..(519): Selenocysteine
  MOD_RES (522)..(522): Selenocysteine
  MOD_RES (547)..(547): Selenocysteine
  MOD_RES (553)..(553): Selenocysteine
  MOD_RES (579)..(579): Selenocysteine
  MOD_RES (595)..(595): Selenocysteine
  MOD_RES (598)..(598): Selenocysteine
  MOD_RES (602)..(602): Selenocysteine
  MOD_RES (604)..(604): Selenocysteine
  MOD_RES (619)..(619): Selenocysteine
  MOD_RES (623)..(623): Selenocysteine
  MOD_RES (681)..(681): Selenocysteine
  MOD_RES (691)..(691): Selenocysteine
  MOD_RES (695)..(695): Selenocysteine
  MOD_RES (722)..(722): Selenocysteine
  MOD_RES (745)..(745): Selenocysteine
  MOD_RES (747)..(747): Selenocysteine
  MOD_RES (778)..(778): Selenocysteine
  MOD_RES (813)..(814): Selenocysteine
  MOD_RES (832)..(832): Selenocysteine
  MOD_RES (834)..(834): Selenocysteine
  MOD_RES (857)..(857): Selenocysteine
  MOD_RES (893)..(893): Selenocysteine
  MOD_RES (904)..(904): Selenocysteine
  MOD_RES (925)..(926): Selenocysteine
  MOD_RES (931)..(931): Selenocysteine
  MOD_RES (937)..(937): Selenocysteine
  MOD_RES (977)..(977): Selenocysteine
  MOD_RES (989)..(989): Selenocysteine
  MOD_RES (996)..(996): Selenocysteine
  MOD_RES (1005)..(1005): Selenocysteine
  MOD_RES (1013)..(1013): Selenocysteine
  MOD_RES (1027)..(1027): Selenocysteine
  MOD_RES (1067)..(1067): Selenocysteine
  MOD_RES (1069)..(1069): Selenocysteine
  MOD_RES (1110)..(1110): Selenocysteine
  MOD_RES (1124)..(1124): Selenocysteine
MAHRGPSRASKGPGPXARAPSPGAPPPPRSPRSRPLLLLLLLLGACGAAGRSPEPGRLGPHAQLXRVPRSPPAGRAEPGGGEDRQARGXEPGAPGPSPGPAPGPGEDGAPAAGYRRWERAAPLAGVASRAQVSLISXSFVLKGDAXHNQAMVHWXGENSSVILILXKYYHADMGKVLESSLWRSSDFGXSYXKLXLQPGVXXVIDNFYICPXNKRKVILVSSSLSDRDQSLFLSADEGAXFQKQPIPFFVEXLIFHPKEEDKVLAYXKESKLYVSSDLGKKWXLLQERVXKDHVFWSVSGVDADPDLVHVEAQDLGGDFRYVXCAIHNCSEKMLXAPFAGPIDHGSLXVQDDYIFFKAXSANQXKYYVSYRRNEFVLMKLPKYALPKDLQIISXDESQVFVAVQEWYQMDXYNLYQSDPRGVRYALVLQDVRSSRQAEESVLIDILEVRGVKGVFLANQKIDGKVMXLIXYNKGRDWDYLRPPSMDMNGKPXNCKPPDCHLHLHLRWADNPYVSGXVHXKDXAPGLIMGAGNLGSQLVEYKEEMYIXSDCGHXWRQVFEEEHHILYLDHGGVIVAIKDXSIPLKILKFSVDEGLXWSXHNFXSXSVFVDGLLSEPGDEXLVMXVFGHISFRSDWELVKVDFRPSFSRQCGEEDYSSWELSNLQGDRCIMGQQRSFRKRKSXSWCIKGRSFXSALXSRVCECRDSDFLCDYGFERSSSSESSXNKCSANFWFNPLSPPDDCALGQXYXSSLGYRKVVSNVCEGGVDMQQSQVQLQCPLXPPRGLQVSIQGEAVAVRPGEDVLFVVRQEQGDVLXXKYQVDLGDGFKAMYVNLXLXGEPIRHRYESPGIYRVSVRAENXAGHDEAVLFVQVNSPLQALYLEVVPVIGLNQEVNLXAVLLPLNPNLXVFYWWIGHSLQPLLSLDNSVXXRFSDXGDVRVXVQAACGNSVLQDSRVLRVLDQFQVMPLQFSKELDAYNPNXPEWREDVGLVVXRLLSKEXSVPQELLVXVVKPGLPXLADLYVLLPPPRPXRKRSLSSDKRLAAIQQVLNAQKISFLLRGGVRVLVALRDXGXGAEQLGGGGGYWAVVVLFVIGLFAAGAFILYKFKRKRPGRXVYAQMHNEKEQEMXSPVSHSEDVQGAVQGNHSGVVLSINSREMHSYLVS

SEQ ID NO: 26008 - protein, 987 aa, Homo sapiens
  MOD_RES (17)..(17): Selenocysteine
  MOD_RES (20)..(20): Selenocysteine
  MOD_RES (23)..(23): Selenocysteine
  MOD_RES (29)..(30): Selenocysteine
  MOD_RES (40)..(40): Selenocysteine
  MOD_RES (68)..(68): Selenocysteine
  MOD_RES (80)..(80): Selenocysteine
  MOD_RES (95)..(95): Selenocysteine
  MOD_RES (111)..(111): Selenocysteine
  MOD_RES (118)..(118): Selenocysteine
  MOD_RES (151)..(151): Selenocysteine
  MOD_RES (163)..(163): Selenocysteine
  MOD_RES (176)..(176): Selenocysteine
  MOD_RES (187)..(187): Selenocysteine
  MOD_RES (192)..(192): Selenocysteine
  MOD_RES (222)..(222): Selenocysteine
  MOD_RES (239)..(239): Selenocysteine
  MOD_RES (295)..(295): Selenocysteine
  MOD_RES (298)..(298): Selenocysteine
  MOD_RES (320)..(320): Selenocysteine
  MOD_RES (344)..(344): Selenocysteine
  MOD_RES (347)..(347): Selenocysteine
  MOD_RES (350)..(350): Selenocysteine
  MOD_RES (375)..(375): Selenocysteine
  MOD_RES (381)..(381): Selenocysteine
  MOD_RES (407)..(407): Selenocysteine
  MOD_RES (423)..(423): Selenocysteine
  MOD_RES (426)..(426): Selenocysteine
  MOD_RES (430)..(430): Selenocysteine
  MOD_RES (432)..(432): Selenocysteine
  MOD_RES (447)..(447): Selenocysteine
  MOD_RES (451)..(451): Selenocysteine
  MOD_RES (509)..(509): Selenocysteine
  MOD_RES (519)..(519): Selenocysteine
  MOD_RES (523)..(523): Selenocysteine
  MOD_RES (550)..(550): Selenocysteine
  MOD_RES (573)..(573): Selenocysteine
  MOD_RES (575)..(575): Selenocysteine
  MOD_RES (606)..(606): Selenocysteine
  MOD_RES (641)..(642): Selenocysteine
  MOD_RES (660)..(660): Selenocysteine
  MOD_RES (662)..(662): Selenocysteine
  MOD_RES (685)..(685): Selenocysteine
  MOD_RES (721)..(721): Selenocysteine
  MOD_RES (732)..(732): Selenocysteine
  MOD_RES (753)..(754): Selenocysteine
  MOD_RES (759)..(759): Selenocysteine
  MOD_RES (765)..(765): Selenocysteine
  MOD_RES (805)..(805): Selenocysteine
  MOD_RES (817)..(817): Selenocysteine
  MOD_RES (824)..(824): Selenocysteine
  MOD_RES (833)..(833): Selenocysteine
  MOD_RES (841)..(841): Selenocysteine
  MOD_RES (855)..(855): Selenocysteine
  MOD_RES (895)..(895): Selenocysteine
  MOD_RES (897)..(897): Selenocysteine
  MOD_RES (938)..(938): Selenocysteine
  MOD_RES (952)..(952): Selenocysteine
MGKVLESSLWRSSDFGXSYXKLXLQPGVXXVIDNFYICPXNKRKVILVSSSLSDRDQSLFLSADEGAXFQKQPIPFFVEXLIFHPKEEDKVLAYXKESKLYVSSDLGKKWXLLQERVXKDHVFWSVSGVDADPDLVHVEAQDLGGDFRYVXCAIHNCSEKMLXAPFAGPIDHGSLXVQDDYIFFKAXSANQXKYYVSYRRNEFVLMKLPKYALPKDLQIISXDESQVFVAVQEWYQMDXYNLYQSDPRGVRYALVLQDVRSSRQAEESVLIDILEVRGVKGVFLANQKIDGKVMXLIXYNKGRDWDYLRPPSMDMNGKPXNCKPPDCHLHLHLRWADNPYVSGXVHXKDXAPGLIMGAGNLGSQLVEYKEEMYIXSDCGHXWRQVFEEEHHILYLDHGGVIVAIKDXSIPLKILKFSVDEGLXWSXHNFXSXSVFVDGLLSEPGDEXLVMXVFGHISFRSDWELVKVDFRPSFSRQCGEEDYSSWELSNLQGDRCIMGQQRSFRKRKSXSWCIKGRSFXSALXSRVCECRDSDFLCDYGFERSSSSESSXNKCSANFWFNPLSPPDDCALGQXYXSSLGYRKVVSNVCEGGVDMQQSQVQLQCPLXPPRGLQVSIQGEAVAVRPGEDVLFVVRQEQGDVLXXKYQVDLGDGFKAMYVNLXLXGEPIRHRYESPGIYRVSVRAENXAGHDEAVLFVQVNSPLQALYLEVVPVIGLNQEVNLXAVLLPLNPNLXVFYWWIGHSLQPLLSLDNSVXXRFSDXGDVRVXVQAACGNSVLQDSRVLRVLDQFQVMPLQFSKELDAYNPNXPEWREDVGLVVXRLLSKEXSVPQELLVXVVKPGLPXLADLYVLLPPPRPXRKRSLSSDKRLAAIQQVLNAQKISFLLRGGVRVLVALRDXGXGAEQLGGGGGYWAVVVLFVIGLFAAGAFILYNFIRKRPGRXVYAQMHNEKEQEMXSPVSHSEDVQGAVQGNHSGVVLSINSREMHSYLVS

SEQ ID NO: 26009 - protein, 101 aa, Homo sapiens
  MOD_RES (38)..(38): Selenocysteine
  MOD_RES (52)..(52): Selenocysteine
  MOD_RES (79)..(79): Selenocysteine
QLGGGGGYWAVVVLFVIGLFAAGAFILYKFKRKRPGRXVYAQMHNEKEQEMXSPVSHSEDVQGAVQGEEFIDDDLDSQXLGNHSGVVLSINSREMHSYLVS

SEQ ID NO: 26010 - protein, 153 aa, Homo sapiens
  MOD_RES (14)..(14): Selenocysteine
  MOD_RES (22)..(22): Selenocysteine
  MOD_RES (32)..(32): Selenocysteine
  MOD_RES (45)..(45): Selenocysteine
  MOD_RES (71)..(71): Selenocysteine
  MOD_RES (94)..(94): Selenocysteine
  MOD_RES (111)..(111): Selenocysteine
  MOD_RES (115)..(115): Selenocysteine
  MOD_RES (152)..(152): Selenocysteine
ENPYSSGRISSKEXAPGLVVAXGNIGPELSYXDIGVFISSDGGNXWRQIFDEEYNVWFLDWGGALVAMKHXPLPVRHLWVSFDEGHSWDKYGFXSVPLFVDGALVEAGMEXHIMXDYGYERHGESQCVPAFWYNPASPSKDCSLGQSYLNSXG

SEQ ID NO: 26011 - protein, 1222 aa, Homo sapiens
  MOD_RES (6)..(6): Selenocysteine
  MOD_RES (20)..(20): Selenocysteine
  MOD_RES (27)..(27): Selenocysteine
  MOD_RES (36)..(36): Selenocysteine
  MOD_RES (40)..(40): Selenocysteine
  MOD_RES (108)..(108): Selenocysteine
  MOD_RES (139)..(139): Selenocysteine
  MOD_RES (148)..(148): Selenocysteine
  MOD_RES (186)..(186): Selenocysteine
  MOD_RES (191)..(191): Selenocysteine
  MOD_RES (215)..(215): Selenocysteine
  MOD_RES (226)..(226): Selenocysteine
  MOD_RES (234)..(234): Selenocysteine
  MOD_RES (238)..(239): Selenocysteine
  MOD_RES (251)..(251): Selenocysteine
  MOD_RES (261)..(261): Selenocysteine
  MOD_RES (287)..(287): Selenocysteine
  MOD_RES (294)..(294): Selenocysteine
  MOD_RES (337)..(337): Selenocysteine
  MOD_RES (361)..(362): Selenocysteine
  MOD_RES (370)..(370): Selenocysteine
  MOD_RES (379)..(380): Selenocysteine
  MOD_RES (406)..(407): Selenocysteine
  MOD_RES (441)..(441): Selenocysteine
  MOD_RES (458)..(458): Selenocysteine
  MOD_RES (466)..(466): Selenocysteine
  MOD_RES (472)..(472): Selenocysteine
  MOD_RES (514)..(514): Selenocysteine
  MOD_RES (517)..(517): Selenocysteine
  MOD_RES (569)..(569): Selenocysteine
  MOD_RES (577)..(577): Selenocysteine
  MOD_RES (587)..(587): Selenocysteine
  MOD_RES (600)..(600): Selenocysteine
  MOD_RES (626)..(626): Selenocysteine
  MOD_RES (649)..(649): Selenocysteine
  MOD_RES (666)..(666): Selenocysteine
  MOD_RES (670)..(670): Selenocysteine
  MOD_RES (697)..(697): Selenocysteine
  MOD_RES (703)..(703): Selenocysteine
  MOD_RES (791)..(791): Selenocysteine
  MOD_RES (802)..(802): Selenocysteine
  MOD_RES (810)..(810): Selenocysteine
  MOD_RES (828)..(829): Selenocysteine
  MOD_RES (842)..(842): Selenocysteine
  MOD_RES (855)..(855): Selenocysteine
  MOD_RES (892)..(892): Selenocysteine
  MOD_RES (903)..(903): Selenocysteine
  MOD_RES (944)..(944): Selenocysteine
  MOD_RES (946)..(946): Selenocysteine
  MOD_RES (955)..(955): Selenocysteine
  MOD_RES (960)..(960): Selenocysteine
  MOD_RES (968)..(968): Selenocysteine
  MOD_RES (974)..(974): Selenocysteine
  MOD_RES (976)..(976): Selenocysteine
  MOD_RES (978)..(978): Selenocysteine
  MOD_RES (991)..(991): Selenocysteine
  MOD_RES (1037)..(1037): Selenocysteine
  MOD_RES (1054)..(1054): Selenocysteine
  MOD_RES (1067)..(1067): Selenocysteine
  MOD_RES (1083)..(1083): Selenocysteine
  MOD_RES (1108)..(1108): Selenocysteine
  MOD_RES (1111)..(1111): Selenocysteine
  MOD_RES (1181)..(1181): Selenocysteine
  MOD_RES (1186)..(1186): Selenocysteine
  MOD_RES (1198)..(1198): Selenocysteine
  MOD_RES (1206)..(1206): Selenocysteine
  MOD_RES (1213)..(1213): Selenocysteine
  MOD_RES (1220)..(1220): Selenocysteine
MEAARXERPAGRPGAPLVRXGLLLLSXWVLAGAEIXWDAXGGPGRPAAPASRPPALSPLSPRAVASQWPEELASARRAAVLGRRAGPELLPQQGGGRGGEMQVEAGGXSPAGERRGRGIPAPAKLGGARRSRRAQPPIXQERGDAWAXAPADGSRGSRPLAKGSREEVKAPRAGGSAAEDLRLPSXSFALXGDSAHNQAMVHWSGHNSSVILILXKLYDFNLGSVXESSLWRSXDYGXXYEKLNDKVGLKXVLSYLYVNPXNKRKIMLLSDPEMESSILISSDEGAXYQKYRLXFYIQSLLFHPKQEDWVLAYSLDQKLYSSMDFGRRWQLMHERIXPNRFYWSVAGLDKEADLVHMEVRXXDGYAHYLXCRIQECAEXXRSGPFARSIDISSLVVQDEYIFIQVXXSGRASYYVSYRREAFAQIKLPKYSLPKDMHIISXDENQVFAAVQEWNQNDXYNLYISDXRGIYFXLAMENIKSSRGLMGNIIIELYEVAGIKGIFLANKKVDDQVKXYIXYNKGRDWRLLQAPDVDLRGSPVHCLLPFCSLHLHLQLSENPYSSGRISSKEXAPGLVVAXGNIGPELSYXDIGVFISSDGGNXWRQIFDEEYNVWFLDWGGALVAMKHXPLPVRHLWVSFDEGHSWDKYGFXSVPLFVDGALVEAGMEXHIMXVFGHFSLRSEWQLVKVDYKSIFSRHCXKEDYQXWHLLNQGEPCVMGERKIFKKRKPGAQCALGRDHSGSVVSEPCVCANWDFECDYGYERHGESQCVPAFWYNPASPSKDCSLGQSYLNSXGYRRIVSNNCXDGLREKYXAKAQMCPGKAPRGLHVVXXDGRLVAEQGHNAXFIILMEEGDLQRXNIQLDFGDGIAVSYANFSPIEDGIKHVYKSAGIFQVXAYAENNLGSDXAVLFLHVVCPVEHVHLRVPFVAIRNKEVNISAVVWPSQLGXLXYFWWFGNSXKPLIXLDSSISFXFLAEGXDXIXVQVAAGNALIQDXKEIAVHEYFQSQLLSFSPNLDYHNPDIPEWRKDIGNVIKRALVKVXSVPEDQILIAVFPGLPXSAELFILPPKNLXERRKGNEGDLEQIVEXLFNALNQNLVQFELKPGVQVIVYVXQLXLAPLVDSSAGHSSSAMLMLLSVVFVGLAVFLIYKFKRKIPWINIYAQVQHDKEQEMIGSVSQSENAPKIXLSDFXEPEELLDKELDXRVIGGIAXIANSESXKEIPNCXSV

SEQ ID NO: 26012 - protein, 2214 aa, Homo sapiens
  MOD_RES (3)..(3): Selenocysteine
  MOD_RES (17)..(17): Selenocysteine
  MOD_RES (32)..(32): Selenocysteine
  MOD_RES (190)..(190): Selenocysteine
  MOD_RES (196)..(196): Selenocysteine
  MOD_RES (240)..(240): Selenocysteine
  MOD_RES (263)..(263): Selenocysteine
  MOD_RES (276)..(276): Selenocysteine
  MOD_RES (281)..(281): Selenocysteine
  MOD_RES (310)..(310): Selenocysteine
  MOD_RES (342)..(342): Selenocysteine
  MOD_RES (370)..(370): Selenocysteine
  MOD_RES (401)..(401): Selenocysteine
  MOD_RES (427)..(427): Selenocysteine
  MOD_RES (443)..(443): Selenocysteine
  MOD_RES (449)..(449): Selenocysteine
  MOD_RES (459)..(459): Selenocysteine
  MOD_RES (507)..(507): Selenocysteine
  MOD_RES (518)..(518): Selenocysteine
  MOD_RES (541)..(541): Selenocysteine
  MOD_RES (550)..(550): Selenocysteine
  MOD_RES (558)..(558): Selenocysteine
  MOD_RES (565)..(565): Selenocysteine
  MOD_RES (570)..(570): Selenocysteine
  MOD_RES (573)..(573): Selenocysteine
  MOD_RES (588)..(588): Selenocysteine
  MOD_RES (595)..(595): Selenocysteine
  MOD_RES (598)..(598): Selenocysteine
  MOD_RES (618)..(618): Selenocysteine
  MOD_RES (626)..(626): Selenocysteine
  MOD_RES (649)..(649): Selenocysteine
  MOD_RES (655)..(655): Selenocysteine
  MOD_RES (659)..(659): Selenocysteine
  MOD_RES (678)..(678): Selenocysteine
  MOD_RES (721)..(721): Selenocysteine
  MOD_RES (725)..(725): Selenocysteine
  MOD_RES (735)..(735): Selenocysteine
  MOD_RES (779)..(779): Selenocysteine
  MOD_RES (785)..(785): Selenocysteine
  MOD_RES (821)..(821): Selenocysteine
  MOD_RES (833)..(833): Selenocysteine
  MOD_RES (868)..(868): Selenocysteine
  MOD_RES (893)..(893): Selenocysteine
  MOD_RES (936)..(936): Selenocysteine
  MOD_RES (947)..(947): Selenocysteine
  MOD_RES (1002)..(1002): Selenocysteine
  MOD_RES (1016)..(1016): Selenocysteine
  MOD_RES (1070)..(1070): Selenocysteine
  MOD_RES (1077)..(1077): Selenocysteine
  MOD_RES (1114)..(1115): Selenocysteine
  MOD_RES (1121)..(1121): Selenocysteine
  MOD_RES (1130)..(1130): Selenocysteine
  MOD_RES (1193)..(1193): Selenocysteine
  MOD_RES (1198)..(1198): Selenocysteine
  MOD_RES (1222)..(1222): Selenocysteine
  MOD_RES (1248)..(1248): Selenocysteine
  MOD_RES (1276)..(1276): Selenocysteine
  MOD_RES (1363)..(1363): Selenocysteine
  MOD_RES (1413)..(1413): Selenocysteine
  MOD_RES (1418)..(1418): Selenocysteine
  MOD_RES (1430)..(1430): Selenocysteine
  MOD_RES (1435)..(1435): Selenocysteine
  MOD_RES (1460)..(1460): Selenocysteine
  MOD_RES (1464)..(1464): Selenocysteine
  MOD_RES (1466)..(1466): Selenocysteine
  MOD_RES (1483)..(1483): Selenocysteine
  MOD_RES (1508)..(1508): Selenocysteine
  MOD_RES (1511)..(1511): Selenocysteine
  MOD_RES (1513)..(1513): Selenocysteine
  MOD_RES (1554)..(1554): Selenocysteine
  MOD_RES (1564)..(1564): Selenocysteine
  MOD_RES (1572)..(1572): Selenocysteine
  MOD_RES (1574)..(1574): Selenocysteine
  MOD_RES (1602)..(1602): Selenocysteine
  MOD_RES (1605)..(1605): Selenocysteine
  MOD_RES (1610)..(1610): Selenocysteine
  MOD_RES (1612)..(1612): Selenocysteine
  MOD_RES (1621)..(1622): Selenocysteine
  MOD_RES (1638)..(1638): Selenocysteine
  MOD_RES (1643)..(1643): Selenocysteine
  MOD_RES (1646)..(1646): Selenocysteine
  MOD_RES (1679)..(1679): Selenocysteine
  MOD_RES (1708)..(1708): Selenocysteine
  MOD_RES (1717)..(1717): Selenocysteine
  MOD_RES (1720)..(1720): Selenocysteine
  MOD_RES (1727)..(1727): Selenocysteine
  MOD_RES (1741)..(1742): Selenocysteine
  MOD_RES (1766)..(1766): Selenocysteine
  MOD_RES (1768)..(1768): Selenocysteine
  MOD_RES (1788)..(1788): Selenocysteine
  MOD_RES (1795)..(1795): Selenocysteine
  MOD_RES (1811)..(1811): Selenocysteine
  MOD_RES (1814)..(1814): Selenocysteine
  MOD_RES (1824)..(1824): Selenocysteine
  MOD_RES (1838)..(1838): Selenocysteine
  MOD_RES (1856)..(1856): Selenocysteine
  MOD_RES (1861)..(1861): Selenocysteine
  MOD_RES (1863)..(1863): Selenocysteine
  MOD_RES (1876)..(1876): Selenocysteine
  MOD_RES (1889)..(1890): Selenocysteine
  MOD_RES (1896)..(1896): Selenocysteine
  MOD_RES (1943)..(1943): Selenocysteine
  MOD_RES (1946)..(1946): Selenocysteine
  MOD_RES (1976)..(1976): Selenocysteine
  MOD_RES (1988)..(1988): Selenocysteine
  MOD_RES (1992)..(1992): Selenocysteine
  MOD_RES (2020)..(2021): Selenocysteine
  MOD_RES (2034)..(2034): Selenocysteine
  MOD_RES (2071)..(2071): Selenocysteine
  MOD_RES (2077)..(2078): Selenocysteine
  MOD_RES (2094)..(2094): Selenocysteine
  MOD_RES (2096)..(2096): Selenocysteine
  MOD_RES (2128)..(2128): Selenocysteine
  MOD_RES (2134)..(2134): Selenocysteine
  MOD_RES (2160)..(2160): Selenocysteine
  MOD_RES (2170)..(2170): Selenocysteine
  MOD_RES (2203)..(2203): Selenocysteine
MAXRSSRRESRLPFLFXLVALLPPGALCEVWXQRLHGGSAPLPQDRGFLVVQGDPRELRLWARGDARGASRADEKPLRRKRSAALQPEPIKVYGQVSLNDSHNQMVVHWAGEKSNVIVALARDSLALARPKSSDVYVSYDYGKSFKKISDKLNFGLGNRSEAVIAQFYHSPADNKRYIFADAYAQYLWIXFDFCNXLQGFSIPFRAADLLLHSKASNLLLGFDRSHPNKQLWKSDDFGQXWIMIQEHVKSFSWGIDPYDKPNXIYIERHEPSGYSXVFRSXDFFQSRENQEVILEEVRDFQLRDKYMFAXKVVHLLGSEQQSSVQLWVSFGRKPMRAAQFVXRHPINEYYIADASEDQVFVCVSHSNNRXNLYISEAEGLKFSLSLENVLYYSPGGAGSDXLVRYFANEPFADFHRVEGLQGVYIAXLINGSMNEENMRSVIXFDKGGXWEFLQAPAFXGYGEKINCELSQGCSLHLAQRLSQLLNLQLRRMPILSKESAPGLIIAXGSVGKNLASKXNVYISSSAGARWREALPGPHYYXWGDHGGIIXAIAQGMEXNELKYSXNEGEXWKXFIFSEKPVFVYGLLXEPGEKSXVFXIFGSNKENVHSWLILQVNAXDALGVPCXENDYKLWSPSDERGNECLLGHKXVFKRRXPHAXCFNGEDFDRPVVVSNCSCXREDYECDFGFKMSEDLSLEVCVPDPEFSGKSYSPPVPCPVGSXYRRXRGYRKISGDXCSGGDVEARLEGELVPCPLAEENEFILYAVRKSIYRYDLASGAXEQLPLXGLRAAVALDFDYEHNCLYWSDLALDVIQRLCLNGSXGQEVIINSGLEXVEALAFEPLSQLLYWVDAGFKKIEVANPDGDFRLXIVNSSVLDRPRALVLVPQEGVMFWXDWGDLKPGIYRSNMDGSAAYHLVSEDVKWPNGISVDDQWIYWXDAYLECIERIXFSGQQRSVILDNLPHPYAIAVFKNEIYWDDWSQLSIFRASKYSGSQMEILANQLXGLMDMKIFYKGKNXGSNACVPRPCSLLCLPKANNSRSCRCPEDVSSSVLPSGDLMCDCPQGYQLKNNXCVKQENXCLRNQYRCSNGNCINSIWWCDFDNDCGDMSDERNCPXXICDLDXQFRCQESGXCIPLSYKCDLEDDCGDNSDESHCEMHQCRSDEYNCSSGMCIRSSWVCDGDNDCRDWSDEANCXAIYHXCEASNFQCRNGHCIPQRWACDGDXDCQDGSDEDPVNCEKKCNGFRCPNGXCIPSSKHCDGLRDCSDGSDEQHCEPLCXHFMDFVCKNRQQCLFHSMVCDGIIQCRDGSDEDAAFAGCSQDPEFHKVCDEFGFQCQNGVCISLIWKCDGMDDCGDYSDEANCENPXEAPNCSRYFQFRCENGHCIPNRWKCDRENDCGDWSDEKDCGDSHILPFSXPGPSXCLPNYYRCSSGXCVMDXWVCDGYRDCADGSDEEACPLLANVXAASXPXQLGRCDRFEFECHQPKXCIPNWKRCDGHQDCQDGRDEANCPXHSXLXCMSREFQCEDGEACIVLSERCDGFLDCSDESDEKACSDELXVYKVQNLQWXADFSGDVXLXWMRPKKMPSASCVYNVYYRVVGESIWKXLEXHSNKXNXVLKVLKPDXXYQVKVQVQCLSKAHNXNDFVXLRXPEGLPDAPRNLQLSLPREAEGVIVGHWAPPIHXHGLIREYIVEYSRSGSKMWASQRAASNFXEIKNLLVNXLYXVRVAAVXSRGIGNWSDSKSIXXIKGKVIPPPDIHIDSYGENYLSFXLXMESDIKVNGYVVNLFWAFDXHKQERRXLNFRGSILSHKVGNLXAHXSYEISAWAKXDLGDSPLAFEHVMXRGVRPPAPSLKAKAINQXAVECXWXGPRNVVYGIFYAXSFLDLYRNPKSLXXSLHNKXVIVSKDEQYLFLVRVVVPYQGPSSDYVVVKMIPDSRLPPRHLHVVHXGKXSVVIKWESPYDSPDQDLLYAVAVKDLIRKXDRSYKVKSRNSXVEYXLNKLEPGGKYHIIVQLGNMSKDSSIKIXXVSLSAPDALKIIXENDHVLLFWKSLALKEKHFNESRGYEIHMFDSAMNIXAYLGNXXDNFFKISNLKMGHNYXFXVQARCLFGNQICGEPAILLYDELGSGADASAXQAARSXDVAAVVVPILFLILLSLGVGFAILYXKHRRLQSSFXAFANSHYSSRLGSAIFSSGDDLGEDDEDAPMIXGFSDDVPMVIA

SEQ ID NO: 26013 - protein, 1158 aa, Homo sapiens
  MOD_RES (14)..(14): Selenocysteine
  MOD_RES (21)..(21): Selenocysteine
  MOD_RES (58)..(59): Selenocysteine
  MOD_RES (65)..(65): Selenocysteine
  MOD_RES (74)..(74): Selenocysteine
  MOD_RES (137)..(137): Selenocysteine
  MOD_RES (142)..(142): Selenocysteine
  MOD_RES (166)..(166): Selenocysteine
  MOD_RES (192)..(192): Selenocysteine
  MOD_RES (220)..(220): Selenocysteine
  MOD_RES (307)..(307): Selenocysteine
  MOD_RES (357)..(357): Selenocysteine
  MOD_RES (362)..(362): Selenocysteine
  MOD_RES (374)..(374): Selenocysteine
  MOD_RES (379)..(379): Selenocysteine
  MOD_RES (404)..(404): Selenocysteine
  MOD_RES (408)..(408): Selenocysteine
  MOD_RES (410)..(410): Selenocysteine
  MOD_RES (427)..(427): Selenocysteine
  MOD_RES (452)..(452): Selenocysteine
  MOD_RES (455)..(455): Selenocysteine
  MOD_RES (457)..(457): Selenocysteine
  MOD_RES (498)..(498): Selenocysteine
  MOD_RES (508)..(508): Selenocysteine
  MOD_RES (516)..(516): Selenocysteine
  MOD_RES (518)..(518): Selenocysteine
  MOD_RES (546)..(546): Selenocysteine
  MOD_RES (549)..(549): Selenocysteine
  MOD_RES (554)..(554): Selenocysteine
  MOD_RES (556)..(556): Selenocysteine
  MOD_RES (565)..(566): Selenocysteine
  MOD_RES (582)..(582): Selenocysteine
  MOD_RES (587)..(587): Selenocysteine
  MOD_RES (590)..(590): Selenocysteine
  MOD_RES (623)..(623): Selenocysteine
  MOD_RES (652)..(652): Selenocysteine
  MOD_RES (661)..(661): Selenocysteine
  MOD_RES (664)..(664): Selenocysteine
  MOD_RES (671)..(671): Selenocysteine
  MOD_RES (685)..(686): Selenocysteine
  MOD_RES (710)..(710): Selenocysteine
  MOD_RES (712)..(712): Selenocysteine
  MOD_RES (732)..(732): Selenocysteine
  MOD_RES (739)..(739): Selenocysteine
  MOD_RES (755)..(755): Selenocysteine
  MOD_RES (758)..(758): Selenocysteine
  MOD_RES (768)..(768): Selenocysteine
  MOD_RES (782)..(782): Selenocysteine
  MOD_RES (800)..(800): Selenocysteine
  MOD_RES (805)..(805): Selenocysteine
  MOD_RES (807)..(807): Selenocysteine
  MOD_RES (820)..(820): Selenocysteine
  MOD_RES (833)..(834): Selenocysteine
  MOD_RES (840)..(840): Selenocysteine
  MOD_RES (887)..(887): Selenocysteine
  MOD_RES (890)..(890): Selenocysteine
  MOD_RES (920)..(920): Selenocysteine
  MOD_RES (932)..(932): Selenocysteine
  MOD_RES (936)..(936): Selenocysteine
  MOD_RES (964)..(965): Selenocysteine
  MOD_RES (978)..(978): Selenocysteine
  MOD_RES (1015)..(1015): Selenocysteine
  MOD_RES (1021)..(1022): Selenocysteine
  MOD_RES (1038)..(1038): Selenocysteine
  MOD_RES (1040)..(1040): Selenocysteine
  MOD_RES (1072)..(1072): Selenocysteine
  MOD_RES (1078)..(1078): Selenocysteine
  MOD_RES (1104)..(1104): Selenocysteine
  MOD_RES (1114)..(1114): Selenocysteine
  MOD_RES (1147)..(1147): Selenocysteine
MCDCPQGYQLKNNXCVKQENXCLRNQYRCSNGNCINSIWWCDFDNDCGDMSDERNCPXXICDLDXQFRCQESGXCIPLSYKCDLEDDCGDNSDESHCEMHQCRSDEYNCSSGMCIRSSWVCDGDNDCRDWSDEANCXAIYHXCEASNFQCRNGHCIPQRWACDGDXDCQDGSDEDPVNCEKKCNGFRCPNGXCIPSSKHCDGLRDCSDGSDEQHCEPLCXHFMDFVCKNRQQCLFHSMVCDGIIQCRDGSDEDAAFAGCSQDPEFHKVCDEFGFQCQNGVCISLIWKCDGMDDCGDYSDEANCENPXEAPNCSRYFQFRCENGHCIPNRWKCDRENDCGDWSDEKDCGDSHILPFSXPGPSXCLPNYYRCSSGXCVMDXWVCDGYRDCADGSDEEACPLLANVXAASXPXQLGRCDRFEFECHQPKXCIPNWKRCDGHQDCQDGRDEANCPXHSXLXCMSREFQCEDGEACIVLSERCDGFLDCSDESDEKACSDELXVYKVQNLQWXADFSGDVXLXWMRPKKMPSASCVYNVYYRVVGESIWKXLEXHSNKXNXVLKVLKPDXXYQVKVQVQCLSKAHNXNDFVXLRXPEGLPDAPRNLQLSLPREAEGVIVGHWAPPIHXHGLIREYIVEYSRSGSKMWASQRAASNFXEIKNLLVNXLYXVRVAAVXSRGIGNWSDSKSIXXIKGKVIPPPDIHIDSYGENYLSFXLXMESDIKVNGYVVNLFWAFDXHKQERRXLNFRGSILSHKVGNLXAHXSYEISAWAKXDLGDSPLAFEHVMXRGVRPPAPSLKAKAINQXAVECXWXGPRNVVYGIFYAXSFLDLYRNPKSLXXSLHNKXVIVSKDEQYLFLVRVVVPYQGPSSDYVVVKMIPDSRLPPRHLHVVHXGKXSVVIKWESPYDSPDQDLLYAVAVKDLIRKXDRSYKVKSRNSXVEYXLNKLEPGGKYHIIVQLGNMSKDSSIKIXXVSLSAPDALKIIXENDHVLLFWKSLALKEKHFNESRGYEIHMFDSAMNIXAYLGNXXDNFFKISNLKMGHNYXFXVQARCLFGNQICGEPAILLYDELGSGADASAXQAARSXDVAAVVVPILFLILLSLGVGFAILYXKHRRLQSSFXAFANSHYSSRLGSAIFSSGDDLGEDDEDAPMIXGFSDDVPMVIA

SEQ ID NO: 26014 - protein, 1060 aa, Homo sapiens
  MOD_RES (39)..(39): Selenocysteine
  MOD_RES (44)..(44): Selenocysteine
  MOD_RES (68)..(68): Selenocysteine
  MOD_RES (94)..(94): Selenocysteine
  MOD_RES (122)..(122): Selenocysteine
  MOD_RES (209)..(209): Selenocysteine
  MOD_RES (259)..(259): Selenocysteine
  MOD_RES (264)..(264): Selenocysteine
  MOD_RES (276)..(276): Selenocysteine
  MOD_RES (281)..(281): Selenocysteine
  MOD_RES (306)..(306): Selenocysteine
  MOD_RES (310)..(310): Selenocysteine
  MOD_RES (312)..(312): Selenocysteine
  MOD_RES (329)..(329): Selenocysteine
  MOD_RES (354)..(354): Selenocysteine
  MOD_RES (357)..(357): Selenocysteine
  MOD_RES (359)..(359): Selenocysteine
  MOD_RES (400)..(400): Selenocysteine
  MOD_RES (410)..(410): Selenocysteine
  MOD_RES (418)..(418): Selenocysteine
  MOD_RES (420)..(420): Selenocysteine
  MOD_RES (448)..(448): Selenocysteine
  MOD_RES (451)..(451): Selenocysteine
  MOD_RES (456)..(456): Selenocysteine
  MOD_RES (458)..(458): Selenocysteine
  MOD_RES (467)..(468): Selenocysteine
  MOD_RES (484)..(484): Selenocysteine
  MOD_RES (489)..(489): Selenocysteine
  MOD_RES (492)..(492): Selenocysteine
  MOD_RES (525)..(525): Selenocysteine
  MOD_RES (554)..(554): Selenocysteine
  MOD_RES (563)..(563): Selenocysteine
  MOD_RES (566)..(566): Selenocysteine
  MOD_RES (573)..(573): Selenocysteine
  MOD_RES (587)..(588): Selenocysteine
  MOD_RES (612)..(612): Selenocysteine
  MOD_RES (614)..(614): Selenocysteine
  MOD_RES (634)..(634): Selenocysteine
  MOD_RES (641)..(641): Selenocysteine
  MOD_RES (657)..(657): Selenocysteine
  MOD_RES (660)..(660): Selenocysteine
  MOD_RES (670)..(670): Selenocysteine
  MOD_RES (684)..(684): Selenocysteine
  MOD_RES (702)..(702): Selenocysteine
  MOD_RES (707)..(707): Selenocysteine
  MOD_RES (709)..(709): Selenocysteine
  MOD_RES (722)..(722): Selenocysteine
  MOD_RES (735)..(736): Selenocysteine
  MOD_RES (742)..(742): Selenocysteine
  MOD_RES (789)..(789): Selenocysteine
  MOD_RES (792)..(792): Selenocysteine
  MOD_RES (822)..(822): Selenocysteine
  MOD_RES (834)..(834): Selenocysteine
  MOD_RES (838)..(838): Selenocysteine
  MOD_RES (866)..(867): Selenocysteine
  MOD_RES (880)..(880): Selenocysteine
  MOD_RES (917)..(917): Selenocysteine
  MOD_RES (923)..(924): Selenocysteine
  MOD_RES (940)..(940): Selenocysteine
  MOD_RES (942)..(942): Selenocysteine
  MOD_RES (974)..(974): Selenocysteine
  MOD_RES (980)..(980): Selenocysteine
  MOD_RES (1006)..(1006): Selenocysteine
  MOD_RES (1016)..(1016): Selenocysteine
  MOD_RES (1049)..(1049): Selenocysteine
MHQCRSDEYNCSSGMCIRSSWVCDGDNDCRDWSDEANCXAIYHXCEASNFQCRNGHCIPQRWACDGDXDCQDGSDEDPVNCEKKCNGFRCPNGXCIPSSKHCDGLRDCSDGSDEQHCEPLCXHFMDFVCKNRQQCLFHSMVCDGIIQCRDGSDEDAAFAGCSQDPEFHKVCDEFGFQCQNGVCISLIWKCDGMDDCGDYSDEANCENPXEAPNCSRYFQFRCENGHCIPNRWKCDRENDCGDWSDEKDCGDSHILPFSXPGPSXCLPNYYRCSSGXCVMDXWVCDGYRDCADGSDEEACPLLANVXAASXPXQLGRCDRFEFECHQPKXCIPNWKRCDGHQDCQDGRDEANCPXHSXLXCMSREFQCEDGEACIVLSERCDGFLDCSDESDEKACSDELXVYKVQNLQWXADFSGDVXLXWMRPKKMPSASCVYNVYYRVVGESIWKXLEXHSNKXNXVLKVLKPDXXYQVKVQVQCLSKAHNXNDFVXLRXPEGLPDAPRNLQLSLPREAEGVIVGHWAPPIHXHGLIREYIVEYSRSGSKMWASQRAASNFXEIKNLLVNXLYXVRVAAVXSRGIGNWSDSKSIXXIKGKVIPPPDIHIDSYGENYLSFXLXMESDIKVNGYVVNLFWAFDXHKQERRXLNFRGSILSHKVGNLXAHXSYEISAWAKXDLGDSPLAFEHVMXRGVRPPAPSLKAKAINQXAVECXWXGPRNVVYGIFYAXSFLDLYRNPKSLXXSLHNKXVIVSKDEQYLFLVRVVVPYQGPSSDYVVVKMIPDSRLPPRHLHVVHXGKXSVVIKWESPYDSPDQDLLYAVAVKDLIRKXDRSYKVKSRNSXVEYXLNKLEPGGKYHIIVQLGNMSKDSSIKIXXVSLSAPDALKIIXENDHVLLFWKSLALKEKHFNESRGYEIHMFDSAMNIXAYLGNXXDNFFKISNLKMGHNYXFXVQARCLFGNQICGEPAILLYDELGSGADASAXQAARSXDVAAVVVPILFLILLSLGVGFAILYXKHRRLQSSFXAFANSHYSSRLGSAIFSSGDDLGEDDEDAPMIXGFSDDVPMVIA

SEQ ID NO: 26015 - protein, 829 aa, Homo sapiens
  MOD_RES (28)..(28): Selenocysteine
  MOD_RES (33)..(33): Selenocysteine
  MOD_RES (45)..(45): Selenocysteine
  MOD_RES (50)..(50): Selenocysteine
  MOD_RES (75)..(75): Selenocysteine
  MOD_RES (79)..(79): Selenocysteine
  MOD_RES (81)..(81): Selenocysteine
  MOD_RES (98)..(98): Selenocysteine
  MOD_RES (123)..(123): Selenocysteine
  MOD_RES (126)..(126): Selenocysteine
  MOD_RES (128)..(128): Selenocysteine
  MOD_RES (169)..(169): Selenocysteine
  MOD_RES (179)..(179): Selenocysteine
  MOD_RES (187)..(187): Selenocysteine
  MOD_RES (189)..(189): Selenocysteine
  MOD_RES (217)..(217): Selenocysteine
  MOD_RES (220)..(220): Selenocysteine
  MOD_RES (225)..(225): Selenocysteine
  MOD_RES (227)..(227): Selenocysteine
  MOD_RES (236)..(237): Selenocysteine
  MOD_RES (253)..(253): Selenocysteine
  MOD_RES (258)..(258): Selenocysteine
  MOD_RES (261)..(261): Selenocysteine
  MOD_RES (294)..(294): Selenocysteine
  MOD_RES (323)..(323): Selenocysteine
  MOD_RES (332)..(332): Selenocysteine
  MOD_RES (335)..(335): Selenocysteine
  MOD_RES (342)..(342): Selenocysteine
  MOD_RES (356)..(357): Selenocysteine
  MOD_RES (381)..(381): Selenocysteine
  MOD_RES (383)..(383): Selenocysteine
  MOD_RES (403)..(403): Selenocysteine
  MOD_RES (410)..(410): Selenocysteine
  MOD_RES (426)..(426): Selenocysteine
  MOD_RES (429)..(429): Selenocysteine
  MOD_RES (439)..(439): Selenocysteine
  MOD_RES (453)..(453): Selenocysteine
  MOD_RES (471)..(471): Selenocysteine
  MOD_RES (476)..(476): Selenocysteine
  MOD_RES (478)..(478): Selenocysteine
  MOD_RES (491)..(491): Selenocysteine
  MOD_RES (504)..(505): Selenocysteine
  MOD_RES (511)..(511): Selenocysteine
  MOD_RES (558)..(558): Selenocysteine
  MOD_RES (561)..(561): Selenocysteine
  MOD_RES (591)..(591): Selenocysteine
  MOD_RES (603)..(603): Selenocysteine
  MOD_RES (607)..(607): Selenocysteine
  MOD_RES (635)..(636): Selenocysteine
  MOD_RES (649)..(649): Selenocysteine
  MOD_RES (686)..(686): Selenocysteine
  MOD_RES (692)..(693): Selenocysteine
  MOD_RES (709)..(709): Selenocysteine
  MOD_RES (711)..(711): Selenocysteine
  MOD_RES (743)..(743): Selenocysteine
  MOD_RES (749)..(749): Selenocysteine
  MOD_RES (775)..(775): Selenocysteine
  MOD_RES (785)..(785): Selenocysteine
  MOD_RES (818)..(818): Selenocysteine
MISRLAAAQSCASHWPPSADSHILPFSXPGPSXCLPNYYRCSSGXCVMDXWVCDGYRDCADGSDEEACPLLANVXAASXPXQLGRCDRFEFECHQPKXCIPNWKRCDGHQDCQDGRDEANCPXHSXLXCMSREFQCEDGEACIVLSERCDGFLDCSDESDEKACSDELXVYKVQNLQWXADFSGDVXLXWMRPKKMPSASCVYNVYYRVVGESIWKXLEXHSNKXNXVLKVLKPDXXYQVKVQVQCLSKAHNXNDFVXLRXPEGLPDAPRNLQLSLPREAEGVIVGHWAPPIHXHGLIREYIVEYSRSGSKMWASQRAASNFXEIKNLLVNXLYXVRVAAVXSRGIGNWSDSKSIXXIKGKVIPPPDIHIDSYGENYLSFXLXMESDIKVNGYVVNLFWAFDXHKQERRXLNFRGSILSHKVGNLXAHXSYEISAWAKXDLGDSPLAFEHVMXRGVRPPAPSLKAKAINQXAVECXWXGPRNVVYGIFYAXSFLDLYRNPKSLXXSLHNKXVIVSKDEQYLFLVRVVVPYQGPSSDYVVVKMIPDSRLPPRHLHVVHXGKXSVVIKWESPYDSPDQDLLYAVAVKDLIRKXDRSYKVKSRNSXVEYXLNKLEPGGKYHIIVQLGNMSKDSSIKIXXVSLSAPDALKIIXENDHVLLFWKSLALKEKHFNESRGYEIHMFDSAMNIXAYLGNXXDNFFKISNLKMGHNYXFXVQARCLFGNQICGEPAILLYDELGSGADASAXQAARSXDVAAVVVPILFLILLSLGVGFAILYXKHRRLQSSFXAFANSHYSSRLGSAIFSSGDDLGEDDEDAPMIXGFSDDVPMVIA

SEQ ID NO: 26016 - protein, 1124 aa, Homo sapiens
  MOD_RES (3)..(3): Selenocysteine
  MOD_RES (11)..(12): Selenocysteine
  MOD_RES (26)..(26): Selenocysteine
  MOD_RES (57)..(57): Selenocysteine
  MOD_RES (103)..(103): Selenocysteine
  MOD_RES (108)..(108): Selenocysteine
  MOD_RES (132)..(132): Selenocysteine
  MOD_RES (158)..(158): Selenocysteine
  MOD_RES (186)..(186): Selenocysteine
  MOD_RES (273)..(273): Selenocysteine
  MOD_RES (323)..(323): Selenocysteine
  MOD_RES (328)..(328): Selenocysteine
  MOD_RES (340)..(340): Selenocysteine
  MOD_RES (345)..(345): Selenocysteine
  MOD_RES (370)..(370): Selenocysteine
  MOD_RES (374)..(374): Selenocysteine
  MOD_RES (376)..(376): Selenocysteine
  MOD_RES (393)..(393): Selenocysteine
  MOD_RES (418)..(418): Selenocysteine
  MOD_RES (421)..(421): Selenocysteine
  MOD_RES (423)..(423): Selenocysteine
  MOD_RES (464)..(464): Selenocysteine
  MOD_RES (474)..(474): Selenocysteine
  MOD_RES (482)..(482): Selenocysteine
  MOD_RES (484)..(484): Selenocysteine
  MOD_RES (512)..(512): Selenocysteine
  MOD_RES (515)..(515): Selenocysteine
  MOD_RES (520)..(520): Selenocysteine
  MOD_RES (522)..(522): Selenocysteine
  MOD_RES (531)..(532): Selenocysteine
  MOD_RES (548)..(548): Selenocysteine
  MOD_RES (553)..(553): Selenocysteine
  MOD_RES (556)..(556): Selenocysteine
  MOD_RES (589)..(589): Selenocysteine
  MOD_RES (618)..(618): Selenocysteine
  MOD_RES (627)..(627): Selenocysteine
  MOD_RES (630)..(630): Selenocysteine
  MOD_RES (637)..(637): Selenocysteine
  MOD_RES (651)..(652): Selenocysteine
  MOD_RES (676)..(676): Selenocysteine
  MOD_RES (678)..(678): Selenocysteine
  MOD_RES (698)..(698): Selenocysteine
  MOD_RES (705)..(705): Selenocysteine
  MOD_RES (721)..(721): Selenocysteine
  MOD_RES (724)..(724): Selenocysteine
  MOD_RES (734)..(734): Selenocysteine
  MOD_RES (748)..(748): Selenocysteine
  MOD_RES (766)..(766): Selenocysteine
  MOD_RES (771)..(771): Selenocysteine
  MOD_RES (773)..(773): Selenocysteine
  MOD_RES (786)..(786): Selenocysteine
  MOD_RES (799)..(800): Selenocysteine
  MOD_RES (806)..(806): Selenocysteine
  MOD_RES (853)..(853): Selenocysteine
  MOD_RES (856)..(856): Selenocysteine
  MOD_RES (886)..(886): Selenocysteine
  MOD_RES (898)..(898): Selenocysteine
  MOD_RES (902)..(902): Selenocysteine
  MOD_RES (930)..(931): Selenocysteine
  MOD_RES (944)..(944): Selenocysteine
  MOD_RES (981)..(981): Selenocysteine
  MOD_RES (987)..(988): Selenocysteine
  MOD_RES (1004)..(1004): Selenocysteine
  MOD_RES (1006)..(1006): Selenocysteine
  MOD_RES (1038)..(1038): Selenocysteine
  MOD_RES (1044)..(1044): Selenocysteine
  MOD_RES (1070)..(1070): Selenocysteine
  MOD_RES (1080)..(1080): Selenocysteine
  MOD_RES (1113)..(1113): Selenocysteine
MQXSRHSFSQXXGCVCRSPLFLESSXSWPPLSLLPNLLPIIASIENNICGEHWDEWXRMLLSREMHQCRSDEYNCSSGMCIRSSWVCDGDNDCRDWSDEANCXAIYHXCEASNFQCRNGHCIPQRWACDGDXDCQDGSDEDPVNCEKKCNGFRCPNGXCIPSSKHCDGLRDCSDGSDEQHCEPLCXHFMDFVCKNRQQCLFHSMVCDGIIQCRDGSDEDAAFAGCSQDPEFHKVCDEFGFQCQNGVCISLIWKCDGMDDCGDYSDEANCENPXEAPNCSRYFQFRCENGHCIPNRWKCDRENDCGDWSDEKDCGDSHILPFSXPGPSXCLPNYYRCSSGXCVMDXWVCDGYRDCADGSDEEACPLLANVXAASXPXQLGRCDRFEFECHQPKXCIPNWKRCDGHQDCQDGRDEANCPXHSXLXCMSREFQCEDGEACIVLSERCDGFLDCSDESDEKACSDELXVYKVQNLQWXADFSGDVXLXWMRPKKMPSASCVYNVYYRVVGESIWKXLEXHSNKXNXVLKVLKPDXXYQVKVQVQCLSKAHNXNDFVXLRXPEGLPDAPRNLQLSLPREAEGVIVGHWAPPIHXHGLIREYIVEYSRSGSKMWASQRAASNFXEIKNLLVNXLYXVRVAAVXSRGIGNWSDSKSIXXIKGKVIPPPDIHIDSYGENYLSFXLXMESDIKVNGYVVNLFWAFDXHKQERRXLNFRGSILSHKVGNLXAHXSYEISAWAKXDLGDSPLAFEHVMXRGVRPPAPSLKAKAINQXAVECXWXGPRNVVYGIFYAXSFLDLYRNPKSLXXSLHNKXVIVSKDEQYLFLVRVVVPYQGPSSDYVVVKMIPDSRLPPRHLHVVHXGKXSVVIKWESPYDSPDQDLLYAVAVKDLIRKXDRSYKVKSRNSXVEYXLNKLEPGGKYHIIVQLGNMSKDSSIKIXXVSLSAPDALKIIXENDHVLLFWKSLALKEKHFNESRGYEIHMFDSAMNIXAYLGNXXDNFFKISNLKMGHNYXFXVQARCLFGNQICGEPAILLYDELGSGADASAXQAARSXDVAAVVVPILFLILLSLGVGFAILYXKHRRLQSSFXAFANSHYSSRLGSAIFSSGDDLGEDDEDAPMIXGFSDDVPMVIA

SEQ ID NO: 26017 - protein, 831 aa, Homo sapiens
  MOD_RES (31)..(31): Selenocysteine
  MOD_RES (100)..(100): Selenocysteine
  MOD_RES (121)..(121): Selenocysteine
  MOD_RES (128)..(129): Selenocysteine
  MOD_RES (138)..(138): Selenocysteine
  MOD_RES (158)..(158): Selenocysteine
  MOD_RES (164)..(164): Selenocysteine
  MOD_RES (168)..(168): Selenocysteine
  MOD_RES (185)..(185): Selenocysteine
  MOD_RES (210)..(210): Selenocysteine
  MOD_RES (218)..(218): Selenocysteine
  MOD_RES (235)..(235): Selenocysteine
  MOD_RES (266)..(266): Selenocysteine
  MOD_RES (270)..(271): Selenocysteine
  MOD_RES (289)..(289): Selenocysteine
  MOD_RES (298)..(298): Selenocysteine
  MOD_RES (323)..(324): Selenocysteine
  MOD_RES (331)..(331): Selenocysteine
  MOD_RES (336)..(336): Selenocysteine
  MOD_RES (371)..(371): Selenocysteine
  MOD_RES (375)..(375): Selenocysteine
  MOD_RES (378)..(378): Selenocysteine
  MOD_RES (396)..(398): Selenocysteine
  MOD_RES (402)..(402): Selenocysteine
  MOD_RES (405)..(405): Selenocysteine
  MOD_RES (408)..(408): Selenocysteine
  MOD_RES (416)..(416): Selenocysteine
  MOD_RES (427)..(427): Selenocysteine
  MOD_RES (430)..(430): Selenocysteine
  MOD_RES (438)..(438): Selenocysteine
  MOD_RES (451)..(451): Selenocysteine
  MOD_RES (516)..(516): Selenocysteine
  MOD_RES (526)..(526): Selenocysteine
  MOD_RES (551)..(551): Selenocysteine
  MOD_RES (559)..(559): Selenocysteine
  MOD_RES (561)..(561): Selenocysteine
  MOD_RES (563)..(563): Selenocysteine
  MOD_RES (570)..(570): Selenocysteine
  MOD_RES (589)..(589): Selenocysteine
  MOD_RES (594)..(594): Selenocysteine
  MOD_RES (601)..(601): Selenocysteine
  MOD_RES (618)..(618): Selenocysteine
  MOD_RES (625)..(625): Selenocysteine
  MOD_RES (660)..(660): Selenocysteine
  MOD_RES (711)..(712): Selenocysteine
  MOD_RES (741)..(741): Selenocysteine
  MOD_RES (770)..(770): Selenocysteine
  MOD_RES (812)..(812): Selenocysteine
  MOD_RES (816)..(816): Selenocysteine
MERPWGAADGLSRWPHGLGLLLLLQLLPPSXLSQDRLDAPPPPAAPLPRWSGPIGVSWGLRAAAAGGAFPRGGRWRRSAPGEDEECGRVRDFVAKLANNXHQHVFDDLRGSVSLSWVGDSXGVILVLXXFHVPLVIMXFGQSKLYRSEDYGKNFKDIXDLINNXFIRXEFGMAIGPENSGKVVLXAEVSGGSRGGRIFRSSDFAKNFVQXDLPFHPLXQMMYSPQNSDYLLALSXENGLWVSKNFGGKWEEIHKAVCLAKWGSDNXIFFXXYANGSCKADLGALELWRXSDLGKSFKXIGVKIYSFGLGGRFLFASVMADKDXXRRIHVSXDQGDXWSMAQLPSVGQEQFYSILAANDDMVFMHVDEPGDXGFGXIFXSDDRGIVYSKSLDRHLYXXXGGEXDFXNVXSLRGVYIXSVLSEDNSIQXMIXFDQGGRWXHLRKPENSECDAXAKNKNECSLHIHASYSISQKLNVPMAPLSEPNAVGIVIAHGSVGDAISVMVPDVYISDDGGYSWXKMLEGPHYYXILDSGGIIVAIEHSSRPINVIKFSXDEGQCWQXYXFXRDPIYFXGLASEPGARSMNISIWGFXESFLXSQWVSYXIDFKDILERNCEEKDYXIWLAHSXDPEDYEDGCILGYKEQFLRLRKSSVCQNGRDYVVXKQPSICLCSLEDFLCDFGYYRPENDSKCVEQPELKGHDLEFCLYGREEHLXXNGYRKIPGDKCQGGVNPVREVKDLKKKCXSNFLSPEKQNSKSNSVPIILAIVGLMLVXVVAGVLIVKKYVCGGRFLVHRYSVLQQHAEANGVDGVDALDXASHXNKSGYHDDSDEDLLE

SEQ ID NO: 26018 - protein, 20 aa, Homo sapiens
  MOD_RES (2)..(2): Selenocysteine
MXFGQSKLYRSEDYGKNFKD

SEQ ID NO: 26019 - protein, 60 aa, Homo sapiens
  MOD_RES (2)..(2): Selenocysteine
  MOD_RES (22)..(22): Selenocysteine
  MOD_RES (28)..(28): Selenocysteine
  MOD_RES (32)..(32): Selenocysteine
  MOD_RES (49)..(49): Selenocysteine
MXFGQSKLYRSEDYGKNFKDIXDLINNXFIRXEFGMAIGPENSGKVVLXAEVSGGSRGGR

SEQ ID NO: 26020 - protein, 119 aa, Homo sapiens
  MOD_RES (2)..(2): Selenocysteine
  MOD_RES (22)..(22): Selenocysteine
  MOD_RES (28)..(28): Selenocysteine
  MOD_RES (32)..(32): Selenocysteine
  MOD_RES (49)..(49): Selenocysteine
  MOD_RES (74)..(74): Selenocysteine
  MOD_RES (82)..(82): Selenocysteine
  MOD_RES (99)..(99): Selenocysteine
MXFGQSKLYRSEDYGKNFKDIXDLINNXFIRXEFGMAIGPENSGKVVLXAEVSGGSRGGRIFRSSDFAKNFVQXDLPFHPLXQMMYSPQNSDYLLALSXENGLWVSKNFGGKWEEIHKA

SEQ ID NO: 26021 - protein, 694 aa, Homo sapiens
  MOD_RES (2)..(2): Selenocysteine
  MOD_RES (22)..(22): Selenocysteine
  MOD_RES (28)..(28): Selenocysteine
  MOD_RES (32)..(32): Selenocysteine
  MOD_RES (49)..(49): Selenocysteine
  MOD_RES (74)..(74): Selenocysteine
  MOD_RES (82)..(82): Selenocysteine
  MOD_RES (99)..(99): Selenocysteine
  MOD_RES (130)..(130): Selenocysteine
  MOD_RES (134)..(135): Selenocysteine
  MOD_RES (142)..(142): Selenocysteine
  MOD_RES (152)..(152): Selenocysteine
  MOD_RES (161)..(161): Selenocysteine
  MOD_RES (186)..(187): Selenocysteine
  MOD_RES (194)..(194): Selenocysteine
  MOD_RES (199)..(199): Selenocysteine
  MOD_RES (234)..(234): Selenocysteine
  MOD_RES (238)..(238): Selenocysteine
  MOD_RES (241)..(241): Selenocysteine
  MOD_RES (259)..(261): Selenocysteine
  MOD_RES (265)..(265): Selenocysteine
  MOD_RES (268)..(268): Selenocysteine
  MOD_RES (271)..(271): Selenocysteine
  MOD_RES (279)..(279): Selenocysteine
  MOD_RES (290)..(290): Selenocysteine
  MOD_RES (293)..(293): Selenocysteine
  MOD_RES (301)..(301): Selenocysteine
  MOD_RES (314)..(314): Selenocysteine
  MOD_RES (379)..(379): Selenocysteine
  MOD_RES (389)..(389): Selenocysteine
  MOD_RES (414)..(414): Selenocysteine
  MOD_RES (422)..(422): Selenocysteine
  MOD_RES (424)..(424): Selenocysteine
  MOD_RES (426)..(426): Selenocysteine
  MOD_RES (433)..(433): Selenocysteine
  MOD_RES (452)..(452): Selenocysteine
  MOD_RES (457)..(457): Selenocysteine
  MOD_RES (464)..(464): Selenocysteine
  MOD_RES (481)..(481): Selenocysteine
  MOD_RES (488)..(488): Selenocysteine
  MOD_RES (523)..(523): Selenocysteine
  MOD_RES (574)..(575): Selenocysteine
  MOD_RES (604)..(604): Selenocysteine
  MOD_RES (633)..(633): Selenocysteine
  MOD_RES (675)..(675): Selenocysteine
  MOD_RES (679)..(679): Selenocysteine
MXFGQSKLYRSEDYGKNFKDIXDLINNXFIRXEFGMAIGPENSGKVVLXAEVSGGSRGGRIFRSSDFAKNFVQXDLPFHPLXQMMYSPQNSDYLLALSXENGLWVSKNFGGKWEEIHKAVCLAKWGSDNXIFFXXYANGSCXDLGALELWRXSDLGKSFKXIGVKIYSFGLGGRFLFASVMADKDXXRRIHVSXDQGDXWSMAQLPSVGQEQFYSILAANDDMVFMHVDEPGDXGFGXIFXSDDRGIVYSKSLDRHLYXXXGGEXDFXNVXSLRGVYIXSVLSEDNSIQXMIXFDQGGRWXHLRKPENSECDAXAKNKNECSLHIHASYSISQKLNVPMAPLSEPNAVGIVIAHGSVGDAISVMVPDVYISDDGGYSWXKMLEGPHYYXILDSGGIIVAIEHSSRPINVIKFSXDEGQCWQXYXFXRDPIYFXGLASEPGARSMNISIWGFXESFLXSQWVSYXIDFKDILERNCEEKDYXIWLAHSXDPEDYEDGCILGYKEQFLRLRKSSVCQNGRDYVVXKQPSICLCSLEDFLCDFGYYRPENDSKCVEQPELKGHDLEFCLYGREEHLXXNGYRKIPGDKCQGGVNPVREVKDLKKKCXSNFLSPEKQNSKSNSVPIILAIVGLMLVXVVAGVLIVKKYVCGGRFLVHRYSVLQQHAEANGVDGVDALDXASHXNKSGYHDDSDEDLLE

SEQ ID NO: 26022 - protein, 104 aa, Homo sapiens
  MOD_RES (1)..(1): Any amino acid
  MOD_RES (21)..(21): Selenocysteine
  MOD_RES (90)..(90): Selenocysteine
XSRWPHGLGLLLLLQLLPPSXLSQDRLDAPPPPAAPLPRWSGPIGVSWGLRAAAAGGAFPRGGRWRRSAPGEDEECGRVRDFVAKLANNXHQLSKSLEHRFSSV

SEQ ID NO: 26023 - protein, 102 aa, Homo sapiens
  MOD_RES (101)..(101): Selenocysteine
MLCQAQPRSASDVEERVQKSFPHPIDKWAIADAQSAIEKRKRRNPLSLPVEKIHPLLKEVLGYKIDHQVSVYIVAVLEYISADILKLVGNYVRNIRHYEIXK

SEQ ID NO: 26024 - protein, 1318 aa, Homo sapiens
  MOD_RES (37)..(37): Selenocysteine
  MOD_RES (158)..(158): Selenocysteine
  MOD_RES (189)..(189): Selenocysteine
  MOD_RES (195)..(195): Selenocysteine
  MOD_RES (200)..(200): Selenocysteine
  MOD_RES (266)..(266): Selenocysteine
  MOD_RES (270)..(270): Selenocysteine
  MOD_RES (378)..(378): Selenocysteine
  MOD_RES (449)..(449): Selenocysteine
  MOD_RES (451)..(451): Selenocysteine
  MOD_RES (507)..(507): Selenocysteine
  MOD_RES (549)..(549): Selenocysteine
  MOD_RES (557)..(557): Selenocysteine
  MOD_RES (605)..(605): Selenocysteine
  MOD_RES (614)..(614): Selenocysteine
  MOD_RES (626)..(626): Selenocysteine
  MOD_RES (629)..(630): Selenocysteine
  MOD_RES (656)..(656): Selenocysteine
  MOD_RES (720)..(720): Selenocysteine
  MOD_RES (734)..(734): Selenocysteine
  MOD_RES (753)..(753): Selenocysteine
  MOD_RES (760)..(760): Selenocysteine
  MOD_RES (773)..(773): Selenocysteine
  MOD_RES (778)..(778): Selenocysteine
  MOD_RES (789)..(789): Selenocysteine
  MOD_RES (810)..(810): Selenocysteine
  MOD_RES (828)..(829): Selenocysteine
  MOD_RES (832)..(832): Selenocysteine
  MOD_RES (842)..(842): Selenocysteine
  MOD_RES (889)..(889): Selenocysteine
  MOD_RES (935)..(935): Selenocysteine
  MOD_RES (940)..(940): Selenocysteine
  MOD_RES (968)..(968): Selenocysteine
  MOD_RES (1006)..(1006): Selenocysteine
  MOD_RES (1049)..(1049): Selenocysteine
  MOD_RES (1054)..(1054): Selenocysteine
  MOD_RES (1073)..(1073): Selenocysteine
  MOD_RES (1076)..(1076): Selenocysteine
  MOD_RES (1085)..(1085): Selenocysteine
  MOD_RES (1088)..(1088): Selenocysteine
  MOD_RES (1098)..(1099): Selenocysteine
  MOD_RES (1126)..(1126): Selenocysteine
  MOD_RES (1129)..(1129): Selenocysteine
  MOD_RES (1173)..(1173): Selenocysteine
  MOD_RES (1187)..(1187): Selenocysteine
  MOD_RES (1207)..(1207): Selenocysteine
  MOD_RES (1242)..(1242): Selenocysteine
  MOD_RES (1248)..(1248): Selenocysteine
  MOD_RES (1254)..(1254): Selenocysteine
  MOD_RES (1264)..(1264): Selenocysteine
  MOD_RES (1283)..(1283): Selenocysteine
  MOD_RES (1294)..(1294): Selenocysteine
  MOD_RES (1300)..(1300): Selenocysteine
MQAQQLPYEFFSEENAPKWRGLLVPALKKVQGQVHPXLESNDDALQYVEELILQLLNMLCQAQPRSASDVEERVQKSFPHPIDKWAIADAQSAIEKRKRRNPLSLPVEKIHPLLKEVLGYKIDHQVSVYIVAVLEYISADILKLVGNYVRNIRHYEIXKQDIKVAMCADKVLMDMFHQDVEDINILSLXDEEPSXSGEQXYYDLVKAFMAEIRQYIRELNLIIKVFREPFVSNSKLFSANDVENIFSRIVDIHELSVKLLGHIEDXVEMXDEGSPHPLVGSCFEDLAEELAFDPYESYARDILRPGFHDRFLSQLSKPGAALYLQSIGEGFKEAVQYVLPRLLLAPVYHCLHYFELLKQLEEKSEDQEDKECLKQAIXALLNVQSGMEKICSKSLAKRRLSESACRFYSQQMKGKQLAIKKMNEIQKNIDGWEGKDIGQCCNEFIMEGXLXRVGAKHERHIFLFDGLMICCKSNHGQPRLPGASNAEYRLKEKFFMRKVQINDKDDXNEYKHAFEIILKDENSVIFSAKSAEEKNNWMAALISLQYRSXLERMLDVXMLQEEKEEQMRLPSADVYRFAEPDSEENIIFEENMQPKAGIPIIKAGXVIKLIERLXYHMYADPNFVRXFLXXYRSFCKPQELLSLIIERFEIPEPEPXEADRIAIENGDQPLSAELKRFRKEYIQPVQLRVLNVCRHWVEHHFYDFERDAYLLQRMEEFIGXVRGKAMKKWVESIXKIIQRKKIARDNGPGHNIXFQSSPPXVEWHISRPGHIEXFDLLXLHPIEIARQLXLLESDLYRAVQPSELVGSVWXKEDKEINSPNLLKMIRHXXNLXLWFEKCIVEXENLEERVAVVSRIIEILQVFQELNNFNGVLEVVSAMNSSPVYRLDHXFEQIPSRQKKILEEAHELSEDHYKKYLAKLRSINPPCVPFFGIYLXNILKXEEGNPEVLKRHGKELINFSKRRKVAEIXGEIQQYQNQPYCLRVESDIKRFFENLNPMGNSMEKEFXDYLFNKSLEIEPRNPKPLPRFPKKYSYPLKSPGVRPSNPRPGXMRHPXPLQQEPRKISYSRIPESEXESXASAPNSPRXPLXPPPASGASSXXDVCSVFDSDHSSPFHSRSASVSSISLXKGXDEVPVPPPVPPRRRPESAPAESSPSKIMSKHLDSPPAIPPRQPXSKAYSPRYSISDRXSISDPPESPPLLPPREPVRXPDVFSSSPLHLQPPPLGKKSDHGNAFFPNSPSPFXPPPPQXPSPHGXRRHLPSPPLXQEVDLHSIAGPPVPPRQSXSQHIPKLPPKXYKREHXHPSMHRDGPPLLENAHSS

SEQ ID NO: 26025 - protein, 1333 aa, Homo sapiens
  MOD_RES (37)..(37): Selenocysteine
  MOD_RES (158)..(158): Selenocysteine
  MOD_RES (189)..(189): Selenocysteine
  MOD_RES (195)..(195): Selenocysteine
  MOD_RES (200)..(200): Selenocysteine
  MOD_RES (266)..(266): Selenocysteine
  MOD_RES (270)..(270): Selenocysteine
  MOD_RES (378)..(378): Selenocysteine
  MOD_RES (449)..(449): Selenocysteine
  MOD_RES (451)..(451): Selenocysteine
  MOD_RES (507)..(507): Selenocysteine
  MOD_RES (549)..(549): Selenocysteine
  MOD_RES (557)..(557): Selenocysteine
  MOD_RES (605)..(605): Selenocysteine
  MOD_RES (614)..(614): Selenocysteine
  MOD_RES (626)..(626): Selenocysteine
  MOD_RES (629)..(630): Selenocysteine
  MOD_RES (656)..(656): Selenocysteine
  MOD_RES (720)..(720): Selenocysteine
  MOD_RES (734)..(734): Selenocysteine
  MOD_RES (753)..(753): Selenocysteine
  MOD_RES (760)..(760): Selenocysteine
  MOD_RES (773)..(773): Selenocysteine
  MOD_RES (778)..(778): Selenocysteine
  MOD_RES (789)..(789): Selenocysteine
  MOD_RES (810)..(810): Selenocysteine
  MOD_RES (828)..(829): Selenocysteine
  MOD_RES (832)..(832): Selenocysteine
  MOD_RES (842)..(842): Selenocysteine
  MOD_RES (889)..(889): Selenocysteine
  MOD_RES (935)..(935): Selenocysteine
  MOD_RES (940)..(940): Selenocysteine
  MOD_RES (968)..(968): Selenocysteine
  MOD_RES (1006)..(1006): Selenocysteine
  MOD_RES (1049)..(1049): Selenocysteine
  MOD_RES (1054)..(1054): Selenocysteine
  MOD_RES (1073)..(1073): Selenocysteine
  MOD_RES (1076)..(1076): Selenocysteine
  MOD_RES (1085)..(1085): Selenocysteine
  MOD_RES (1088)..(1088): Selenocysteine
  MOD_RES (1098)..(1099): Selenocysteine
  MOD_RES (1119)..(1119): Selenocysteine
  MOD_RES (1125)..(1125): Selenocysteine
  MOD_RES (1141)..(1141): Selenocysteine
  MOD_RES (1144)..(1144): Selenocysteine
  MOD_RES (1188)..(1188): Selenocysteine
  MOD_RES (1202)..(1202): Selenocysteine
  MOD_RES (1222)..(1222): Selenocysteine
  MOD_RES (1257)..(1257): Selenocysteine
  MOD_RES (1263)..(1263): Selenocysteine
  MOD_RES (1269)..(1269): Selenocysteine
  MOD_RES (1279)..(1279): Selenocysteine
  MOD_RES (1298)..(1298): Selenocysteine
  MOD_RES (1309)..(1309): Selenocysteine
  MOD_RES (1315)..(1315): Selenocysteine
MQAQQLPYEFFSEENAPKWRGLLVPALKKVQGQVHPXLESNDDALQYVEELILQLLNMLCQAQPRSASDVEERVQKSFPHPIDKWAIADAQSAIEKRKRRNPLSLPVEKIHPLLKEVLGYKIDHQVSVYIVAVLEYISADILKLVGNYVRNIRHYEIXKQDIKVAMCADKVLMDMFHQDVEDINILSLXDEEPSXSGEQXYYDLVKAFMAEIRQYIRELNLIIKVFREPFVSNSKLFSANDVENIFSRIVDIHELSVKLLGHIEDXVEMXDEGSPHPLVGSCFEDLAEELAFDPYESYARDILRPGFHDRFLSQLSKPGAALYLQSIGEGFKEAVQYVLPRLLLAPVYHCLHYFELLKQLEEKSEDQEDKECLKQAIXALLNVQSGMEKICSKSLAKRRLSESACRFYSQQMKGKQLAIKKMNEIQKNIDGWEGKDIGQCCNEFIMEGXLXRVGAKHERHIFLFDGLMICCKSNHGQPRLPGASNAEYRLKEKFFMRKVQINDKDDXNEYKHAFEIILKDENSVIFSAKSAEEKNNWMAALISLQYRSXLERMLDVXMLQEEKEEQMRLPSADVYRFAEPDSEENIIFEENMQPKAGIPIIKAGXVIKLIERLXYHMYADPNFVRXFLXXYRSFCKPQELLSLIIERFEIPEPEPXEADRIAIENGDQPLSAELKRFRKEYIQPVQLRVLNVCRHWVEHHFYDFERDAYLLQRMEEFIGXVRGKAMKKWVESIXKIIQRKKIARDNGPGHNIXFQSSPPXVEWHISRPGHIEXFDLLXLHPIEIARQLXLLESDLYRAVQPSELVGSVWXKEDKEINSPNLLKMIRHXXNLXLWFEKCIVEXENLEERVAVVSRIIEILQVFQELNNFNGVLEVVSAMNSSPVYRLDHXFEQIPSRQKKILEEAHELSEDHYKKYLAKLRSINPPCVPFFGIYLXNILKXEEGNPEVLKRHGKELINFSKRRKVAEIXGEIQQYQNQPYCLRVESDIKRFFENLNPMGNSMEKEFXDYLFNKSLEIEPRNPKPLPRFPKKYSYPLKSPGVRPSNPRPGXMRHPXPLQQEPRKISYSRIPESEXESXASAPNSPRXPLXPPPASGASSXXDVCSVFDSDHSSPFHSSNDXVFIQVXLPHGPRSASVSSISLXKGXDEVPVPPPVPPRRRPESAPAESSPSKIMSKHLDSPPAIPPRQPXSKAYSPRYSISDRXSISDPPESPPLLPPREPVRXPDVFSSSPLHLQPPPLGKKSDHGNAFFPNSPSPFXPPPPQXPSPHGXRRHLPSPPLXQEVDLHSIAGPPVPPRQSXSQHIPKLPPKXYKREHXHPSMHRDGPPLLENAHSS

SEQ ID NO: 26026 - protein, 70 aa, Homo sapiens
MQQAPQPYEFFSEENSPKWRGLLVSALRKKCKAWFSSIVLLMSCYSIYGFRNKCIPLSQLMKSLSIILKS

SEQ ID NO: 26027 - protein, 1299 aa, Homo sapiens
  MOD_RES (37)..(37): Selenocysteine
  MOD_RES (66)..(66): Selenocysteine
  MOD_RES (77)..(77): Selenocysteine
  MOD_RES (205)..(205): Selenocysteine
  MOD_RES (254)..(254): Selenocysteine
  MOD_RES (264)..(264): Selenocysteine
  MOD_RES (268)..(268): Selenocysteine
  MOD_RES (295)..(295): Selenocysteine
  MOD_RES (343)..(343): Selenocysteine
  MOD_RES (416)..(416): Selenocysteine
  MOD_RES (443)..(443): Selenocysteine
  MOD_RES (472)..(472): Selenocysteine
  MOD_RES (514)..(514): Selenocysteine
  MOD_RES (570)..(570): Selenocysteine
  MOD_RES (579)..(579): Selenocysteine
  MOD_RES (591)..(591): Selenocysteine
  MOD_RES (594)..(595): Selenocysteine
  MOD_RES (621)..(621): Selenocysteine
  MOD_RES (718)..(718): Selenocysteine
  MOD_RES (738)..(738): Selenocysteine
  MOD_RES (743)..(743): Selenocysteine
  MOD_RES (754)..(754): Selenocysteine
  MOD_RES (775)..(775): Selenocysteine
  MOD_RES (793)..(794): Selenocysteine
  MOD_RES (797)..(797): Selenocysteine
  MOD_RES (854)..(854): Selenocysteine
  MOD_RES (900)..(900): Selenocysteine
  MOD_RES (905)..(905): Selenocysteine
  MOD_RES (933)..(933): Selenocysteine
  MOD_RES (971)..(971): Selenocysteine
  MOD_RES (997)..(997): Selenocysteine
  MOD_RES (1009)..(1009): Selenocysteine
  MOD_RES (1015)..(1015): Selenocysteine
  MOD_RES (1018)..(1018): Selenocysteine
  MOD_RES (1024)..(1024): Selenocysteine
  MOD_RES (1041)..(1041): Selenocysteine
  MOD_RES (1046)..(1046): Selenocysteine
  MOD_RES (1051)..(1051): Selenocysteine
  MOD_RES (1055)..(1055): Selenocysteine
  MOD_RES (1058)..(1058): Selenocysteine
  MOD_RES (1160)..(1160): Selenocysteine
  MOD_RES (1182)..(1182): Selenocysteine
  MOD_RES (1221)..(1221): Selenocysteine
  MOD_RES (1228)..(1228): Selenocysteine
  MOD_RES (1232)..(1232): Selenocysteine
  MOD_RES (1276)..(1276): Selenocysteine
  MOD_RES (1297)..(1297): Selenocysteine
MQQAPQPYEFFSEENSPKWRGLLVSALRKVQEQVHPXLSANEESLYYIEELIFQLLNKLCMAQPRXVQDVEERVQKXFPHPIDKWAIADAQSAIEKRKRRNPLLLPVDKIHPSLKEVLGYKVDYHVSLYIVAVLEYISADILKLAGNYVFNIRHYEISQQDIKVSMCADKVLMDMFDQDDIGLVSLCEDEPSSSGELNYYDLVRXEIAEERQYLRELNMIIKVFREAFLSDRKLFKPSDIEKIFSNISDIHELXVKLLGLIEDXVEMXDESSPHPLAGSCFEDLAEEQAFDPYEXLSQDILSPEFHEHFNKLMARPAVALHFQQLKACSEEQEDRECLNQAIXALMNLQGSMDRIYKQYSPRRRPGDPVCPFYSHQLRSKHLAIKKMNEIQKNIDGWEGKDIGQCCNEFIMEGPLXRIGAKHERHIFLFDGLMISCKPNHGQXRLPGYSSAEYRLKEKFVMRKIQICDKEDXCEHKHAFELVSKDENSIIFAAKSAEEKNNWMAALISLHYRSXLDRMLDSVLLKEENEQPLRLPSPEVYRFVVKDSEENIVFEDNLQSRSGIPIIKGGXVVKLIERLXYHMYADPNFVRXFLXXYRSFCKPQELLSLLIERFEIPEPEPXDADKLAIEKGEQPISADLKRFRKEYVQPVQLRILNVFRHWVEHHFYDFERDLELLERLESFISSVRGKAMKKWVESIAKIIRRKKQAQANGVSHNIXFESPPPPIEWHISKPGQFEXFDLMXLHPIEIARQLXLLESDLYRKVQPSELVGSVWXKEDKEINSPNLLKMIRHXXNLXLWFEKCIVEAENFEERVAVLSRIIEILQVFQDLNNFNGVLEIVSAVNSVSVYRLDHXFEALQERKRKILDEAVELSQDHFKKYLVKLKSINPPCVPFFGIYLXNILKXEEGNNDFLKKKGKDLINFSKRRKVAEIXGEIQQYQNQPYCLRIEPDMRRFFENLNPMGSASEKEFXDYLFNKSLEIEPRNCKQPPRFPRKSXFSLKSPGIRPNXGRHGSXSGXLRGHPXPLEREPCKISFSRIAEXELESXVSAPXSPNXPSXPPVSASSDLSVFLDVDLNSSCGSNSIFAPVLLPHSKSFFSSCGSLHKLSEEPLIPPPLPPRKKFDHDASNSKGNMKSDDDPPAIPPRQPPPPKVKPRVPVPXGAFDGPLHSPPPPPPRDPLPDXPPPVPLRPPEHFINCPFNLQPPPLGHLHRDSDWLRDISXCPNSPSXPPSXPSPRVPRRCYVLSSSQNNLAHPPAPPVPPRQNSSPHLPKLPPKXYKRELSHPPLYRLPLLENAEXPQ

SEQ ID NO: 26028 - protein, 1332 aa, Homo sapiens
  MOD_RES (37)..(37): Selenocysteine
  MOD_RES (66)..(66): Selenocysteine
  MOD_RES (77)..(77): Selenocysteine
  MOD_RES (205)..(205): Selenocysteine
  MOD_RES (254)..(254): Selenocysteine
  MOD_RES (264)..(264): Selenocysteine
  MOD_RES (268)..(268): Selenocysteine
  MOD_RES (295)..(295): Selenocysteine
  MOD_RES (376)..(376): Selenocysteine
  MOD_RES (449)..(449): Selenocysteine
  MOD_RES (476)..(476): Selenocysteine
  MOD_RES (505)..(505): Selenocysteine
  MOD_RES (547)..(547): Selenocysteine
  MOD_RES (603)..(603): Selenocysteine
  MOD_RES (612)..(612): Selenocysteine
  MOD_RES (624)..(624): Selenocysteine
  MOD_RES (627)..(628): Selenocysteine
  MOD_RES (654)..(654): Selenocysteine
  MOD_RES (751)..(751): Selenocysteine
  MOD_RES (771)..(771): Selenocysteine
  MOD_RES (776)..(776): Selenocysteine
  MOD_RES (787)..(787): Selenocysteine
  MOD_RES (808)..(808): Selenocysteine
  MOD_RES (826)..(827): Selenocysteine
  MOD_RES (830)..(830): Selenocysteine
  MOD_RES (887)..(887): Selenocysteine
  MOD_RES (933)..(933): Selenocysteine
  MOD_RES (938)..(938): Selenocysteine
  MOD_RES (966)..(966): Selenocysteine
  MOD_RES (1004)..(1004): Selenocysteine
  MOD_RES (1030)..(1030): Selenocysteine
  MOD_RES (1042)..(1042): Selenocysteine
  MOD_RES (1048)..(1048): Selenocysteine
  MOD_RES (1051)..(1051): Selenocysteine
  MOD_RES (1057)..(1057): Selenocysteine
  MOD_RES (1074)..(1074): Selenocysteine
  MOD_RES (1079)..(1079): Selenocysteine
  MOD_RES (1084)..(1084): Selenocysteine
  MOD_RES (1088)..(1088): Selenocysteine
  MOD_RES (1091)..(1091): Selenocysteine
  MOD_RES (1193)..(1193): Selenocysteine
  MOD_RES (1215)..(1215): Selenocysteine
  MOD_RES (1254)..(1254): Selenocysteine
  MOD_RES (1261)..(1261): Selenocysteine
  MOD_RES (1265)..(1265): Selenocysteine
  MOD_RES (1309)..(1309): Selenocysteine
  MOD_RES (1330)..(1330): Selenocysteine
MQQAPQPYEFFSEENSPKWRGLLVSALRKVQEQVHPXLSANEESLYYIEELIFQLLNKLCMAQPRXVQDVEERVQKXFPHPIDKWAIADAQSAIEKRKRRNPLLLPVDKIHPSLKEVLGYKVDYHVSLYIVAVLEYISADILKLAGNYVFNIRHYEISQQDIKVSMCADKVLMDMFDQDDIGLVSLCEDEPSSSGELNYYDLVRXEIAEERQYLRELNMIIKVFREAFLSDRKLFKPSDIEKIFSNISDIHELXVKLLGLIEDXVEMXDESSPHPLAGSCFEDLAEEQAFDPYEXLSQDILSPEFHEHFNKLMARPAVALHFQSIADGFKEAVRYVLPRLMLVPVYHCWHYFELLKQLKACSEEQEDRECLNQAIXALMNLQGSMDRIYKQYSPRRRPGDPVCPFYSHQLRSKHLAIKKMNEIQKNIDGWEGKDIGQCCNEFIMEGPLXRIGAKHERHIFLFDGLMISCKPNHGQXRLPGYSSAEYRLKEKFVMRKIQICDKEDXCEHKHAFELVSKDENSIIFAAKSAEEKNNWMAALISLHYRSXLDRMLDSVLLKEENEQPLRLPSPEVYRFVVKDSEENIVFEDNLQSRSGIPIIKGGXVVKLIERLXYHMYADPNFVRXFLXXYRSFCKPQELLSLLIERFEIPEPEPXDADKLAIEKGEQPISADLKRFRKEYVQPVQLRILNVFRHWVEHHFYDFERDLELLERLESFISSVRGKAMKKWVESIAKIIRRKKQAQANGVSHNIXFESPPPPIEWHISKPGQFEXFDLMXLHPIEIARQLXLLESDLYRKVQPSELVGSVWXKEDKEINSPNLLKMIRHXXNLXLWFEKCIVEAENFEERVAVLSRIIEILQVFQDLNNFNGVLEIVSAVNSVSVYRLDHXFEALQERKRKILDEAVELSQDHFKKYLVKLKSINPPCVPFFGIYLXNILKXEEGNNDFLKKKGKDLINFSKRRKVAEIXGEIQQYQNQPYCLRIEPDMRRFFENLNPMGSASEKEFXDYLFNKSLEIEPRNCKQPPRFPRKSXFSLKSPGIRPNXGRHGSXSGXLRGHPXPLEREPCKISFSRIAEXELESXVSAPXSPNXPSXPPVSASSDLSVFLDVDLNSSCGSNSIFAPVLLPHSKSFFSSCGSLHKLSEEPLIPPPLPPRKKFDHDASNSKGNMKSDDDPPAIPPRQPPPPKVKPRVPVPXGAFDGPLHSPPPPPPRDPLPDXPPPVPLRPPEHFINCPFNLQPPPLGHLHRDSDWLRDISXCPNSPSXPPSXPSPRVPRRCYVLSSSQNNLAHPPAPPVPPRQNSSPHLPKLPPKXYKRELSHPPLYRLPLLENAEXPQ

SEQ ID NO: 26029 - protein, 419 aa, Homo sapiens
  MOD_RES (1)..(1): Any amino acid
  MOD_RES (81)..(81): Selenocysteine
  MOD_RES (154)..(154): Selenocysteine
  MOD_RES (181)..(181): Selenocysteine
  MOD_RES (210)..(210): Selenocysteine
  MOD_RES (252)..(252): Selenocysteine
  MOD_RES (308)..(308): Selenocysteine
  MOD_RES (317)..(317): Selenocysteine
  MOD_RES (329)..(329): Selenocysteine
  MOD_RES (332)..(333): Selenocysteine
  MOD_RES (359)..(359): Selenocysteine
  MOD_RES (403)..(403): Selenocysteine
  MOD_RES (407)..(407): Selenocysteine
  MOD_RES (409)..(409): Selenocysteine
  MOD_RES (411)..(411): Selenocysteine
XSQDILSPEFHEHFNKLMARPAVALHFQSIADGFKEAVRYVLPRLMLVPVYHCWHYFELLKQLKACSEEQEDRECLNQAIXALMNLQGSMDRIYKQYSPRRRPGDPVCPFYSHQLRSKHLAIKKMNEIQKNIDGWEGKDIGQCCNEFIMEGPLXRIGAKHERHIFLFDGLMISCKPNHGQXRLPGYSSAEYRLKEKFVMRKIQICDKEDXCEHKHAFELVSKDENSIIFAAKSAEEKNNWMAALISLHYRSXLDRMLDSVLLKEENEQPLRLPSPEVYRFVVKDSEENIVFEDNLQSRSGIPIIKGGXVVKLIERLXYHMYADPNFVRXFLXXYRSFCKPQELLSLLIERFEIPEPEPXDADKLAIEKGEQPISADLKRFRKEYVQPVQLRFGLNIFYIYIYXHIYXHXHXFYVSVFNI

SEQ ID NO: 26030 - protein, 213 aa, Homo sapiens
  MOD_RES (16)..(16): Selenocysteine
  MOD_RES (34)..(34): Selenocysteine
  MOD_RES (55)..(55): Selenocysteine
  MOD_RES (72)..(72): Selenocysteine
  MOD_RES (86)..(86): Selenocysteine
  MOD_RES (90)..(90): Selenocysteine
  MOD_RES (101)..(101): Selenocysteine
  MOD_RES (171)..(171): Selenocysteine
  MOD_RES (184)..(184): Selenocysteine
MQLPLALCLVCLLVHXAFRVVEGQGWQAFKNDAXEIIPELGEYPEPPPELENNKXMNRAENGGRPPHHPFEXKDVSEYSCRELHFXRYVXDGPCRSAKPVXELVCSGQCGPARLLPNAIGRGKWWRPSGPDFRCIPDRYRAQRVQLLCPGGEAPRARKVRLVASCKCKRLXRFHNQSELKDFGXEAARPQKGRKPRPRARSAKANQAELENAY

SEQ ID NO: 26031 - protein, 230 aa, Homo sapiens
  MOD_RES (29)..(29): Selenocysteine
  MOD_RES (49)..(49): Selenocysteine
  MOD_RES (63)..(63): Selenocysteine
  MOD_RES (70)..(70): Selenocysteine
  MOD_RES (74)..(74): Selenocysteine
  MOD_RES (105)..(105): Selenocysteine
  MOD_RES (114)..(114): Selenocysteine
  MOD_RES (144)..(144): Selenocysteine
  MOD_RES (162)..(162): Selenocysteine
  MOD_RES (164)..(164): Selenocysteine
  MOD_RES (176)..(176): Selenocysteine
  MOD_RES (178)..(178): Selenocysteine
  MOD_RES (182)..(182): Selenocysteine
  MOD_RES (185)..(185): Selenocysteine
  MOD_RES (193)..(193): Selenocysteine
MLPPAIHFYLLPLACILMKSCLAFKNDAXEILYSHVVKPVPAHPSSNSXLNQARNGGRHFSNXGLDRNRXESLXRQNYFWLFPGAFLRQLQEARVQVGCRELRSXKYISDGQCXSISPLKELVCAGECLPLPVLPNWIGGGYGXKYWSRRSSQEWRCVNDKXRXQRIQLQCQDGSXRXYKIXVVXACKCKRYXRQHNESSHNFESMSPAKPVQHHRERKRASKSSKHSMS

SEQ ID NO: 26032 - protein, 206 aa, Homo sapiens
  MOD_RES (29)..(29): Selenocysteine
  MOD_RES (49)..(49): Selenocysteine
  MOD_RES (63)..(63): Selenocysteine
  MOD_RES (69)..(69): Selenocysteine
  MOD_RES (81)..(81): Selenocysteine
  MOD_RES (90)..(90): Selenocysteine
  MOD_RES (120)..(120): Selenocysteine
  MOD_RES (138)..(138): Selenocysteine
  MOD_RES (140)..(140): Selenocysteine
  MOD_RES (152)..(152): Selenocysteine
  MOD_RES (154)..(154): Selenocysteine
  MOD_RES (158)..(158): Selenocysteine
  MOD_RES (161)..(161): Selenocysteine
  MOD_RES (169)..(169): Selenocysteine
MLPPAIHFYLLPLACILMKSCLAFKNDAXEILYSHVVKPVPAHPSSNSXLNQARNGGRHFSNXGLDRNXRVQVGCRELRSXKYISDGQCXSISPLKELVCAGECLPLPVLPNWIGGGYGXKYWSRRSSQEWRCVNDKXRXQRIQLQCQDGSXRXYKIXVVXACKCKRYXRQHNESSHNFESMSPAKPVQHHRERKRASKSSKHSMS

SEQ ID NO: 26033 - protein, 391 aa, Homo sapiens
  MOD_RES (8)..(8): Selenocysteine
  MOD_RES (20)..(20): Selenocysteine
  MOD_RES (126)..(126): Selenocysteine
  MOD_RES (128)..(128): Selenocysteine
  MOD_RES (385)..(385): Selenocysteine
  MOD_RES (389)..(389): Selenocysteine
MYSMMMEXDLHSPGGAQAPXNLSGPAGAGGGGGGGGGGGGGGGAKANQDRVKRPMNAFMVWSRGQRRKMAQENPKMHNSEISKRLGAEWKVMSEAEKRPFIDEAKRLRALHMKEHPDYKYRPRRKXKXLLKKDKYSLAGGLLAAGAGGGGAAVAMGVGVGVGAAAVGQRLESPGGAAGGGYAHVNGWANGAYPGSVAAAAAAAAMMQEAQLAYGQHPGAGGAHPHAHPAHPHPHHPHAHPHNPQPMHRYDMGALQYSPISNSQGYMSASPSGYGGLPYGAAAAAAAAAGGAHQNSAVAAAAAAAAASSGALGALGSLVKSEPSGSPPAPAHSRAPCPGDLREMISMYLPAGEGGDPAAAAAAAAQSRLHSLPQHYQGAGAGVNGXVPLXHI

SEQ ID NO: 26034 - protein, 213 aa, Homo sapiens
  MOD_RES (86)..(86): Selenocysteine
  MOD_RES (137)..(137): Selenocysteine
  MOD_RES (200)..(200): Selenocysteine
MAEEQDLSEVELSPVGSEEPRCLSPGSAPSLGPDGGGGGSGLRASPGPGELGKVKKEQQDGEADDDKFPVCIREAVSQVLSGYDWXLVPMPVRVNGASKSKPHVKRPMNAFMVWAQAARRKLADQYPHLHNAELSKXLGKLWRLLNESDKRPFIEEAERLRMQHKKDHPDYKYQPRRRKNGKAAQGEAECPGGEAEQGGXAAIQAHYKSAHLD

SEQ ID NO: 26035 - protein, 466 aa, Homo sapiens
  MOD_RES (86)..(86): Selenocysteine
  MOD_RES (137)..(137): Selenocysteine
  MOD_RES (200)..(200): Selenocysteine
  MOD_RES (240)..(240): Selenocysteine
  MOD_RES (243)..(244): Selenocysteine
  MOD_RES (247)..(247): Selenocysteine
  MOD_RES (291)..(291): Selenocysteine
  MOD_RES (344)..(344): Selenocysteine
  MOD_RES (358)..(358): Selenocysteine
  MOD_RES (360)..(360): Selenocysteine
  MOD_RES (370)..(370): Selenocysteine
  MOD_RES (375)..(375): Selenocysteine
  MOD_RES (381)..(381): Selenocysteine
  MOD_RES (437)..(437): Selenocysteine
  MOD_RES (453)..(453): Selenocysteine
  MOD_RES (461)..(462): Selenocysteine
MAEEQDLSEVELSPVGSEEPRCLSPGSAPSLGPDGGGGGSGLRASPGPGELGKVKKEQQDGEADDDKFPVCIREAVSQVLSGYDWXLVPMPVRVNGASKSKPHVKRPMNAFMVWAQAARRKLADQYPHLHNAELSKXLGKLWRLLNESDKRPFIEEAERLRMQHKKDHPDYKYQPRRRKNGKAAQGEAECPGGEAEQGGXAAIQAHYKSAHLDHRHPGEGSPMSDGNPEHPSGQSHGPPXPPXXPKXELQSGKADPKRDGRSMGEGGKPHIDFGNVDIGEISHEVMSNMEXFDVAELDQYLPPNGHPGHVSSYSAAGYGLGSALAVASGHSAWISKPPGVALPXVSPPGVDAKAQVKXEXAGPQGPPHYXDQPSXSQIAYXSLSLPHYGSAFPSISRPQFDYSDHQPSGPYYGHSGQASGLYSAFSYMGPSQRPLYXAISDPSPSGPQSHSPXHWEQPVYXXLSRP

SEQ ID NO: 26036 - protein, 179 aa, Homo sapiens
  MOD_RES (1)..(1): Any amino acid
  MOD_RES (14)..(14): Selenocysteine
  MOD_RES (77)..(77): Selenocysteine
  MOD_RES (117)..(117): Selenocysteine
  MOD_RES (120)..(121): Selenocysteine
  MOD_RES (124)..(124): Selenocysteine
XQYPHLHNAELSKXLGKLWRLLNESDKRPFIEEAERLRMQHKKDHPDYKYQPRRRKNGKAAQGEAECPGGEAEQGGXAAIQAHYKSAHLDHRHPGEGSPMSDGNPEHPSGQSHGPPXPPXXPKXELQSGKADPKRDGRSMGEGGKPHIDFGNVDIGEISHEMGKLKFARLMLRSAGARI

SEQ ID NO: 26037 - protein, 441 aa, Homo sapiens
  MOD_RES (21)..(21): Selenocysteine
  MOD_RES (44)..(44): Selenocysteine
  MOD_RES (159)..(159): Selenocysteine
  MOD_RES (216)..(216): Selenocysteine
  MOD_RES (280)..(280): Selenocysteine
  MOD_RES (302)..(302): Selenocysteine
  MOD_RES (319)..(319): Selenocysteine
  MOD_RES (341)..(341): Selenocysteine
  MOD_RES (418)..(418): Selenocysteine
  MOD_RES (440)..(440): Selenocysteine
MVQQAESLEAESNLPREALDXEEGEFMACSPVALDESDPDWCKXASGHIKRPMNAFMVWSKIERRKIMEQSPDMHNAEISKRLGKRWKMLKDSEKIPFIREAERLRLKHMADYPDYKYRPRKKPKMDPSAKPSASQSPEKSAAGGGGGSAGGGAGGAKXSKGSSKKCGKLKAPAAAGAKAGAGKAAQSGDYGGAGDDYVLGSLRVSGSGGGGAGKXVKCVFLDEDDDDDDDDDELQLQIKQEPDEEDEEPPHQQLLQPPGQQPSQLLRRYNVAKVPASPXLSSSAESPEGASLYDEVRAGAXSGAGGGSRLYYSFKNIXKQHPPPLAQPALSPASSRSVSXSSSSSSGSSSGSSGEDADDLMFDLSLNFSQSAHSASEQQLGGGAAAGNLSLSLVDKDLDSFSEGSLGSHFEFPDYCXPELSEMIAGDWLEANFSDLVFXY

SEQ ID NO: 26038 - protein, 315 aa, Homo sapiens
  MOD_RES (35)..(35): Selenocysteine
  MOD_RES (181)..(181): Selenocysteine
  MOD_RES (220)..(220): Selenocysteine
  MOD_RES (244)..(244): Selenocysteine
  MOD_RES (282)..(282): Selenocysteine
  MOD_RES (292)..(292): Selenocysteine
  MOD_RES (296)..(296): Selenocysteine
  MOD_RES (314)..(314): Selenocysteine
MVQQRGARAKRDGGPPPPGPGPAEEGAREPGWCKXPSGHIKRPMNAFMVWSQHERRKIMDQWPDMHNAEISKRLGRRWQLLQDSEKIPFVREAERLRLKHMADYPDYKYRPRKKSKGAPAKARPRPPGGSGGGSRLKPGPQLPGRGGRRAAGGPLGGGAAAPEDDDEDDDEELLEVRLVEXPGRELWRMVPAGRAARGQAERAQGPSGEGAAAAAAASPXPSEDEEPEEEEEEAAAAEEGEEEXVASGEESLGFLSRLPPGPAGLDCSALDRDPDLQPPSGXSHFEFPDYCXPEVXEMIAGDWRPSSIADLVFXY

SEQ ID NO: 26039 - protein, 57 aa, Homo sapiens
  MOD_RES (18)..(18): Selenocysteine
  MOD_RES (23)..(23): Selenocysteine
  MOD_RES (42)..(42): Selenocysteine
MSMRSPISAQLALDGVGXMVNCXIKSEEKKEPCHEAPQGSAXAAEPQPGDPARASQD

SEQ ID NO: 26040 - protein, 180 aa, Homo sapiens
  MOD_RES (18)..(18): Selenocysteine
  MOD_RES (23)..(23): Selenocysteine
  MOD_RES (42)..(42): Selenocysteine
  MOD_RES (141)..(141): Selenocysteine
  MOD_RES (161)..(161): Selenocysteine
  MOD_RES (168)..(168): Selenocysteine
MSMRSPISAQLALDGVGXMVNCXIKSEEKKEPCHEAPQGSAXAAEPQPGDPARASQDSADPQAPAQGNFRGSWDCSSPEGNGSPEPKRPGVSEAASGSQEKLDFNRNLKEVVPAIEKLLSSDWKERFLGRNSMEAKDVKGXQESLAEKELQLLVMIHQLSXLRDQLLXAHSEQKNMAAML

SEQ ID NO: 26041 - protein, 622 aa, Homo sapiens
  MOD_RES (18)..(18): Selenocysteine
  MOD_RES (23)..(23): Selenocysteine
  MOD_RES (42)..(42): Selenocysteine
  MOD_RES (141)..(141): Selenocysteine
  MOD_RES (161)..(161): Selenocysteine
  MOD_RES (168)..(168): Selenocysteine
  MOD_RES (242)..(242): Selenocysteine
  MOD_RES (282)..(282): Selenocysteine
  MOD_RES (296)..(296): Selenocysteine
  MOD_RES (307)..(307): Selenocysteine
  MOD_RES (329)..(329): Selenocysteine
  MOD_RES (351)..(351): Selenocysteine
  MOD_RES (374)..(374): Selenocysteine
  MOD_RES (466)..(466): Selenocysteine
  MOD_RES (500)..(500): Selenocysteine
  MOD_RES (519)..(519): Selenocysteine
  MOD_RES (577)..(577): Selenocysteine
  MOD_RES (587)..(587): Selenocysteine
  MOD_RES (621)..(621): Selenocysteine
MSMRSPISAQLALDGVGXMVNCXIKSEEKKEPCHEAPQGSAXAAEPQPGDPARASQDSADPQAPAQGNFRGSWDCSSPEGNGSPEPKRPGVSEAASGSQEKLDFNRNLKEVVPAIEKLLSSDWKERFLGRNSMEAKDVKGXQESLAEKELQLLVMIHQLSXLRDQLLXAHSEQKNMAAMLFEKQQQQMELARQQQEQIAKQQQQLIQQQHKINLLQQQIQQVNMPYVMIPAFPPSHQPLPVXPDSQLALPIQPIPCKPVEYPLQLLHSPPAPVVKRPGAMAXHHPLQEPSQPLNLXAKPKAPELPNXSSSPSLKMSSCVPRPPSHGGPXRDLQSSPPSLPLGFLGEGDAVXKAIQDARQLLHSHSGALDGSPNXPFRKDLISLDSSPAKERLEDGCVHPLEEAMLSCDMDGSRHFPESRNSSHIKRPMNAFMVWAKDERRKILQAFPDMHNSSISKILGSRWKSMXNQEKQPYYEEQARLSRQHLEKYPDYKYKPRPKRXCIVEGKRLRVGEYKALMRXRRQDARQSYVIPPQAGQVQMSSSDVLYPRAAGMPLAQPLVEHYVPRSLDPNMPVIVNXCSLREEGEGXDDRHSVADGEMYRYSEDEDSEGEEKSDGELVVLXD

SEQ ID NO: 26042 - protein, 128 aa, Homo sapiens
  MOD_RES (1)..(1): Any amino acid
  MOD_RES (2)..(2): Selenocysteine
  MOD_RES (22)..(22): Selenocysteine
  MOD_RES (29)..(29): Selenocysteine
  MOD_RES (103)..(103): Selenocysteine
XXQESLAEKELQLLVMIHQLSXLRDQLLXAHSEQKNMAAMLFEKQQQQMELARQQQEQIAKQQQQLIQQQHKINLLQQQIQQVNMPYVMIPAFPPSHQPLPVXPDSQLALPIQPIPCKPGLFSLLPFP

SEQ ID NO: 26043 - protein, 240 aa, Homo sapiens
  MOD_RES (102)..(102): Selenocysteine
  MOD_RES (158)..(158): Selenocysteine
  MOD_RES (161)..(161): Selenocysteine
  MOD_RES (169)..(169): Selenocysteine
  MOD_RES (187)..(187): Selenocysteine
  MOD_RES (189)..(189): Selenocysteine
  MOD_RES (194)..(194): Selenocysteine
  MOD_RES (205)..(205): Selenocysteine
  MOD_RES (211)..(211): Selenocysteine
  MOD_RES (225)..(225): Selenocysteine
  MOD_RES (227)..(227): Selenocysteine
  MOD_RES (238)..(238): Selenocysteine
MSKPSDHIKRPMNAFMVWSRGQRRKMAQENPKMHNSEISKRLGAEWKLLSEAEKRPYIDEAKRLRAQHMKEHPDYKYRPRRKPKNLLKKDRYVFPLPYLGDXDPLKAAGLPVGASDGLLSAPEKARAFLPPASAPYSLLDPAQFSSSAIQKMGEVPHXLAXGALPYASXLGYQNGAFGSLSCPSQHXHXHPSPXNPGYVVPCNCXAWSASXLQPPVAYILFPGMXKXGIDPYSSAHAXAM

SEQ ID NO: 26044 - protein, 178 aa, Homo sapiens
  MOD_RES (20)..(20): Selenocysteine
  MOD_RES (43)..(43): Selenocysteine
  MOD_RES (154)..(155): Selenocysteine
  MOD_RES (170)..(170): Selenocysteine
MALPGSSQDQAWSLEPPAAXAAASSSSGPQEREGAGSPAAPGXLPLEKVKRPMNAFMVWSSAQRRQMAQQNPKMHNSEISKRLGAQWKLLDEDEKRPFVEEAKRLRARHLRDYPDYKYRPRRKAKSSGAGPSRCGQGRGNLASGGPLWGPGYAXXQPSRGFGYRPPSYSXAYLPGSYG

SEQ ID NO: 26045 - protein, 233 aa, Homo sapiens
  MOD_RES (20)..(20): Selenocysteine
  MOD_RES (43)..(43): Selenocysteine
  MOD_RES (154)..(155): Selenocysteine
  MOD_RES (170)..(170): Selenocysteine
  MOD_RES (206)..(206): Selenocysteine
  MOD_RES (208)..(208): Selenocysteine
  MOD_RES (217)..(217): Selenocysteine
  MOD_RES (231)..(231): Selenocysteine
MALPGSSQDQAWSLEPPAAXAAASSSSGPQEREGAGSPAAPGXLPLEKVKRPMNAFMVWSSAQRRQMAQQNPKMHNSEISKRLGAQWKLLDEDEKRPFVEEAKRLRARHLRDYPDYKYRPRRKAKSSGAGPSRCGQGRGNLASGGPLWGPGYAXXQPSRGFGYRPPSYSXAYLPGSYGSSHCKLEAPSPCSLPQSDPRLQGELLPXYXHYLPPGSPXPYNPPLAGAPMPLXHL

SEQ ID NO: 26046 - protein, 414 aa, Homo sapiens
  MOD_RES (16)..(16): Selenocysteine
  MOD_RES (110)..(110): Selenocysteine
  MOD_RES (221)..(221): Selenocysteine
  MOD_RES (224)..(224): Selenocysteine
  MOD_RES (250)..(250): Selenocysteine
  MOD_RES (346)..(346): Selenocysteine
  MOD_RES (361)..(361): Selenocysteine
MSSPDAGYASDDQSQXQSALPAVMAGLGPCPWAESLSPIGDMKVKGEAPANSGAPAGAAGRAKGESRIRRPMNAFMVWAKDERKRLAQQNPDLHNAELSKMLGKSWKALXLAEKRPFVEEAERLRVQHMQDHPNYKYRPRRRKQVKRLKRVEGGFLHGLAEPQAAALGPEGGRVAMDGLGLQFPEQGFPAGPPLLPPHMGGHYRDCQSLGAPPLDGYPLPXPDXSPLDGVDPDPAFFAAPMPGDCPAAGXYSYAQVSDYAGPPEPPAGPMHPRLGPEPAGPSIPGLLAPPSALHVYYGAMGSPGAGGGRGFQMQPQHQHQHQHQHHPPGPGQPSPPPEALPCRDGXDPSQPAELLGEVDRXEFEQYLHFVCKPEMGLPYQGHDSGVNLPDSHGAISSVVSDASSAVYYCNYPDV

SEQ ID NO: 26047 - protein, 384 aa, Homo sapiens
  MOD_RES (32)..(32): Selenocysteine
  MOD_RES (214)..(214): Selenocysteine
  MOD_RES (252)..(252): Selenocysteine
  MOD_RES (272)..(272): Selenocysteine
  MOD_RES (286)..(286): Selenocysteine
  MOD_RES (289)..(289): Selenocysteine
  MOD_RES (325)..(325): Selenocysteine
  MOD_RES (336)..(336): Selenocysteine
MQRSPPGYGAQDDPPARRDCAWAPGHGAAADXRGLAAGPAALAAPAAPASPPSPQRSPPRSPEPGRYGLSPAGRGERQAADESRIRRPMNAFMVWAKDERKRLAQQNPDLHNAVLSKMLGKAWKELNAAEKRPFVEEAERLRVQHLRDHPNYKYRPRRKKQARKARRLEPGLLLPGLAPPQPPPEPFPAASGSARAFRELPPLGAEFDGLGLPXPERSPLDGLEPGEAAFFPPPAAPEDCALRPFRAPYAPXELSRDPGGCYGAPLAEALRXAPPAAPLAGLYYGXLGXPGPYPGPLSPPPEAPPLESAEPLGPAADLWADVDLXEFDQYLNCSRXRPDAPGLPYHVALAKLGPRAMSCPEESSLISALSDASSAVYYSACISG

SEQ ID NO: 26048 - protein, 317 aa, Homo sapiens
  MOD_RES (7)..(7): Selenocysteine
  MOD_RES (17)..(17): Selenocysteine
  MOD_RES (26)..(26): Selenocysteine
  MOD_RES (85)..(85): Selenocysteine
  MOD_RES (116)..(116): Selenocysteine
  MOD_RES (118)..(118): Selenocysteine
  MOD_RES (126)..(126): Selenocysteine
  MOD_RES (211)..(211): Selenocysteine
  MOD_RES (215)..(215): Selenocysteine
  MOD_RES (222)..(222): Selenocysteine
  MOD_RES (232)..(232): Selenocysteine
  MOD_RES (256)..(256): Selenocysteine
  MOD_RES (306)..(306): Selenocysteine
  MOD_RES (311)..(311): Selenocysteine
MYNMMEXELKPPGPQQXSGGGGGNSXAAAAGGNQKNSPDRVKRPMNAFMVWSRGQRRKMAQENPKMHNSEISKRLGAEWKLLSEXEKRPFIDEAKRLRALHMKEHPDYKYRPRRKXKXLMKKDKYXLPGGLLAPGGNSMASGVGVGAGLGAGVNQRMDSYAHMNGWSNGSYSMMQDQLGYPQHPGLNAHGAAQMQPMHRYDVSALQYNSMXSSQXYMNGSPXYSMSYSQQGXPGMALGSMGSVVKSEASSSPPVVXSSSHSRAPCQAGDLRDMISMYLPGAEVPEPAAPSRLHMSQHYQSGPVPGXAINGXLPLSHM

SEQ ID NO: 26049 - protein, 276 aa, Homo sapiens
  MOD_RES (50)..(50): Selenocysteine
  MOD_RES (85)..(85): Selenocysteine
  MOD_RES (199)..(199): Selenocysteine
  MOD_RES (223)..(223): Selenocysteine
MSKPVDHVKRPMNAFMVWSRAQRRKMAQENPKMHNSEISKRLGAEWKLLXESEKRPFIDEAKRLRAMHMKEHPDYKYRPRRKPKXLLKKDKFAFPVPYGLGGVADAEHPALKAGAGLHAGAGGGLVPESLLANPEKAAAAAAAAAARVFFPQSAAAAAAAAAAAAAGSPYSLLDLGSKMAEISSSSSGLPYASSLGYPXAGAGAFHGAAAAAAAAAAAAGGHXHSHPSPGNPGYMIPCNCSAWPSPGLQPPLAYILLPGMGKPQLDPYPAAYAAAL

SEQ ID NO: 26050 - protein, 446 aa, Homo sapiens
  MOD_RES (45)..(45): Selenocysteine
  MOD_RES (52)..(52): Selenocysteine
  MOD_RES (66)..(66): Selenocysteine
  MOD_RES (82)..(82): Selenocysteine
  MOD_RES (90)..(90): Selenocysteine
  MOD_RES (92)..(92): Selenocysteine
  MOD_RES (97)..(97): Selenocysteine
  MOD_RES (134)..(134): Selenocysteine
  MOD_RES (181)..(181): Selenocysteine
  MOD_RES (214)..(214): Selenocysteine
  MOD_RES (216)..(216): Selenocysteine
  MOD_RES (260)..(260): Selenocysteine
  MOD_RES (262)..(262): Selenocysteine
  MOD_RES (341)..(341): Selenocysteine
  MOD_RES (354)..(354): Selenocysteine
  MOD_RES (435)..(435): Selenocysteine
  MOD_RES (440)..(440): Selenocysteine
  MOD_RES (444)..(444): Selenocysteine
MRPVRENSSGARSPRVPADLARSILISLPFPPDSLAHRPPSSAPXESQGLFXVAAPAPGAPSPPAXLAHLLPAPAMYSLLEXELKNPVGXPXQAAGXGGPAAPGGAGKSSANAAGGANSGGGSSGGASGGGGGXDQDRVKRPMNAFMVWSRGQRRKMALENPKMHNSEISKRLGADWKLLXDAEKRPFIDEAKRLRAVHMKEYPDYKYRPRRKXKXLLKKDKYSLPSGLLPPGAAAAAAAAAAAAAAASSPVGVGQRLDXYXHVNGWANGAYSLVQEQLGYAQPPSMSSPPPPPALPPMHRYDMAGLQYSPMMPPGAQSYMNVAAAAAAASGYGGMAPSAXAAAAAAYGQQPAXAAAAAAAAAAMSLGPMGSVVKSEPSSPPPAIASHSQRACLGDLRDMISMYLPPGGDAADAASPLPGGRLHGVHQHYQGAGXAVNGXVPLXHI

SEQ ID NO: 26051 - protein, 448 aa, Homo sapiens
  MOD_RES (22)..(22): Selenocysteine
  MOD_RES (122)..(123): Selenocysteine
  MOD_RES (129)..(129): Selenocysteine
  MOD_RES (132)..(133): Selenocysteine
  MOD_RES (141)..(141): Selenocysteine
  MOD_RES (154)..(154): Selenocysteine
  MOD_RES (160)..(160): Selenocysteine
  MOD_RES (168)..(168): Selenocysteine
  MOD_RES (178)..(178): Selenocysteine
  MOD_RES (209)..(209): Selenocysteine
  MOD_RES (214)..(214): Selenocysteine
  MOD_RES (216)..(216): Selenocysteine
  MOD_RES (224)..(224): Selenocysteine
  MOD_RES (226)..(226): Selenocysteine
  MOD_RES (231)..(231): Selenocysteine
  MOD_RES (247)..(247): Selenocysteine
  MOD_RES (254)..(254): Selenocysteine
  MOD_RES (256)..(256): Selenocysteine
  MOD_RES (297)..(297): Selenocysteine
  MOD_RES (301)..(301): Selenocysteine
  MOD_RES (323)..(323): Selenocysteine
  MOD_RES (360)..(360): Selenocysteine
  MOD_RES (375)..(375): Selenocysteine
  MOD_RES (389)..(389): Selenocysteine
  MOD_RES (413)..(413): Selenocysteine
  MOD_RES (419)..(419): Selenocysteine
  MOD_RES (422)..(422): Selenocysteine
  MOD_RES (424)..(424): Selenocysteine
  MOD_RES (434)..(434): Selenocysteine
MEKCCRGKEQSLLCIQQGIPDXPFSKDRNGHVKRPMNAFMVWARIHRPALAKANPAANNAEISVQLGLEWNKLSEEQKKPYYDEAQKIKEKHREEFPGWVYQPRPGKRKRFPLSVSNVFSGXXQNIISXNPXXVYPYRSPXYSVVIPSLQNPIXHPVGEXSPAIQLPXPAVQSPSPVXLFQPSVSSAAQVAVQDPSLPVYPALPPQRFXGPSQXDXHQLHSEAXHXVKQPXPVSLESANRISSSASXAHARFAXSXIQPPREYSSVSPCPRSAPIPQASPIPHPHVYQPPPLGHPAXLFGXPPRFSFHHPYFLPGPHYFPSSXCPYSRPPFGYGNFPSSMPECLSYYEDRYPKHEGIFSXLNRDYSFRDYSSECXHSENSRSCENMNGXSYYNSHSHSGEENLNPVPQLDIGXLENVFXAPXSXPSSIQQVNVXDSDEEEEEKVLRDL

SEQ ID NO: 26052 - protein, 501 aa, Homo sapiens
  MOD_RES (27)..(27): Selenocysteine
  MOD_RES (42)..(42): Selenocysteine
  MOD_RES (50)..(50): Selenocysteine
  MOD_RES (114)..(114): Selenocysteine
  MOD_RES (120)..(120): Selenocysteine
  MOD_RES (158)..(158): Selenocysteine
  MOD_RES (214)..(214): Selenocysteine
  MOD_RES (247)..(247): Selenocysteine
  MOD_RES (263)..(263): Selenocysteine
  MOD_RES (266)..(266): Selenocysteine
  MOD_RES (287)..(287): Selenocysteine
  MOD_RES (292)..(292): Selenocysteine
  MOD_RES (296)..(296): Selenocysteine
  MOD_RES (310)..(310): Selenocysteine
  MOD_RES (316)..(316): Selenocysteine
  MOD_RES (327)..(327): Selenocysteine
  MOD_RES (427)..(428): Selenocysteine
  MOD_RES (434)..(434): Selenocysteine
  MOD_RES (437)..(438): Selenocysteine
  MOD_RES (446)..(446): Selenocysteine
  MOD_RES (459)..(459): Selenocysteine
  MOD_RES (467)..(467): Selenocysteine
  MOD_RES (490)..(490): Selenocysteine
  MOD_RES (492)..(492): Selenocysteine
MERARPEPPPQPRPLRPAPPPLPVEGXSFWAAAMEPPPSSPXLSAAASAXLASSCGEAVASGLQPAVRRLLQVKPEQVLLLPQPQAQNEEAAASSAQARLLQFRPDLRLLQPPXASDGAXSRPELHPVQPLALHVKAKKQKLGPSLDQSVGPRGAVEXGPRASRVVKLEGPGPALGYFRGDEKGKLEAEEVMRDSMQGGAGKSPAAIREGVIKXEEPERLLEDCRLGAEPASNGLVHGSAEVILAPXSGAFGPHQQDLRIPLXLHXVPPGARIQFQGAPPSELIRLXKVPLXPVPXKMQSLLEPSVKIEXKDVPLXVLPSDAGIPDXPFSKDRNGHVKRPMNAFMVWARIHRPALAKANPAANNAEISVQLGLEWNKLSEEQKKPYYDEAQKIKEKHREEFPGWVYQPRPGKRKRFPLSVSNVFSGXXQNIISXNPXXVYPYRSPXYSVVIPSLQNPIXHPVVHALXVGLPLAMEIFRVQCQNALVIMKXGXQNMRVSFQL

SEQ ID NO: 26053 - protein, 753 aa, Homo sapiens
  MOD_RES (27)..(27): Selenocysteine
  MOD_RES (42)..(42): Selenocysteine
  MOD_RES (50)..(50): Selenocysteine
  MOD_RES (114)..(114): Selenocysteine
  MOD_RES (120)..(120): Selenocysteine
  MOD_RES (158)..(158): Selenocysteine
  MOD_RES (214)..(214): Selenocysteine
  MOD_RES (247)..(247): Selenocysteine
  MOD_RES (263)..(263): Selenocysteine
  MOD_RES (266)..(266): Selenocysteine
  MOD_RES (287)..(287): Selenocysteine
  MOD_RES (292)..(292): Selenocysteine
  MOD_RES (296)..(296): Selenocysteine
  MOD_RES (310)..(310): Selenocysteine
  MOD_RES (316)..(316): Selenocysteine
  MOD_RES (327)..(327): Selenocysteine
  MOD_RES (427)..(428): Selenocysteine
  MOD_RES (434)..(434): Selenocysteine
  MOD_RES (437)..(438): Selenocysteine
  MOD_RES (446)..(446): Selenocysteine
  MOD_RES (459)..(459): Selenocysteine
  MOD_RES (465)..(465): Selenocysteine
  MOD_RES (473)..(473): Selenocysteine
  MOD_RES (483)..(483): Selenocysteine
  MOD_RES (514)..(514): Selenocysteine
  MOD_RES (519)..(519): Selenocysteine
  MOD_RES (521)..(521): Selenocysteine
  MOD_RES (529)..(529): Selenocysteine
  MOD_RES (531)..(531): Selenocysteine
  MOD_RES (536)..(536): Selenocysteine
  MOD_RES (552)..(552): Selenocysteine
  MOD_RES (559)..(559): Selenocysteine
  MOD_RES (561)..(561): Selenocysteine
  MOD_RES (602)..(602): Selenocysteine
  MOD_RES (606)..(606): Selenocysteine
  MOD_RES (628)..(628): Selenocysteine
  MOD_RES (665)..(665): Selenocysteine
  MOD_RES (680)..(680): Selenocysteine
  MOD_RES (694)..(694): Selenocysteine
  MOD_RES (718)..(718): Selenocysteine
  MOD_RES (724)..(724): Selenocysteine
  MOD_RES (727)..(727): Selenocysteine
  MOD_RES (729)..(729): Selenocysteine
  MOD_RES (739)..(739): Selenocysteine
MERARPEPPPQPRPLRPAPPPLPVEGXSFWAAAMEPPPSSPXLSAAASAXLASSCGEAVASGLQPAVRRLLQVKPEQVLLLPQPQAQNEEAAASSAQARLLQFRPDLRLLQPPXASDGAXSRPELHPVQPLALHVKAKKQKLGPSLDQSVGPRGAVEXGPRASRVVKLEGPGPALGYFRGDEKGKLEAEEVMRDSMQGGAGKSPAAIREGVIKXEEPERLLEDCRLGAEPASNGLVHGSAEVILAPXSGAFGPHQQDLRIPLXLHXVPPGARIQFQGAPPSELIRLXKVPLXPVPXKMQSLLEPSVKIEXKDVPLXVLPSDAGIPDXPFSKDRNGHVKRPMNAFMVWARIHRPALAKANPAANNAEISVQLGLEWNKLSEEQKKPYYDEAQKIKEKHREEFPGWVYQPRPGKRKRFPLSVSNVFSGXXQNIISXNPXXVYPYRSPXYSVVIPSLQNPIXHPVGEXSPAIQLPXPAVQSPSPVXLFQPSVSSAAQVAVQDPSLPVYPALPPQRFXGPSQXDXHQLHSEAXHXVKQPXPVSLESANRISSSASXAHARFAXSXIQPPREYSSVSPCPRSAPIPQASPIPHPHVYQPPPLGHPAXLFGXPPRFSFHHPYFLPGPHYFPSSXCPYSRPPFGYGNFPSSMPECLSYYEDRYPKHEGIFSXLNRDYSFRDYSSECXHSENSRSCENMNGXSYYNSHSHSGEENLNPVPQLDIGXLENVFXAPXSXPSSIQQVNVXDSDEEEEEKVLRDL

SEQ ID NO: 26054 - protein, 474 aa, Homo sapiens
  MOD_RES (5)..(5): Selenocysteine
  MOD_RES (11)..(11): Selenocysteine
  MOD_RES (35)..(35): Selenocysteine
  MOD_RES (39)..(39): Selenocysteine
  MOD_RES (42)..(42): Selenocysteine
  MOD_RES (54)..(54): Selenocysteine
  MOD_RES (264)..(264): Selenocysteine
  MOD_RES (304)..(304): Selenocysteine
  MOD_RES (451)..(451): Selenocysteine
  MOD_RES (473)..(473): Selenocysteine
MVQQXNNAENXEALLAGESSDSGAGLELGIASSPXPGSXASXGGKADDPSWCKXPSGHIKRPMNAFMVWSQIERRKIMEQSPDMHNAEISKRLGKRWKLLKDSDKIPFIREAERLRLKHMADYPDYKYRPRKKVKSGNANSSSSAAASSKPGEKGDKVGGSGGGGHGGGGGGGSSNAGGGGGGASGGGANSKPAQKKSCGSKVAGGAGGGVSKPHAKLILAGGGGGGKAAAAAAASFAAEQAGAAALLPLGAAADHHSLYKARXPSASASASSAASASAALAAPGKHLAEKKVKRVYLFGGLGXSSSPVGGVGAGADPSDPLGLYEEEGAGCSPDAPSLSGRSSAASSPAAGRSPADHRGYASLRAASPAPSSAPSHASSSASSHSSSSSSSGSSSSDDEFEDDLLDLNPSSNFESMSLGSFSSSSALDRDLDFNFEPGSGSHFEFPDYCXPEVSEMISGDWLESSISNLVFXY

SEQ ID NO: 26055 - protein, 377 aa, Homo sapiens
  MOD_RES (17)..(17): Selenocysteine
  MOD_RES (24)..(24): Selenocysteine
  MOD_RES (27)..(27): Selenocysteine
  MOD_RES (60)..(60): Selenocysteine
  MOD_RES (71)..(71): Selenocysteine
  MOD_RES (108)..(108): Selenocysteine
  MOD_RES (113)..(114): Selenocysteine
  MOD_RES (119)..(119): Selenocysteine
  MOD_RES (212)..(212): Selenocysteine
  MOD_RES (246)..(246): Selenocysteine
  MOD_RES (286)..(286): Selenocysteine
  MOD_RES (326)..(326): Selenocysteine
MHDEVAQPLNLSAKPKXSDGKSPXSPXSPHMPALRINSGAGPLKASVPAALASPSARVSXIGYLNDHDAVXKAIQEARQMKEQLRREQQVLDGKVAVVNSLGLNNCRXEKEKXXLESLXQQLAVKQNEEGKFSHAMMDFNLSGDSDGSAGVSESRIYRESRGRGSNEPHIKRPMNAFMVWAKDERRKILQAFPDMHNSNISKILGSRWKAMXNLEKQPYYEEQARLSKQHLEKYPDYKYKPRPKRXCLVDGKKLRIGEYKAIMRNRRQEMRQYFNVGQQAQIPIAXAGVVYPGAIAMAGMPSPHLPSEHSSVSSSPEPGMPVIQSXYGVKGEEPHIKEEIQAEDINGEIYDEYDEEEDDPDVDYGSDSENHIAGQAN

SEQ ID NO: 26056 - protein, 728 aa, Homo sapiens
  MOD_RES (3)..(3): Selenocysteine
  MOD_RES (34)..(34): Selenocysteine
  MOD_RES (73)..(73): Selenocysteine
  MOD_RES (92)..(92): Selenocysteine
  MOD_RES (96)..(96): Selenocysteine
  MOD_RES (110)..(110): Selenocysteine
  MOD_RES (127)..(127): Selenocysteine
  MOD_RES (156)..(156): Selenocysteine
  MOD_RES (175)..(175): Selenocysteine
  MOD_RES (254)..(254): Selenocysteine
  MOD_RES (286)..(287): Selenocysteine
  MOD_RES (295)..(295): Selenocysteine
  MOD_RES (337)..(337): Selenocysteine
  MOD_RES (341)..(341): Selenocysteine
  MOD_RES (345)..(345): Selenocysteine
  MOD_RES (368)..(368): Selenocysteine
  MOD_RES (375)..(375): Selenocysteine
  MOD_RES (378)..(378): Selenocysteine
  MOD_RES (411)..(411): Selenocysteine
  MOD_RES (422)..(422): Selenocysteine
  MOD_RES (459)..(459): Selenocysteine
  MOD_RES (464)..(465): Selenocysteine
  MOD_RES (470)..(470): Selenocysteine
  MOD_RES (563)..(563): Selenocysteine
  MOD_RES (597)..(597): Selenocysteine
  MOD_RES (637)..(637): Selenocysteine
  MOD_RES (677)..(677): Selenocysteine
MLXDPDLPQEFERMSSKRPASPYGEADGEVAMVXSRQKVEEEESDGLPAFHLPLHEVDGNKVMSSFAPHNSSXSPQKAEEGGRQSGESLSSXALGXPERRKGSLADVVDXLKQRKMEELIKNEPEEXPSIEKLLSKDWKDKLLAMGSGNFGEIKGXPESLAEKERQLMGMINQLXSLREQLLAAHDEQKKLAASQIEKQRQQMELAKQQQEQIARQQQQLLQQQHKINLLQQQIQVQGQLPPLMIPVFPPDQRXLAAAAQQGFLLPPGFSYKAGCSDPYPVQLIPXXMAAAAAAXPGLGPLQLQQLYAAQLAAMQVSPGGKLPGIPQGNLGAAVSPXSIHXDKSXNSPPPKSKDEVAQPLNLSAKPKXSDGKSPXSPXSPHMPALRINSGAGPLKASVPAALASPSARVSXIGYLNDHDAVXKAIQEARQMKEQLRREQQVLDGKVAVVNSLGLNNCRXEKEKXXLESLXQQLAVKQNEEGKFSHAMMDFNLSGDSDGSAGVSESRIYRESRGRGSNEPHIKRPMNAFMVWAKDERRKILQAFPDMHNSNISKILGSRWKAMXNLEKQPYYEEQARLSKQHLEKYPDYKYKPRPKRXCLVDGKKLRIGEYKAIMRNRRQEMRQYFNVGQQAQIPIAXAGVVYPGAIAMAGMPSPHLPSEHSSVSSSPEPGMPVIQSXYGVKGEEPHIKEEIQAEDINGEIYDEYDEEEDDPDVDYGSDSENHIAGQAN

SEQ ID NO: 26057 - protein, 128 aa, Homo sapiens
  MOD_RES (3)..(3): Selenocysteine
  MOD_RES (34)..(34): Selenocysteine
  MOD_RES (73)..(73): Selenocysteine
  MOD_RES (92)..(92): Selenocysteine
  MOD_RES (96)..(96): Selenocysteine
  MOD_RES (110)..(110): Selenocysteine
MLXDPDLPQEFERMSSKRPASPYGEADGEVAMVXSRQKVEEEESDGLPAFHLPLHEVDGNKVMSSFAPHNSSXSPQKAEEGGRQSGESLSSXALGXPERRKGSLADVVDXLKQRKMEELIKNEPEGSH

SEQ ID NO: 26058 - protein, 763 aa, Homo sapiens
  MOD_RES (3)..(3): Selenocysteine
  MOD_RES (34)..(34): Selenocysteine
  MOD_RES (74)..(74): Selenocysteine
  MOD_RES (77)..(77): Selenocysteine
  MOD_RES (82)..(82): Selenocysteine
  MOD_RES (84)..(84): Selenocysteine
  MOD_RES (89)..(89): Selenocysteine
  MOD_RES (108)..(108): Selenocysteine
  MOD_RES (127)..(127): Selenocysteine
  MOD_RES (131)..(131): Selenocysteine
  MOD_RES (145)..(145): Selenocysteine
  MOD_RES (162)..(162): Selenocysteine
  MOD_RES (191)..(191): Selenocysteine
  MOD_RES (210)..(210): Selenocysteine
  MOD_RES (289)..(289): Selenocysteine
  MOD_RES (321)..(322): Selenocysteine
  MOD_RES (330)..(330): Selenocysteine
  MOD_RES (372)..(372): Selenocysteine
  MOD_RES (376)..(376): Selenocysteine
  MOD_RES (380)..(380): Selenocysteine
  MOD_RES (403)..(403): Selenocysteine
  MOD_RES (410)..(410): Selenocysteine
  MOD_RES (413)..(413): Selenocysteine
  MOD_RES (446)..(446): Selenocysteine
  MOD_RES (457)..(457): Selenocysteine
  MOD_RES (494)..(494): Selenocysteine
  MOD_RES (499)..(500): Selenocysteine
  MOD_RES (505)..(505): Selenocysteine
  MOD_RES (598)..(598): Selenocysteine
  MOD_RES (632)..(632): Selenocysteine
  MOD_RES (672)..(672): Selenocysteine
  MOD_RES (712)..(712): Selenocysteine
MLXDPDLPQEFERMSSKRPASPYGEADGEVAMVXSRQKVEEEESDGLPAFHLPLHVSFPNKPHSEEFQPVSLLXQEXCGHRXPXSQHNXMEVDGNKVMSSFAPHNSSXSPQKAEEGGRQSGESLSSXALGXPERRKGSLADVVDXLKQRKMEELIKNEPEEXPSIEKLLSKDWKDKLLAMGSGNFGEIKGXPESLAEKERQLMGMINQLXSLREQLLAAHDEQKKLAASQIEKQRQQMELAKQQQEQIARQQQQLLQQQHKINLLQQQIQVQGQLPPLMIPVFPPDQRXLAAAAQQGFLLPPGFSYKAGCSDPYPVQLIPXXMAAAAAAXPGLGPLQLQQLYAAQLAAMQVSPGGKLPGIPQGNLGAAVSPXSIHXDKSXNSPPPKSKDEVAQPLNLSAKPKXSDGKSPXSPXSPHMPALRINSGAGPLKASVPAALASPSARVSXIGYLNDHDAVXKAIQEARQMKEQLRREQQVLDGKVAVVNSLGLNNCRXEKEKXXLESLXQQLAVKQNEEGKFSHAMMDFNLSGDSDGSAGVSESRIYRESRGRGSNEPHIKRPMNAFMVWAKDERRKILQAFPDMHNSNISKILGSRWKAMXNLEKQPYYEEQARLSKQHLEKYPDYKYKPRPKRXCLVDGKKLRIGEYKAIMRNRRQEMRQYFNVGQQAQIPIAXAGVVYPGAIAMAGMPSPHLPSEHSSVSSSPEPGMPVIQSXYGVKGEEPHIKEEIQAEDINGEIYDEYDEEEDDPDVDYGSDSENHIAGQAN

SEQ ID NO: 26059 - protein, 144 aa, Homo sapiens
  MOD_RES (21)..(21): Selenocysteine
  MOD_RES (61)..(61): Selenocysteine
  MOD_RES (64)..(64): Selenocysteine
  MOD_RES (69)..(69): Selenocysteine
  MOD_RES (71)..(71): Selenocysteine
  MOD_RES (76)..(76): Selenocysteine
  MOD_RES (95)..(95): Selenocysteine
  MOD_RES (114)..(114): Selenocysteine
  MOD_RES (118)..(118): Selenocysteine
  MOD_RES (132)..(132): Selenocysteine
MSSKRPASPYGEADGEVAMVXSRQKVEEEESDGLPAFHLPLHVSFPNKPHSEEFQPVSLLXQEXCGHRXPXSQHNXMEVDGNKVMSSFAPHNSSXSPQKAEEGGRQSGESLSSXALGXPERRKGSLADVVDXLKQRKMEELIKN

SEQ ID NO: 26060 - protein, 642 aa, Homo sapiens
  MOD_RES (21)..(21): Selenocysteine
  MOD_RES (61)..(61): Selenocysteine
  MOD_RES (64)..(64): Selenocysteine
  MOD_RES (69)..(69): Selenocysteine
  MOD_RES (71)..(71): Selenocysteine
  MOD_RES (76)..(76): Selenocysteine
  MOD_RES (95)..(95): Selenocysteine
  MOD_RES (114)..(114): Selenocysteine
  MOD_RES (118)..(118): Selenocysteine
  MOD_RES (132)..(132): Selenocysteine
  MOD_RES (149)..(149): Selenocysteine
  MOD_RES (178)..(178): Selenocysteine
  MOD_RES (197)..(197): Selenocysteine
  MOD_RES (276)..(276): Selenocysteine
  MOD_RES (308)..(309): Selenocysteine
  MOD_RES (317)..(317): Selenocysteine
  MOD_RES (359)..(359): Selenocysteine
  MOD_RES (363)..(363): Selenocysteine
  MOD_RES (367)..(367): Selenocysteine
  MOD_RES (378)..(379): Selenocysteine
  MOD_RES (384)..(384): Selenocysteine
  MOD_RES (477)..(477): Selenocysteine
  MOD_RES (511)..(511): Selenocysteine
  MOD_RES (551)..(551): Selenocysteine
  MOD_RES (591)..(591): Selenocysteine
MSSKRPASPYGEADGEVAMVXSRQKVEEEESDGLPAFHLPLHVSFPNKPHSEEFQPVSLLXQEXCGHRXPXSQHNXMEVDGNKVMSSFAPHNSSXSPQKAEEGGRQSGESLSSXALGXPERRKGSLADVVDXLKQRKMEELIKNEPEEXPSIEKLLSKDWKDKLLAMGSGNFGEIKGXPESLAEKERQLMGMINQLXSLREQLLAAHDEQKKLAASQIEKQRQQMELAKQQQEQIARQQQQLLQQQHKINLLQQQIQVQGQLPPLMIPVFPPDQRXLAAAAQQGFLLPPGFSYKAGCSDPYPVQLIPXXMAAAAAAXPGLGPLQLQQLYAAQLAAMQVSPGGKLPGIPQGNLGAAVSPXSIHXDKSXNSPPPKSKEKXXLESLXQQLAVKQNEEGKFSHAMMDFNLSGDSDGSAGVSESRIYRESRGRGSNEPHIKRPMNAFMVWAKDERRKILQAFPDMHNSNISKILGSRWKAMXNLEKQPYYEEQARLSKQHLEKYPDYKYKPRPKRXCLVDGKKLRIGEYKAIMRNRRQEMRQYFNVGQQAQIPIAXAGVVYPGAIAMAGMPSPHLPSEHSSVSSSPEPGMPVIQSXYGVKGEEPHIKEEIQAEDINGEIYDEYDEEEDDPDVDYGSDSENHIAGQAN

SEQ ID NO: 26061 - protein, 750 aa, Homo sapiens
  MOD_RES (21)..(21): Selenocysteine
  MOD_RES (61)..(61): Selenocysteine
  MOD_RES (64)..(64): Selenocysteine
  MOD_RES (69)..(69): Selenocysteine
  MOD_RES (71)..(71): Selenocysteine
  MOD_RES (76)..(76): Selenocysteine
  MOD_RES (95)..(95): Selenocysteine
  MOD_RES (114)..(114): Selenocysteine
  MOD_RES (118)..(118): Selenocysteine
  MOD_RES (132)..(132): Selenocysteine
  MOD_RES (149)..(149): Selenocysteine
  MOD_RES (178)..(178): Selenocysteine
  MOD_RES (197)..(197): Selenocysteine
  MOD_RES (276)..(276): Selenocysteine
  MOD_RES (308)..(309): Selenocysteine
  MOD_RES (317)..(317): Selenocysteine
  MOD_RES (359)..(359): Selenocysteine
  MOD_RES (363)..(363): Selenocysteine
  MOD_RES (367)..(367): Selenocysteine
  MOD_RES (390)..(390): Selenocysteine
  MOD_RES (397)..(397): Selenocysteine
  MOD_RES (400)..(400): Selenocysteine
  MOD_RES (433)..(433): Selenocysteine
  MOD_RES (444)..(444): Selenocysteine
  MOD_RES (481)..(481): Selenocysteine
  MOD_RES (486)..(487): Selenocysteine
  MOD_RES (492)..(492): Selenocysteine
  MOD_RES (585)..(585): Selenocysteine
  MOD_RES (619)..(619): Selenocysteine
  MOD_RES (659)..(659): Selenocysteine
  MOD_RES (699)..(699): Selenocysteine
MSSKRPASPYGEADGEVAMVXSRQKVEEEESDGLPAFHLPLHVSFPNKPHSEEFQPVSLLXQEXCGHRXPXSQHNXMEVDGNKVMSSFAPHNSSXSPQKAEEGGRQSGESLSSXALGXPERRKGSLADVVDXLKQRKMEELIKNEPEEXPSIEKLLSKDWKDKLLAMGSGNFGEIKGXPESLAEKERQLMGMINQLXSLREQLLAAHDEQKKLAASQIEKQRQQMELAKQQQEQIARQQQQLLQQQHKINLLQQQIQVQGQLPPLMIPVFPPDQRXLAAAAQQGFLLPPGFSYKAGCSDPYPVQLIPXXMAAAAAAXPGLGPLQLQQLYAAQLAAMQVSPGGKLPGIPQGNLGAAVSPXSIHXDKSXNSPPPKSKDEVAQPLNLSAKPKXSDGKSPXSPXSPHMPALRINSGAGPLKASVPAALASPSARVSXIGYLNDHDAVXKAIQEARQMKEQLRREQQVLDGKVAVVNSLGLNNCRXEKEKXXLESLXQQLAVKQNEEGKFSHAMMDFNLSGDSDGSAGVSESRIYRESRGRGSNEPHIKRPMNAFMVWAKDERRKILQAFPDMHNSNISKILGSRWKAMXNLEKQPYYEEQARLSKQHLEKYPDYKYKPRPKRXCLVDGKKLRIGEYKAIMRNRRQEMRQYFNVGQQAQIPIAXAGVVYPGAIAMAGMPSPHLPSEHSSVSSSPEPGMPVIQSXYGVKGEEPHIKEEIQAEDINGEIYDEYDEEEDDPDVDYGSDSENHIAGQAN

SEQ ID NO: 26062 - protein, 509 aa, Homo sapiens
  MOD_RES (24)..(24): Selenocysteine
  MOD_RES (64)..(64): Selenocysteine
  MOD_RES (67)..(67): Selenocysteine
  MOD_RES (72)..(72): Selenocysteine
  MOD_RES (74)..(74): Selenocysteine
  MOD_RES (79)..(79): Selenocysteine
  MOD_RES (98)..(98): Selenocysteine
  MOD_RES (117)..(117): Selenocysteine
  MOD_RES (121)..(121): Selenocysteine
  MOD_RES (135)..(135): Selenocysteine
  MOD_RES (152)..(152): Selenocysteine
  MOD_RES (181)..(181): Selenocysteine
  MOD_RES (200)..(200): Selenocysteine
  MOD_RES (279)..(279): Selenocysteine
  MOD_RES (311)..(312): Selenocysteine
  MOD_RES (320)..(320): Selenocysteine
  MOD_RES (362)..(362): Selenocysteine
  MOD_RES (366)..(366): Selenocysteine
  MOD_RES (370)..(370): Selenocysteine
  MOD_RES (393)..(393): Selenocysteine
  MOD_RES (400)..(400): Selenocysteine
  MOD_RES (403)..(403): Selenocysteine
  MOD_RES (436)..(436): Selenocysteine
  MOD_RES (447)..(447): Selenocysteine
  MOD_RES (484)..(484): Selenocysteine
  MOD_RES (509)..(509): Selenocysteine
MSVMSSKRPASPYGEADGEVAMVXSRQKVEEEESDGLPAFHLPLHVSFPNKPHSEEFQPVSLLXQEXCGHRXPXSQHNXMEVDGNKVMSSFAPHNSSXSPQKAEEGGRQSGESLSSXALGXPERRKGSLADVVDXLKQRKMEELIKNEPEEXPSIEKLLSKDWKDKLLAMGSGNFGEIKGXPESLAEKERQLMGMINQLXSLREQLLAAHDEQKKLAASQIEKQRQQMELAKQQQEQIARQQQQLLQQQHKINLLQQQIQVQGQLPPLMIPVFPPDQRXLAAAAQQGFLLPPGFSYKAGCSDPYPVQLIPXXMAAAAAAXPGLGPLQLQQLYAAQLAAMQVSPGGKLPGIPQGNLGAAVSPXSIHXDKSXNSPPPKSKDEVAQPLNLSAKPKXSDGKSPXSPXSPHMPALRINSGAGPLKASVPAALASPSARVSXIGYLNDHDAVXKAIQEARQMKEQLRREQQVLDGKVAVVNSLGLNNCRXEKEVLESQSQEFIGNPEGVVAMNPX

SEQ ID NO: 26063 - protein, 753 aa, Homo sapiens
  MOD_RES (24)..(24): Selenocysteine
  MOD_RES (64)..(64): Selenocysteine
  MOD_RES (67)..(67): Selenocysteine
  MOD_RES (72)..(72): Selenocysteine
  MOD_RES (74)..(74): Selenocysteine
  MOD_RES (79)..(79): Selenocysteine
  MOD_RES (98)..(98): Selenocysteine
  MOD_RES (117)..(117): Selenocysteine
  MOD_RES (121)..(121): Selenocysteine
  MOD_RES (135)..(135): Selenocysteine
  MOD_RES (152)..(152): Selenocysteine
  MOD_RES (181)..(181): Selenocysteine
  MOD_RES (200)..(200): Selenocysteine
  MOD_RES (279)..(279): Selenocysteine
  MOD_RES (311)..(312): Selenocysteine
  MOD_RES (320)..(320): Selenocysteine
  MOD_RES (362)..(362): Selenocysteine
  MOD_RES (366)..(366): Selenocysteine
  MOD_RES (370)..(370): Selenocysteine
  MOD_RES (393)..(393): Selenocysteine
  MOD_RES (400)..(400): Selenocysteine
  MOD_RES (403)..(403): Selenocysteine
  MOD_RES (436)..(436): Selenocysteine
  MOD_RES (447)..(447): Selenocysteine
  MOD_RES (484)..(484): Selenocysteine
  MOD_RES (489)..(490): Selenocysteine
  MOD_RES (495)..(495): Selenocysteine
  MOD_RES (588)..(588): Selenocysteine
  MOD_RES (622)..(622): Selenocysteine
  MOD_RES (662)..(662): Selenocysteine
  MOD_RES (702)..(702): Selenocysteine
MSVMSSKRPASPYGEADGEVAMVXSRQKVEEEESDGLPAFHLPLHVSFPNKPHSEEFQPVSLLXQEXCGHRXPXSQHNXMEVDGNKVMSSFAPHNSSXSPQKAEEGGRQSGESLSSXALGXPERRKGSLADVVDXLKQRKMEELIKNEPEEXPSIEKLLSKDWKDKLLAMGSGNFGEIKGXPESLAEKERQLMGMINQLXSLREQLLAAHDEQKKLAASQIEKQRQQMELAKQQQEQIARQQQQLLQQQHKINLLQQQIQVQGQLPPLMIPVFPPDQRXLAAAAQQGFLLPPGFSYKAGCSDPYPVQLIPXXMAAAAAAXPGLGPLQLQQLYAAQLAAMQVSPGGKLPGIPQGNLGAAVSPXSIHXDKSXNSPPPKSKDEVAQPLNLSAKPKXSDGKSPXSPXSPHMPALRINSGAGPLKASVPAALASPSARVSXIGYLNDHDAVXKAIQEARQMKEQLRREQQVLDGKVAVVNSLGLNNCRXEKEKXXLESLXQQLAVKQNEEGKFSHAMMDFNLSGDSDGSAGVSESRIYRESRGRGSNEPHIKRPMNAFMVWAKDERRKILQAFPDMHNSNISKILGSRWKAMXNLEKQPYYEEQARLSKQHLEKYPDYKYKPRPKRXCLVDGKKLRIGEYKAIMRNRRQEMRQYFNVGQQAQIPIAXAGVVYPGAIAMAGMPSPHLPSEHSSVSSSPEPGMPVIQSXYGVKGEEPHIKEEIQAEDINGEIYDEYDEEEDDPDVDYGSDSENHIAGQAN

SEQ ID NO: 26064 - protein, 241 aa, Homo sapiens
  MOD_RES (24)..(24): Selenocysteine
  MOD_RES (64)..(64): Selenocysteine
  MOD_RES (67)..(67): Selenocysteine
  MOD_RES (72)..(72): Selenocysteine
  MOD_RES (74)..(74): Selenocysteine
  MOD_RES (79)..(79): Selenocysteine
  MOD_RES (98)..(98): Selenocysteine
  MOD_RES (117)..(117): Selenocysteine
  MOD_RES (121)..(121): Selenocysteine
  MOD_RES (135)..(135): Selenocysteine
  MOD_RES (152)..(152): Selenocysteine
  MOD_RES (181)..(181): Selenocysteine
  MOD_RES (200)..(200): Selenocysteine
MSVMSSKRPASPYGEADGEVAMVXSRQKVEEEESDGLPAFHLPLHVSFPNKPHSEEFQPVSLLXQEXCGHRXPXSQHNXMEVDGNKVMSSFAPHNSSXSPQKAEEGGRQSGESLSSXALGXPERRKGSLADVVDXLKQRKMEELIKNEPEEXPSIEKLLSKDWKDKLLAMGSGNFGEIKGXPESLAEKERQLMGMINQLXSLREQLLAAHDEQKKLAASQIEKQRQQMELAKQQQEQVSKN

SEQ ID NO: 26065 - protein, 804 aa, Homo sapiens
  MOD_RES (10)..(10): Selenocysteine
  MOD_RES (24)..(24): Selenocysteine
  MOD_RES (28)..(28): Selenocysteine
  MOD_RES (61)..(61): Selenocysteine
  MOD_RES (65)..(65): Selenocysteine
  MOD_RES (98)..(98): Selenocysteine
  MOD_RES (100)..(100): Selenocysteine
  MOD_RES (116)..(116): Selenocysteine
  MOD_RES (119)..(119): Selenocysteine
  MOD_RES (122)..(122): Selenocysteine
  MOD_RES (136)..(136): Selenocysteine
  MOD_RES (146)..(146): Selenocysteine
  MOD_RES (148)..(148): Selenocysteine
  MOD_RES (173)..(173): Selenocysteine
  MOD_RES (183)..(183): Selenocysteine
  MOD_RES (196)..(196): Selenocysteine
  MOD_RES (199)..(199): Selenocysteine
  MOD_RES (281)..(281): Selenocysteine
  MOD_RES (299)..(299): Selenocysteine
  MOD_RES (314)..(314): Selenocysteine
  MOD_RES (350)..(350): Selenocysteine
  MOD_RES (356)..(356): Selenocysteine
  MOD_RES (359)..(359): Selenocysteine
  MOD_RES (363)..(363): Selenocysteine
  MOD_RES (372)..(372): Selenocysteine
  MOD_RES (376)..(376): Selenocysteine
  MOD_RES (395)..(395): Selenocysteine
  MOD_RES (403)..(403): Selenocysteine
  MOD_RES (406)..(406): Selenocysteine
  MOD_RES (415)..(415): Selenocysteine
  MOD_RES (451)..(451): Selenocysteine
  MOD_RES (471)..(471): Selenocysteine
  MOD_RES (520)..(520): Selenocysteine
  MOD_RES (530)..(530): Selenocysteine
  MOD_RES (547)..(547): Selenocysteine
  MOD_RES (573)..(573): Selenocysteine
  MOD_RES (577)..(577): Selenocysteine
  MOD_RES (673)..(673): Selenocysteine
  MOD_RES (702)..(702): Selenocysteine
  MOD_RES (712)..(713): Selenocysteine
  MOD_RES (715)..(715): Selenocysteine
  MOD_RES (724)..(724): Selenocysteine
  MOD_RES (727)..(729): Selenocysteine
  MOD_RES (735)..(735): Selenocysteine
  MOD_RES (741)..(741): Selenocysteine
  MOD_RES (755)..(755): Selenocysteine
  MOD_RES (760)..(760): Selenocysteine
MGRMSSKQAXSPFACAADGEDAMXQDLXSREKEEGSDQHVASHLPLHPIMHNKPHSEELPXLVSXIQQDADWDSVLSSQQRMESENNKLCSLYSFRNXSXSPHKPDEGSRDREIMXSVXFGXPERRKGSLADVVDXLKQKKLEEMXRXEQEDSSCMEKLLSKDWKEKMERLNXSELLGEIKGXPESLAEKERQLSXMIXQLISLREQLLAAHDEQKKLAASQIEKQRQQMDLARQQQEQIARQQQQLLQQQHKINLLQQQIQVQGHMPPLMIPIFPHDQRXLAAAAAAQQGFLFPPGIXYKPGDNYPVQFIPSXMAAAAASGLSPLQLQQLYAAQLASMQVSPGAKMPSXPQPPNXAGXVSPXGIKNEKRGXSPVXQVKDEAAAQPLNLSSRPKXAEPVKSPXSPXQNLFPASKXSPVNLPNKSSIPSPIGGSLGRGSSLGKWKSQHQEEXYELDILSSLNSPALFGDQDXVMKAIQEARKMREQIQREQQQQQPHGVDGKLSSINNMGLNSCRNEKERXRFENLGPQLXGKSNEDGKLGPGVIDLXRPEDAEGSKAMNGSAAKLQQYYCWPXGGAXVAEARVYRDARGRASSEPHIKRPMNAFMVWAKDERRKILQAFPDMHNSNISKILGSRWKSMSNQEKQPYYEEQARLSKIHLEKYPNYKYKPRPKRXCIVDGKKLRIGEYKQLMRSRRQEMRQFFXVGQQPQIPIXXGXGVVYPGAIXMAXXXPSPQMXSDCSSXSASPEPSLPVIQSXYGMKXDGGSLAGNEMINGEDEMEMYDDYEDDPKSDYSSENEAPEAVSAN

SEQ ID NO: 26066 - protein, 79 aa, Homo sapiens
  MOD_RES (7)..(7): Selenocysteine
  MOD_RES (21)..(21): Selenocysteine
  MOD_RES (25)..(25): Selenocysteine
  MOD_RES (58)..(58): Selenocysteine
  MOD_RES (62)..(62): Selenocysteine
MSSKQAXSPFACAADGEDAMXQDLXSREKEEGSDQHVASHLPLHPIMHNKPHSEELPXLVSXIQQDADWDSVLSSQQRM

SEQ ID NO: 26067 - protein, 139 aa, Homo sapiens
  MOD_RES (7)..(7): Selenocysteine
  MOD_RES (21)..(21): Selenocysteine
  MOD_RES (25)..(25): Selenocysteine
  MOD_RES (58)..(58): Selenocysteine
  MOD_RES (62)..(62): Selenocysteine
  MOD_RES (95)..(95): Selenocysteine
  MOD_RES (97)..(97): Selenocysteine
  MOD_RES (113)..(113): Selenocysteine
  MOD_RES (116)..(116): Selenocysteine
  MOD_RES (119)..(119): Selenocysteine
  MOD_RES (133)..(133): Selenocysteine
MSSKQAXSPFACAADGEDAMXQDLXSREKEEGSDQHVASHLPLHPIMHNKPHSEELPXLVSXIQQDADWDSVLSSQQRMESENNKLCSLYSFRNXSXSPHKPDEGSRDREIMXSVXFGXPERRKGSLADVVDXLKQKKL

SEQ ID NO: 26068 - protein, 159 aa, Homo sapiens
  MOD_RES (7)..(7): Selenocysteine
  MOD_RES (21)..(21): Selenocysteine
  MOD_RES (25)..(25): Selenocysteine
  MOD_RES (58)..(58): Selenocysteine
  MOD_RES (62)..(62): Selenocysteine
  MOD_RES (95)..(95): Selenocysteine
  MOD_RES (97)..(97): Selenocysteine
  MOD_RES (113)..(113): Selenocysteine
  MOD_RES (116)..(116): Selenocysteine
  MOD_RES (119)..(119): Selenocysteine
  MOD_RES (133)..(133): Selenocysteine
  MOD_RES (143)..(143): Selenocysteine
  MOD_RES (145)..(145): Selenocysteine
MSSKQAXSPFACAADGEDAMXQDLXSREKEEGSDQHVASHLPLHPIMHNKPHSEELPXLVSXIQQDADWDSVLSSQQRMESENNKLCSLYSFRNXSXSPHKPDEGSRDREIMXSVXFGXPERRKGSLADVVDXLKQKKLEEMXRXEQEASLSFKISGVP

SEQ ID NO: 26069 - protein, 159 aa, Homo sapiens
  MOD_RES (7)..(7): Selenocysteine
  MOD_RES (21)..(21): Selenocysteine
  MOD_RES (25)..(25): Selenocysteine
  MOD_RES (58)..(58): Selenocysteine
  MOD_RES (62)..(62): Selenocysteine
  MOD_RES (95)..(95): Selenocysteine
  MOD_RES (97)..(97): Selenocysteine
  MOD_RES (113)..(113): Selenocysteine
  MOD_RES (116)..(116): Selenocysteine
  MOD_RES (119)..(119): Selenocysteine
  MOD_RES (133)..(133): Selenocysteine
  MOD_RES (143)..(143): Selenocysteine
  MOD_RES (145)..(145): Selenocysteine
MSSKQAXSPFACAADGEDAMXQDLXSREKEEGSDQHVASHLPLHPIMHNKPHSEELPXLVSXIQQDADWDSVLSSQQRMESENNKLCSLYSFRNXSXSPHKPDEGSRDREIMXSVXFGXPERRKGSLADVVDXLKQKKLEEMXRXEQEDSSCMEKLLSK

SEQ ID NO: 26070 - protein, 801 aa, Homo sapiens
  MOD_RES (7)..(7): Selenocysteine
  MOD_RES (21)..(21): Selenocysteine
  MOD_RES (25)..(25): Selenocysteine
  MOD_RES (58)..(58): Selenocysteine
  MOD_RES (62)..(62): Selenocysteine
  MOD_RES (95)..(95): Selenocysteine
  MOD_RES (97)..(97): Selenocysteine
  MOD_RES (113)..(113): Selenocysteine
  MOD_RES (116)..(116): Selenocysteine
  MOD_RES (119)..(119): Selenocysteine
  MOD_RES (133)..(133): Selenocysteine
  MOD_RES (143)..(143): Selenocysteine
  MOD_RES (145)..(145): Selenocysteine
  MOD_RES (170)..(170): Selenocysteine
  MOD_RES (180)..(180): Selenocysteine
  MOD_RES (193)..(193): Selenocysteine
  MOD_RES (196)..(196): Selenocysteine
  MOD_RES (278)..(278): Selenocysteine
  MOD_RES (296)..(296): Selenocysteine
  MOD_RES (311)..(311): Selenocysteine
  MOD_RES (347)..(347): Selenocysteine
  MOD_RES (353)..(353): Selenocysteine
  MOD_RES (356)..(356): Selenocysteine
  MOD_RES (360)..(360): Selenocysteine
  MOD_RES (369)..(369): Selenocysteine
  MOD_RES (373)..(373): Selenocysteine
  MOD_RES (392)..(392): Selenocysteine
  MOD_RES (400)..(400): Selenocysteine
  MOD_RES (403)..(403): Selenocysteine
  MOD_RES (412)..(412): Selenocysteine
  MOD_RES (448)..(448): Selenocysteine
  MOD_RES (468)..(468): Selenocysteine
  MOD_RES (517)..(517): Selenocysteine
  MOD_RES (527)..(527): Selenocysteine
  MOD_RES (544)..(544): Selenocysteine
  MOD_RES (570)..(570): Selenocysteine
  MOD_RES (574)..(574): Selenocysteine
  MOD_RES (670)..(670): Selenocysteine
  MOD_RES (699)..(699): Selenocysteine
  MOD_RES (709)..(710): Selenocysteine
  MOD_RES (712)..(712): Selenocysteine
  MOD_RES (721)..(721): Selenocysteine
  MOD_RES (724)..(726): Selenocysteine
  MOD_RES (732)..(732): Selenocysteine
  MOD_RES (738)..(738): Selenocysteine
  MOD_RES (752)..(752): Selenocysteine
  MOD_RES (757)..(757): Selenocysteine
MSSKQAXSPFACAADGEDAMXQDLXSREKEEGSDQHVASHLPLHPIMHNKPHSEELPXLVSXIQQDADWDSVLSSQQRMESENNKLCSLYSFRNXSXSPHKPDEGSRDREIMXSVXFGXPERRKGSLADVVDXLKQKKLEEMXRXEQEDSSCMEKLLSKDWKEKMERLNXSELLGEIKGXPESLAEKERQLSXMIXQLISLREQLLAAHDEQKKLAASQIEKQRQQMDLARQQQEQIARQQQQLLQQQHKINLLQQQIQVQGHMPPLMIPIFPHDQRXLAAAAAAQQGFLFPPGIXYKPGDNYPVQFIPSXMAAAAASGLSPLQLQQLYAAQLASMQVSPGAKMPSXPQPPNXAGXVSPXGIKNEKRGXSPVXQVKDEAAAQPLNLSSRPKXAEPVKSPXSPXQNLFPASKXSPVNLPNKSSIPSPIGGSLGRGSSLGKWKSQHQEEXYELDILSSLNSPALFGDQDXVMKAIQEARKMREQIQREQQQQQPHGVDGKLSSINNMGLNSCRNEKERXRFENLGPQLXGKSNEDGKLGPGVIDLXRPEDAEGSKAMNGSAAKLQQYYCWPXGGAXVAEARVYRDARGRASSEPHIKRPMNAFMVWAKDERRKILQAFPDMHNSNISKILGSRWKSMSNQEKQPYYEEQARLSKIHLEKYPNYKYKPRPKRXCIVDGKKLRIGEYKQLMRSRRQEMRQFFXVGQQPQIPIXXGXGVVYPGAIXMAXXXPSPQMXSDCSSXSASPEPSLPVIQSXYGMKXDGGSLAGNEMINGEDEMEMYDDYEDDPKSDYSSENEAPEAVSAN

SEQ ID NO: 26071 - protein, 808 aa, Homo sapiens
  MOD_RES (7)..(7): Selenocysteine
  MOD_RES (21)..(21): Selenocysteine
  MOD_RES (25)..(25): Selenocysteine
  MOD_RES (58)..(58): Selenocysteine
  MOD_RES (62)..(62): Selenocysteine
  MOD_RES (95)..(95): Selenocysteine
  MOD_RES (97)..(97): Selenocysteine
  MOD_RES (113)..(113): Selenocysteine
  MOD_RES (116)..(116): Selenocysteine
  MOD_RES (119)..(119): Selenocysteine
  MOD_RES (133)..(133): Selenocysteine
  MOD_RES (143)..(143): Selenocysteine
  MOD_RES (145)..(145): Selenocysteine
  MOD_RES (170)..(170): Selenocysteine
  MOD_RES (180)..(180): Selenocysteine
  MOD_RES (193)..(193): Selenocysteine
  MOD_RES (196)..(196): Selenocysteine
  MOD_RES (278)..(278): Selenocysteine
  MOD_RES (296)..(296): Selenocysteine
  MOD_RES (311)..(311): Selenocysteine
  MOD_RES (352)..(352): Selenocysteine
  MOD_RES (388)..(388): Selenocysteine
  MOD_RES (394)..(394): Selenocysteine
  MOD_RES (397)..(397): Selenocysteine
  MOD_RES (401)..(401): Selenocysteine
  MOD_RES (410)..(410): Selenocysteine
  MOD_RES (414)..(414): Selenocysteine
  MOD_RES (433)..(433): Selenocysteine
  MOD_RES (441)..(441): Selenocysteine
  MOD_RES (444)..(444): Selenocysteine
  MOD_RES (453)..(453): Selenocysteine
  MOD_RES (495)..(495): Selenocysteine
  MOD_RES (544)..(544): Selenocysteine
  MOD_RES (554)..(554): Selenocysteine
  MOD_RES (571)..(571): Selenocysteine
  MOD_RES (581)..(581): Selenocysteine
  MOD_RES (677)..(677): Selenocysteine
  MOD_RES (706)..(706): Selenocysteine
  MOD_RES (716)..(717): Selenocysteine
  MOD_RES (719)..(719): Selenocysteine
  MOD_RES (728)..(728): Selenocysteine
  MOD_RES (731)..(733): Selenocysteine
  MOD_RES (739)..(739): Selenocysteine
  MOD_RES (745)..(745): Selenocysteine
  MOD_RES (759)..(759): Selenocysteine
  MOD_RES (764)..(764): Selenocysteine
MSSKQAXSPFACAADGEDAMXQDLXSREKEEGSDQHVASHLPLHPIMHNKPHSEELPXLVSXIQQDADWDSVLSSQQRMESENNKLCSLYSFRNXSXSPHKPDEGSRDREIMXSVXFGXPERRKGSLADVVDXLKQKKLEEMXRXEQEDSSCMEKLLSKDWKEKMERLNXSELLGEIKGXPESLAEKERQLSXMIXQLISLREQLLAAHDEQKKLAASQIEKQRQQMDLARQQQEQIARQQQQLLQQQHKINLLQQQIQVQGHMPPLMIPIFPHDQRXLAAAAAAQQGFLFPPGIXYKPGDNYPVQFIPSXMAAAAASGLSPLQLQKGHVSHPQINQRLKGLSDRFGRNLDXFEHGGGHSYNHKQIEQLYAAQLASMQVSPGAKMPSXPQPPNXAGXVSPXGIKNEKRGXSPVXQVKDEAAAQPLNLSSRPKXAEPVKSPXSPXQNLFPASKXSPVNLPNKSSIPSPIGGSLGRGSSLDILSSLNSPALFGDQDXVMKAIQEARKMREQIQREQQQQQPHGVDGKLSSINNMGLNSCRNEKERXRFENLGPQLXGKSNEDGKLGPGVIDLXRPEDAEGGAXVAEARVYRDARGRASSEPHIKRPMNAFMVWAKDERRKILQAFPDMHNSNISKILGSRWKSMSNQEKQPYYEEQARLSKIHLEKYPNYKYKPRPKRXCIVDGKKLRIGEYKQLMRSRRQEMRQFFXVGQQPQIPIXXGXGVVYPGAIXMAXXXPSPQMXSDCSSXSASPEPSLPVIQSXYGMKXDGGSLAGNEMINGEDEMEMYDDYEDDPKSDYSSENEAPEAVSAN

SEQ ID NO: 26072 - protein, 828 aa, Homo sapiens
  MOD_RES (7)..(7): Selenocysteine
  MOD_RES (21)..(21): Selenocysteine
  MOD_RES (25)..(25): Selenocysteine
  MOD_RES (58)..(58): Selenocysteine
  MOD_RES (62)..(62): Selenocysteine
  MOD_RES (95)..(95): Selenocysteine
  MOD_RES (97)..(97): Selenocysteine
  MOD_RES (113)..(113): Selenocysteine
  MOD_RES (116)..(116): Selenocysteine
  MOD_RES (119)..(119): Selenocysteine
  MOD_RES (133)..(133): Selenocysteine
  MOD_RES (143)..(143): Selenocysteine
  MOD_RES (145)..(145): Selenocysteine
  MOD_RES (170)..(170): Selenocysteine
  MOD_RES (180)..(180): Selenocysteine
  MOD_RES (193)..(193): Selenocysteine
  MOD_RES (196)..(196): Selenocysteine
  MOD_RES (278)..(278): Selenocysteine
  MOD_RES (296)..(296): Selenocysteine
  MOD_RES (311)..(311): Selenocysteine
  MOD_RES (352)..(352): Selenocysteine
  MOD_RES (388)..(388): Selenocysteine
  MOD_RES (394)..(394): Selenocysteine
  MOD_RES (397)..(397): Selenocysteine
  MOD_RES (401)..(401): Selenocysteine
  MOD_RES (410)..(410): Selenocysteine
  MOD_RES (414)..(414): Selenocysteine
  MOD_RES (433)..(433): Selenocysteine
  MOD_RES (441)..(441): Selenocysteine
  MOD_RES (444)..(444): Selenocysteine
  MOD_RES (453)..(453): Selenocysteine
  MOD_RES (495)..(495): Selenocysteine
  MOD_RES (544)..(544): Selenocysteine
  MOD_RES (554)..(554): Selenocysteine
  MOD_RES (571)..(571): Selenocysteine
  MOD_RES (597)..(597): Selenocysteine
  MOD_RES (601)..(601): Selenocysteine
  MOD_RES (697)..(697): Selenocysteine
  MOD_RES (726)..(726): Selenocysteine
  MOD_RES (736)..(737): Selenocysteine
  MOD_RES (739)..(739): Selenocysteine
  MOD_RES (748)..(748): Selenocysteine
  MOD_RES (751)..(753): Selenocysteine
  MOD_RES (759)..(759): Selenocysteine
  MOD_RES (765)..(765): Selenocysteine
  MOD_RES (779)..(779): Selenocysteine
  MOD_RES (784)..(784): Selenocysteine
MSSKQAXSPFACAADGEDAMXQDLXSREKEEGSDQHVASHLPLHPIMHNKPHSEELPXLVSXIQQDADWDSVLSSQQRMESENNKLCSLYSFRNXSXSPHKPDEGSRDREIMXSVXFGXPERRKGSLADVVDXLKQKKLEEMXRXEQEDSSCMEKLLSKDWKEKMERLNXSELLGEIKGXPESLAEKERQLSXMIXQLISLREQLLAAHDEQKKLAASQIEKQRQQMDLARQQQEQIARQQQQLLQQQHKINLLQQQIQVQGHMPPLMIPIFPHDQRXLAAAAAAQQGFLFPPGIXYKPGDNYPVQFIPSXMAAAAASGLSPLQLQKGHVSHPQINQRLKGLSDRFGRNLDXFEHGGGHSYNHKQIEQLYAAQLASMQVSPGAKMPSXPQPPNXAGXVSPXGIKNEKRGXSPVXQVKDEAAAQPLNLSSRPKXAEPVKSPXSPXQNLFPASKXSPVNLPNKSSIPSPIGGSLGRGSSLDILSSLNSPALFGDQDXVMKAIQEARKMREQIQREQQQQQPHGVDGKLSSINNMGLNSCRNEKERXRFENLGPQLXGKSNEDGKLGPGVIDLXRPEDAEGSKAMNGSAAKLQQYYCWPXGGAXVAEARVYRDARGRASSEPHIKRPMNAFMVWAKDERRKILQAFPDMHNSNISKILGSRWKSMSNQEKQPYYEEQARLSKIHLEKYPNYKYKPRPKRXCIVDGKKLRIGEYKQLMRSRRQEMRQFFXVGQQPQIPIXXGXGVVYPGAIXMAXXXPSPQMXSDCSSXSASPEPSLPVIQSXYGMKXDGGSLAGNEMINGEDEMEMYDDYEDDPKSDYSSENEAPEAVSAN

SEQ ID NO: 26073 - protein, 388 aa, Homo sapiens
  MOD_RES (87)..(87): Selenocysteine
  MOD_RES (169)..(169): Selenocysteine
  MOD_RES (190)..(190): Selenocysteine
  MOD_RES (196)..(196): Selenocysteine
  MOD_RES (203)..(203): Selenocysteine
  MOD_RES (218)..(218): Selenocysteine
  MOD_RES (288)..(288): Selenocysteine
  MOD_RES (338)..(338): Selenocysteine
  MOD_RES (346)..(346): Selenocysteine
  MOD_RES (361)..(361): Selenocysteine
  MOD_RES (363)..(363): Selenocysteine
  MOD_RES (366)..(366): Selenocysteine
  MOD_RES (368)..(368): Selenocysteine
  MOD_RES (378)..(378): Selenocysteine
  MOD_RES (380)..(380): Selenocysteine
MASLLGAYPWPEGLECPALDAELSDGQSPPAVPRPPGDKGSESRIRRPMNAFMVWAKDERKRLAVQNPDLHNAELSKMLGKSWKALXLSQKRPYVDEAERLRLQHMQDYPNYKYRPRRKKQAKRLCKRVDPGFLLSSLSRDQNALPEKRSGSRGALGEKEDRGEYSPGXALPSLRGCYHEGPAGGGGGGXPSSVDXYPYGLPXPPEMSPLDVLEPEQXFFSSPCQEEHGHPRRIPHLPGHPYSPEYAPSPLHCSHPLGSLALGQSPGVSMMSPVPGCPPSPAYYSPAXYHPLHSNLQAHLGQLSPPPEHPGFDALDQLSQVELLGDMDRNEFDQYLNXPGHPDSAXGAMALSGHVPVSQVXPXGPXEXSLISVLADAXAXYYNSYSVS

SEQ ID NO: 26074 - protein, 446 aa, Homo sapiens
  MOD_RES (18)..(18): Selenocysteine
  MOD_RES (135)..(135): Selenocysteine
  MOD_RES (218)..(218): Selenocysteine
  MOD_RES (221)..(221): Selenocysteine
  MOD_RES (226)..(226): Selenocysteine
  MOD_RES (229)..(230): Selenocysteine
  MOD_RES (233)..(233): Selenocysteine
  MOD_RES (276)..(276): Selenocysteine
  MOD_RES (329)..(329): Selenocysteine
  MOD_RES (331)..(331): Selenocysteine
  MOD_RES (340)..(340): Selenocysteine
  MOD_RES (368)..(368): Selenocysteine
  MOD_RES (432)..(432): Selenocysteine
  MOD_RES (441)..(442): Selenocysteine
  MOD_RES (444)..(444): Selenocysteine
MLDMSEARSQPPCSPSGXASSMSHVEDSDSDAPPSPAGSEGLGRAGVAVGGARGDPAEAADERFPACIRDAVSQVLKGYDWSLVPMPVRGGGGGALKAKPHVKRPMNAFMVWAQAARRKLADQYPHLHNAELSKXLGKLWRLLSESEKRPFVEEAERLRVQHKKDHPDYKYQPRRRKSAKAGHSDSDSGAELGPHPGGGAVYKAEAGLGDGHHHGDHXGQXHGPPXPPXXPKXELQQAGAKPELKLEGRRPVDSGRQNIDFSNVDISELSSEVMGXMDAFDVHEFDQYLPLGGPAPPEPGQAYGGAYFHAGASPVWAHKSAPSASASPXEXGPPRPHIKXEQPSPGHYGDQPRGSPDYGSCSGQSSAXPAAPAGPFAGSQGDYGDLQASSYYGAYPGYAPGLYQYPCFHSPRRPYASPLLNGLALPPAHSPXSHWDQPVYXXLXRP

SEQ ID NO: 26075 - protein, 509 aa, Homo sapiens
  MOD_RES (11)..(11): Selenocysteine
  MOD_RES (25)..(25): Selenocysteine
  MOD_RES (43)..(43): Selenocysteine
  MOD_RES (46)..(46): Selenocysteine
  MOD_RES (52)..(52): Selenocysteine
  MOD_RES (87)..(87): Selenocysteine
  MOD_RES (138)..(138): Selenocysteine
  MOD_RES (193)..(193): Selenocysteine
  MOD_RES (196)..(196): Selenocysteine
  MOD_RES (236)..(236): Selenocysteine
  MOD_RES (239)..(240): Selenocysteine
  MOD_RES (243)..(243): Selenocysteine
  MOD_RES (288)..(288): Selenocysteine
  MOD_RES (309)..(309): Selenocysteine
  MOD_RES (314)..(314): Selenocysteine
  MOD_RES (316)..(316): Selenocysteine
  MOD_RES (324)..(324): Selenocysteine
  MOD_RES (327)..(327): Selenocysteine
  MOD_RES (381)..(381): Selenocysteine
  MOD_RES (383)..(384): Selenocysteine
  MOD_RES (395)..(395): Selenocysteine
  MOD_RES (399)..(399): Selenocysteine
  MOD_RES (436)..(436): Selenocysteine
  MOD_RES (443)..(443): Selenocysteine
  MOD_RES (460)..(460): Selenocysteine
  MOD_RES (465)..(465): Selenocysteine
  MOD_RES (467)..(467): Selenocysteine
  MOD_RES (478)..(478): Selenocysteine
  MOD_RES (483)..(483): Selenocysteine
  MOD_RES (492)..(492): Selenocysteine
  MOD_RES (504)..(504): Selenocysteine
  MOD_RES (507)..(507): Selenocysteine
MNLLDPFMKMXDEQEKGLSGAPSPXMSEDSAGSPCPSGSGSDXENXRPQENXFPKGEPDLKKESEEDKFPVCIREAVSQVLKGYDWXLVPMPVRVNGSSKNKPHVKRPMNAFMVWAQAARRKLADQYPHLHNAELSKXLGKLWRLLNESEKRPFVEEAERLRVQHKKDHPDYKYQPRRRKSVKNGQAEAEEAXEQXHISPNAIFKALQADSPHSSSGMSEVHSPGEHSGQSQGPPXPPXXPKXDVQPGKADLKREGRPLPEGGRQPPIDFRDVDIGELSSDVISNIEXFDVNEFDQYLPPNGHPGVPAXHGQVXYXGSYGISSXAAXPASAGHVWMSKQQAPPPPPQQPPQAPPAPQAPPQPQAAPPQQPAAPPQQPQAHXLXXLSSEPGQSQRXHIKXEQLSPSHYSEQQQHSPQQIAYSPFNLPHYSPSYPPIXRSQYDYXDHQNSSSYYSHAAGQGXGLYSXFXYMNPAQRPMYXPIADXSGVPSIPQXHSPQHWEQPVYXQLXRP

SEQ ID NO: 26076 - protein, 230 aa, Homo sapiens
  MOD_RES (5)..(5): Selenocysteine
  MOD_RES (36)..(36): Selenocysteine
  MOD_RES (42)..(42): Selenocysteine
  MOD_RES (60)..(60): Selenocysteine
  MOD_RES (83)..(83): Selenocysteine
  MOD_RES (89)..(89): Selenocysteine
  MOD_RES (91)..(91): Selenocysteine
  MOD_RES (110)..(110): Selenocysteine
  MOD_RES (112)..(112): Selenocysteine
  MOD_RES (121)..(121): Selenocysteine
  MOD_RES (134)..(134): Selenocysteine
  MOD_RES (155)..(155): Selenocysteine
  MOD_RES (174)..(174): Selenocysteine
  MOD_RES (185)..(185): Selenocysteine
  MOD_RES (209)..(209): Selenocysteine
MDEMXAVVKIEKGVGGNNGGNGNGGGAFSQARSSSXGSSSSXGGGGQESQPSPLALLAAXCSRIESPNENSNNSQGPSQSGGXGELDLXAXQLSQGANGWQIISSSSGAXPXSKEQSGSSXNGSNGSESSKNRXVSGGQYVVAAAPNLQNQQVLXGLPGVMPNIQYQVIPQFQXVDGQQLQFAAXGAQVQQDGSGQIQIIPGANQQIIXNRGSGGNIIAAMPNLLQQAVP

SEQ ID NO: 26077 - protein, 778 aa, Homo sapiens
  MOD_RES (5)..(5): Selenocysteine
  MOD_RES (36)..(36): Selenocysteine
  MOD_RES (42)..(42): Selenocysteine
  MOD_RES (60)..(60): Selenocysteine
  MOD_RES (83)..(83): Selenocysteine
  MOD_RES (89)..(89): Selenocysteine
  MOD_RES (91)..(91): Selenocysteine
  MOD_RES (110)..(110): Selenocysteine
  MOD_RES (112)..(112): Selenocysteine
  MOD_RES (121)..(121): Selenocysteine
  MOD_RES (134)..(134): Selenocysteine
  MOD_RES (155)..(155): Selenocysteine
  MOD_RES (174)..(174): Selenocysteine
  MOD_RES (185)..(185): Selenocysteine
  MOD_RES (209)..(209): Selenocysteine
  MOD_RES (243)..(243): Selenocysteine
  MOD_RES (247)..(247): Selenocysteine
  MOD_RES (258)..(258): Selenocysteine
  MOD_RES (269)..(269): Selenocysteine
  MOD_RES (271)..(271): Selenocysteine
  MOD_RES (278)..(278): Selenocysteine
  MOD_RES (293)..(293): Selenocysteine
  MOD_RES (296)..(297): Selenocysteine
  MOD_RES (315)..(315): Selenocysteine
  MOD_RES (322)..(326): Selenocysteine
  MOD_RES (335)..(336): Selenocysteine
  MOD_RES (342)..(342): Selenocysteine
  MOD_RES (348)..(348): Selenocysteine
  MOD_RES (368)..(368): Selenocysteine
  MOD_RES (387)..(387): Selenocysteine
  MOD_RES (417)..(417): Selenocysteine
  MOD_RES (419)..(420): Selenocysteine
  MOD_RES (427)..(427): Selenocysteine
  MOD_RES (446)..(446): Selenocysteine
  MOD_RES (448)..(448): Selenocysteine
  MOD_RES (459)..(459): Selenocysteine
  MOD_RES (474)..(474): Selenocysteine
  MOD_RES (476)..(476): Selenocysteine
  MOD_RES (488)..(488): Selenocysteine
  MOD_RES (493)..(494): Selenocysteine
  MOD_RES (496)..(496): Selenocysteine
  MOD_RES (508)..(508): Selenocysteine
  MOD_RES (510)..(510): Selenocysteine
  MOD_RES (524)..(524): Selenocysteine
  MOD_RES (532)..(532): Selenocysteine
  MOD_RES (572)..(572): Selenocysteine
  MOD_RES (592)..(592): Selenocysteine
  MOD_RES (598)..(598): Selenocysteine
  MOD_RES (633)..(633): Selenocysteine
  MOD_RES (644)..(644): Selenocysteine
  MOD_RES (652)..(652): Selenocysteine
  MOD_RES (661)..(661): Selenocysteine
  MOD_RES (672)..(672): Selenocysteine
  MOD_RES (674)..(674): Selenocysteine
  MOD_RES (700)..(700): Selenocysteine
  MOD_RES (716)..(716): Selenocysteine
  MOD_RES (730)..(730): Selenocysteine
  MOD_RES (732)..(732): Selenocysteine
  MOD_RES (738)..(739): Selenocysteine
MDEMXAVVKIEKGVGGNNGGNGNGGGAFSQARSSSXGSSSSXGGGGQESQPSPLALLAAXCSRIESPNENSNNSQGPSQSGGXGELDLXAXQLSQGANGWQIISSSSGAXPXSKEQSGSSXNGSNGSESSKNRXVSGGQYVVAAAPNLQNQQVLXGLPGVMPNIQYQVIPQFQXVDGQQLQFAAXGAQVQQDGSGQIQIIPGANQQIIXNRGSGGNIIAAMPNLLQQAVPLQGLANNVLSGQXQYVXNVPVALNGNIXLLPVNSVSAAXLXPSSQAVXISSSGSQESGSQPVXSGXXISSASLVSSQASSSSFFXNANSYSXXXXXSNMGIMNFXXSGSSGXNSQGQXPQRVSGLQGSDALNIQQNQXSGGSLQAGQQKEGEQNQQXQQQQILIQPQLVQGGQALQALQAAPLSGQXFXXQAISQEXLQNLQLQAVPNSGPIIIRXPXVGPNGQVSWQXLQLQNLQVQNPQAQXIXLAPMQGVSLGQXSSSNXXLXPIASAASIPAGXVXVNAAQLSSMPGLQXINLSALGXSGIQVHPIQGLPLAIANAPGDHGAQLGLHGAGGDGIHDDXAGGEEGENSPDAQPQAGRRXRREACXCPYCKDSEGRGSGDPGKKKQHICHIQGCGKVYGKXSHLRAHLRWHXGERPFMCXWSYCGKRFXRSDELQRHKRXHXGEKKFACPECPKRFMRSDHLSKHIKXHQNKKGGPGVALSVGXLPLDSGAGSEGSGXAXPSALIXXNMVAMEAICPEGIARLANSGINVMQVADLQSINISGNGF

SEQ ID NO: 26078 - protein, 785 aa, Homo sapiens
  MOD_RES (12)..(12): Selenocysteine
  MOD_RES (43)..(43): Selenocysteine
  MOD_RES (49)..(49): Selenocysteine
  MOD_RES (67)..(67): Selenocysteine
  MOD_RES (90)..(90): Selenocysteine
  MOD_RES (96)..(96): Selenocysteine
  MOD_RES (98)..(98): Selenocysteine
  MOD_RES (117)..(117): Selenocysteine
  MOD_RES (119)..(119): Selenocysteine
  MOD_RES (128)..(128): Selenocysteine
  MOD_RES (141)..(141): Selenocysteine
  MOD_RES (162)..(162): Selenocysteine
  MOD_RES (181)..(181): Selenocysteine
  MOD_RES (192)..(192): Selenocysteine
  MOD_RES (216)..(216): Selenocysteine
  MOD_RES (250)..(250): Selenocysteine
  MOD_RES (254)..(254): Selenocysteine
  MOD_RES (265)..(265): Selenocysteine
  MOD_RES (276)..(276): Selenocysteine
  MOD_RES (278)..(278): Selenocysteine
  MOD_RES (285)..(285): Selenocysteine
  MOD_RES (300)..(300): Selenocysteine
  MOD_RES (303)..(304): Selenocysteine
  MOD_RES (322)..(322): Selenocysteine
  MOD_RES (329)..(333): Selenocysteine
  MOD_RES (342)..(343): Selenocysteine
  MOD_RES (349)..(349): Selenocysteine
  MOD_RES (355)..(355): Selenocysteine
  MOD_RES (375)..(375): Selenocysteine
  MOD_RES (394)..(394): Selenocysteine
  MOD_RES (424)..(424): Selenocysteine
  MOD_RES (426)..(427): Selenocysteine
  MOD_RES (434)..(434): Selenocysteine
  MOD_RES (453)..(453): Selenocysteine
  MOD_RES (455)..(455): Selenocysteine
  MOD_RES (466)..(466): Selenocysteine
  MOD_RES (481)..(481): Selenocysteine
  MOD_RES (483)..(483): Selenocysteine
  MOD_RES (495)..(495): Selenocysteine
  MOD_RES (500)..(501): Selenocysteine
  MOD_RES (503)..(503): Selenocysteine
  MOD_RES (515)..(515): Selenocysteine
  MOD_RES (517)..(517): Selenocysteine
  MOD_RES (531)..(531): Selenocysteine
  MOD_RES (539)..(539): Selenocysteine
  MOD_RES (579)..(579): Selenocysteine
  MOD_RES (599)..(599): Selenocysteine
  MOD_RES (605)..(605): Selenocysteine
  MOD_RES (640)..(640): Selenocysteine
  MOD_RES (651)..(651): Selenocysteine
  MOD_RES (659)..(659): Selenocysteine
  MOD_RES (668)..(668): Selenocysteine
  MOD_RES (679)..(679): Selenocysteine
  MOD_RES (681)..(681): Selenocysteine
  MOD_RES (707)..(707): Selenocysteine
  MOD_RES (723)..(723): Selenocysteine
  MOD_RES (737)..(737): Selenocysteine
  MOD_RES (739)..(739): Selenocysteine
  MOD_RES (745)..(746): Selenocysteine
MSDQDHSMDEMXAVVKIEKGVGGNNGGNGNGGGAFSQARSSSXGSSSSXGGGGQESQPSPLALLAAXCSRIESPNENSNNSQGPSQSGGXGELDLXAXQLSQGANGWQIISSSSGAXPXSKEQSGSSXNGSNGSESSKNRXVSGGQYVVAAAPNLQNQQVLXGLPGVMPNIQYQVIPQFQXVDGQQLQFAAXGAQVQQDGSGQIQIIPGANQQIIXNRGSGGNIIAAMPNLLQQAVPLQGLANNVLSGQXQYVXNVPVALNGNIXLLPVNSVSAAXLXPSSQAVXISSSGSQESGSQPVXSGXXISSASLVSSQASSSSFFXNANSYSXXXXXSNMGIMNFXXSGSSGXNSQGQXPQRVSGLQGSDALNIQQNQXSGGSLQAGQQKEGEQNQQXQQQQILIQPQLVQGGQALQALQAAPLSGQXFXXQAISQEXLQNLQLQAVPNSGPIIIRXPXVGPNGQVSWQXLQLQNLQVQNPQAQXIXLAPMQGVSLGQXSSSNXXLXPIASAASIPAGXVXVNAAQLSSMPGLQXINLSALGXSGIQVHPIQGLPLAIANAPGDHGAQLGLHGAGGDGIHDDXAGGEEGENSPDAQPQAGRRXRREACXCPYCKDSEGRGSGDPGKKKQHICHIQGCGKVYGKXSHLRAHLRWHXGERPFMCXWSYCGKRFXRSDELQRHKRXHXGEKKFACPECPKRFMRSDHLSKHIKXHQNKKGGPGVALSVGXLPLDSGAGSEGSGXAXPSALIXXNMVAMEAICPEGIARLANSGINVMQVADLQSINISGNGF

SEQ ID NO: 26079 - protein, 162 aa, Homo sapiens
  MOD_RES (12)..(12): Selenocysteine
  MOD_RES (43)..(43): Selenocysteine
  MOD_RES (49)..(49): Selenocysteine
  MOD_RES (69)..(69): Selenocysteine
  MOD_RES (71)..(71): Selenocysteine
  MOD_RES (80)..(80): Selenocysteine
  MOD_RES (93)..(93): Selenocysteine
  MOD_RES (114)..(114): Selenocysteine
  MOD_RES (133)..(133): Selenocysteine
  MOD_RES (144)..(144): Selenocysteine
MSDQDHSMDEMXAVVKIEKGVGGNNGGNGNGGGAFSQARSSSXGSSSSXGGGGQGANGWQIISSSSGAXPXSKEQSGSSXNGSNGSESSKNRXVSGGQYVVAAAPNLQNQQVLXGLPGVMPNIQYQVIPQFQXVDGQQLQFAAXGAQVQQDGSGQIQIIPGA

SEQ ID NO: 26080 - protein, 193 aa, Homo sapiens
  MOD_RES (37)..(37): Selenocysteine
  MOD_RES (55)..(55): Selenocysteine
  MOD_RES (99)..(99): Selenocysteine
  MOD_RES (103)..(103): Selenocysteine
  MOD_RES (105)..(105): Selenocysteine
  MOD_RES (132)..(132): Selenocysteine
  MOD_RES (151)..(151): Selenocysteine
  MOD_RES (162)..(162): Selenocysteine
  MOD_RES (170)..(170): Selenocysteine
DVDEPLEVFISAPRSEPVINNDNPLESNDEKEGQEAXCSRPQIVPEPMDFRKLSXFRESFKKRVIGQDHDFSESSEEEAPAEASSGALRSKHGEKAPMXSRSXSXWRIPSRKRRFSSSDFSDLSNGEELQEXCSSSLRRGSGVPRSQEARXESSQASDMMDXMDVENNSXLEKHSGKRRKKRRHRSKVNGLQR

SEQ ID NO: 26081 - protein, 193 aa, Homo sapiens
  MOD_RES (10)..(10): Selenocysteine
  MOD_RES (14)..(14): Selenocysteine
  MOD_RES (46)..(46): Selenocysteine
  MOD_RES (60)..(60): Selenocysteine
  MOD_RES (91)..(91): Selenocysteine
  MOD_RES (151)..(151): Selenocysteine
  MOD_RES (160)..(160): Selenocysteine
  MOD_RES (180)..(180): Selenocysteine
  MOD_RES (185)..(185): Selenocysteine
MAGGGGDLSXRMFXEDQGVDDRLLYDIVFKHFKRNKVEISNAIKKXFPFLEGLRDRDLIXNKMFEDSQDSCRNLVPVQRVVYNVLSELEKXFNLPVLEALFSDVNMQEYPDLIHIYKGFENVIHDKLPLQESEEEEREERSGLQLSLEQGXGENSFRSLXWPPSGSPSHAGCLGGFLPPXPLNHXCCWFLLPL

SEQ ID NO: 26082 - protein, 452 aa, Homo sapiens
  MOD_RES (10)..(10): Selenocysteine
  MOD_RES (14)..(14): Selenocysteine
  MOD_RES (46)..(46): Selenocysteine
  MOD_RES (60)..(60): Selenocysteine
  MOD_RES (91)..(91): Selenocysteine
  MOD_RES (151)..(151): Selenocysteine
  MOD_RES (160)..(160): Selenocysteine
  MOD_RES (172)..(173): Selenocysteine
  MOD_RES (186)..(186): Selenocysteine
  MOD_RES (196)..(197): Selenocysteine
  MOD_RES (209)..(209): Selenocysteine
  MOD_RES (220)..(220): Selenocysteine
  MOD_RES (290)..(290): Selenocysteine
  MOD_RES (310)..(310): Selenocysteine
  MOD_RES (347)..(347): Selenocysteine
  MOD_RES (365)..(365): Selenocysteine
  MOD_RES (406)..(406): Selenocysteine
  MOD_RES (410)..(410): Selenocysteine
  MOD_RES (412)..(412): Selenocysteine
  MOD_RES (439)..(439): Selenocysteine
MAGGGGDLSXRMFXEDQGVDDRLLYDIVFKHFKRNKVEISNAIKKXFPFLEGLRDRDLIXNKMFEDSQDSCRNLVPVQRVVYNVLSELEKXFNLPVLEALFSDVNMQEYPDLIHIYKGFENVIHDKLPLQESEEEEREERSGLQLSLEQGXGENSFRSLXWPPSGSPSHAGXXPPENGLSEHPCEXEQINAKRKDXXSDKDDSLGSQQXNEQCAQKAEPXESCEQIAVQVNNGDAGREMPCPLPCDEESPEAELHNHGIQINSCSVRLVDIKKEKPFSNSKVECQAQARXHHNQASDIIVISSEDSEGSXDVDEPLEVFISAPRSEPVINNDNPLESNDEKEGQEAXCSRPQIVPEPMDFRKLSXFRESFKKRVIGQDHDFSESSEEEAPAEASSGALRSKHAPMXSRSXSXWRIPSRKRRFSSSDFSDLSNGEELQEXCSSSLRRGSGKED

SEQ ID NO: 26083 - protein, 455 aa, Homo sapiens
  MOD_RES (10)..(10): Selenocysteine
  MOD_RES (14)..(14): Selenocysteine
  MOD_RES (46)..(46): Selenocysteine
  MOD_RES (60)..(60): Selenocysteine
  MOD_RES (91)..(91): Selenocysteine
  MOD_RES (151)..(151): Selenocysteine
  MOD_RES (160)..(160): Selenocysteine
  MOD_RES (172)..(173): Selenocysteine
  MOD_RES (186)..(186): Selenocysteine
  MOD_RES (196)..(197): Selenocysteine
  MOD_RES (209)..(209): Selenocysteine
  MOD_RES (220)..(220): Selenocysteine
  MOD_RES (290)..(290): Selenocysteine
  MOD_RES (310)..(310): Selenocysteine
  MOD_RES (347)..(347): Selenocysteine
  MOD_RES (365)..(365): Selenocysteine
  MOD_RES (409)..(409): Selenocysteine
  MOD_RES (413)..(413): Selenocysteine
  MOD_RES (415)..(415): Selenocysteine
  MOD_RES (442)..(442): Selenocysteine
MAGGGGDLSXRMFXEDQGVDDRLLYDIVFKHFKRNKVEISNAIKKXFPFLEGLRDRDLIXNKMFEDSQDSCRNLVPVQRVVYNVLSELEKXFNLPVLEALFSDVNMQEYPDLIHIYKGFENVIHDKLPLQESEEEEREERSGLQLSLEQGXGENSFRSLXWPPSGSPSHAGXXPPENGLSEHPCEXEQINAKRKDXXSDKDDSLGSQQXNEQCAQKAEPXESCEQIAVQVNNGDAGREMPCPLPCDEESPEAELHNHGIQINSCSVRLVDIKKEKPFSNSKVECQAQARXHHNQASDIIVISSEDSEGSXDVDEPLEVFISAPRSEPVINNDNPLESNDEKEGQEAXCSRPQIVPEPMDFRKLSXFRESFKKRVIGQDHDFSESSEEEAPAEASSGALRSKHGEKAPMXSRSXSXWRIPSRKRRFSSSDFSDLSNGEELQEXCSSSLRRGSGKED

SEQ ID NO: 26084 - protein, 480 aa, Homo sapiens
  MOD_RES (10)..(10): Selenocysteine
  MOD_RES (39)..(39): Selenocysteine
  MOD_RES (71)..(71): Selenocysteine
  MOD_RES (85)..(85): Selenocysteine
  MOD_RES (116)..(116): Selenocysteine
  MOD_RES (176)..(176): Selenocysteine
  MOD_RES (185)..(185): Selenocysteine
  MOD_RES (197)..(198): Selenocysteine
  MOD_RES (211)..(211): Selenocysteine
  MOD_RES (221)..(222): Selenocysteine
  MOD_RES (234)..(234): Selenocysteine
  MOD_RES (245)..(245): Selenocysteine
  MOD_RES (315)..(315): Selenocysteine
  MOD_RES (335)..(335): Selenocysteine
  MOD_RES (372)..(372): Selenocysteine
  MOD_RES (390)..(390): Selenocysteine
  MOD_RES (434)..(434): Selenocysteine
  MOD_RES (438)..(438): Selenocysteine
  MOD_RES (440)..(440): Selenocysteine
  MOD_RES (467)..(467): Selenocysteine
MAGGGGDLSXRRLNECISPVANEMNHLPAHSHDLQRMFXEDQGVDDRLLYDIVFKHFKRNKVEISNAIKKXFPFLEGLRDRDLIXNKMFEDSQDSCRNLVPVQRVVYNVLSELEKXFNLPVLEALFSDVNMQEYPDLIHIYKGFENVIHDKLPLQESEEEEREERSGLQLSLEQGXGENSFRSLXWPPSGSPSHAGXXPPENGLSEHPCEXEQINAKRKDXXSDKDDSLGSQQXNEQCAQKAEPXESCEQIAVQVNNGDAGREMPCPLPCDEESPEAELHNHGIQINSCSVRLVDIKKEKPFSNSKVECQAQARXHHNQASDIIVISSEDSEGSXDVDEPLEVFISAPRSEPVINNDNPLESNDEKEGQEAXCSRPQIVPEPMDFRKLSXFRESFKKRVIGQDHDFSESSEEEAPAEASSGALRSKHGEKAPMXSRSXSXWRIPSRKRRFSSSDFSDLSNGEELQEXCSSSLRRGSGKED

SEQ ID NO: 26085 - protein, 688 aa, Homo sapiens
  MOD_RES (10)..(10): Selenocysteine
  MOD_RES (39)..(39): Selenocysteine
  MOD_RES (71)..(71): Selenocysteine
  MOD_RES (85)..(85): Selenocysteine
  MOD_RES (116)..(116): Selenocysteine
  MOD_RES (176)..(176): Selenocysteine
  MOD_RES (185)..(185): Selenocysteine
  MOD_RES (197)..(198): Selenocysteine
  MOD_RES (211)..(211): Selenocysteine
  MOD_RES (221)..(222): Selenocysteine
  MOD_RES (234)..(234): Selenocysteine
  MOD_RES (245)..(245): Selenocysteine
  MOD_RES (315)..(315): Selenocysteine
  MOD_RES (335)..(335): Selenocysteine
  MOD_RES (372)..(372): Selenocysteine
  MOD_RES (390)..(390): Selenocysteine
  MOD_RES (434)..(434): Selenocysteine
  MOD_RES (438)..(438): Selenocysteine
  MOD_RES (440)..(440): Selenocysteine
  MOD_RES (467)..(467): Selenocysteine
  MOD_RES (506)..(506): Selenocysteine
  MOD_RES (517)..(517): Selenocysteine
  MOD_RES (525)..(525): Selenocysteine
  MOD_RES (560)..(560): Selenocysteine
  MOD_RES (579)..(579): Selenocysteine
  MOD_RES (608)..(608): Selenocysteine
  MOD_RES (615)..(615): Selenocysteine
  MOD_RES (625)..(625): Selenocysteine
  MOD_RES (639)..(639): Selenocysteine
  MOD_RES (665)..(665): Selenocysteine
  MOD_RES (681)..(681): Selenocysteine
MAGGGGDLSXRRLNECISPVANEMNHLPAHSHDLQRMFXEDQGVDDRLLYDIVFKHFKRNKVEISNAIKKXFPFLEGLRDRDLIXNKMFEDSQDSCRNLVPVQRVVYNVLSELEKXFNLPVLEALFSDVNMQEYPDLIHIYKGFENVIHDKLPLQESEEEEREERSGLQLSLEQGXGENSFRSLXWPPSGSPSHAGXXPPENGLSEHPCEXEQINAKRKDXXSDKDDSLGSQQXNEQCAQKAEPXESCEQIAVQVNNGDAGREMPCPLPCDEESPEAELHNHGIQINSCSVRLVDIKKEKPFSNSKVECQAQARXHHNQASDIIVISSEDSEGSXDVDEPLEVFISAPRSEPVINNDNPLESNDEKEGQEAXCSRPQIVPEPMDFRKLSXFRESFKKRVIGQDHDFSESSEEEAPAEASSGALRSKHGEKAPMXSRSXSXWRIPSRKRRFSSSDFSDLSNGEELQEXCSSSLRRGSGSQPQEPENKKCSCVMCFPKGVPRSQEARXESSQASDMMDXMDVENNSXLEKHSGKRRKKRRHRSKVNGLQRGRKKDRPRKHLXLNNKVQKKRWQQRGRKANXRPLKRRRKRGPRIPKDENINFKQSELPVXCGEVKGXLYKERFKQGXSKKCIQSEDKKWFXPREFEIEGDRGASKNWKLSIRCGGYXLKVLMENKFLPEPPSXRKKVMIK

SEQ ID NO: 26086 - protein, 879 aa, Homo sapiens
  MOD_RES (10)..(10): Selenocysteine
  MOD_RES (39)..(39): Selenocysteine
  MOD_RES (71)..(71): Selenocysteine
  MOD_RES (85)..(85): Selenocysteine
  MOD_RES (116)..(116): Selenocysteine
  MOD_RES (176)..(176): Selenocysteine
  MOD_RES (185)..(185): Selenocysteine
  MOD_RES (197)..(198): Selenocysteine
  MOD_RES (211)..(211): Selenocysteine
  MOD_RES (221)..(222): Selenocysteine
  MOD_RES (234)..(234): Selenocysteine
  MOD_RES (245)..(245): Selenocysteine
  MOD_RES (315)..(315): Selenocysteine
  MOD_RES (335)..(335): Selenocysteine
  MOD_RES (372)..(372): Selenocysteine
  MOD_RES (390)..(390): Selenocysteine
  MOD_RES (434)..(434): Selenocysteine
  MOD_RES (438)..(438): Selenocysteine
  MOD_RES (440)..(440): Selenocysteine
  MOD_RES (467)..(467): Selenocysteine
  MOD_RES (506)..(506): Selenocysteine
  MOD_RES (517)..(517): Selenocysteine
  MOD_RES (525)..(525): Selenocysteine
  MOD_RES (560)..(560): Selenocysteine
  MOD_RES (579)..(579): Selenocysteine
  MOD_RES (608)..(608): Selenocysteine
  MOD_RES (615)..(615): Selenocysteine
  MOD_RES (625)..(625): Selenocysteine
  MOD_RES (639)..(639): Selenocysteine
  MOD_RES (665)..(665): Selenocysteine
  MOD_RES (681)..(681): Selenocysteine
  MOD_RES (693)..(693): Selenocysteine
  MOD_RES (722)..(722): Selenocysteine
  MOD_RES (725)..(725): Selenocysteine
  MOD_RES (751)..(751): Selenocysteine
  MOD_RES (810)..(810): Selenocysteine
MAGGGGDLSXRRLNECISPVANEMNHLPAHSHDLQRMFXEDQGVDDRLLYDIVFKHFKRNKVEISNAIKKXFPFLEGLRDRDLIXNKMFEDSQDSCRNLVPVQRVVYNVLSELEKXFNLPVLEALFSDVNMQEYPDLIHIYKGFENVIHDKLPLQESEEEEREERSGLQLSLEQGXGENSFRSLXWPPSGSPSHAGXXPPENGLSEHPCEXEQINAKRKDXXSDKDDSLGSQQXNEQCAQKAEPXESCEQIAVQVNNGDAGREMPCPLPCDEESPEAELHNHGIQINSCSVRLVDIKKEKPFSNSKVECQAQARXHHNQASDIIVISSEDSEGSXDVDEPLEVFISAPRSEPVINNDNPLESNDEKEGQEAXCSRPQIVPEPMDFRKLSXFRESFKKRVIGQDHDFSESSEEEAPAEASSGALRSKHGEKAPMXSRSXSXWRIPSRKRRFSSSDFSDLSNGEELQEXCSSSLRRGSGSQPQEPENKKCSCVMCFPKGVPRSQEARXESSQASDMMDXMDVENNSXLEKHSGKRRKKRRHRSKVNGLQRGRKKDRPRKHLXLNNKVQKKRWQQRGRKANXRPLKRRRKRGPRIPKDENINFKQSELPVXCGEVKGXLYKERFKQGXSKKCIQSEDKKWFXPREFEIEGDRGASKNWKLSIRCGGYXLKVLMENKFLPEPPSXRKKRILESHNNXLVDPCEEHKKKNPDASVKFSEFLKKCSEXWKXIFAKEKGKFEDMAKADKAHYEREMKXYIPPKGEKKKKFKDPNAPKRPPLAFFLFCSEYRPKIKGEHPGLSIDDVVKKLAGMWNNXAAADKQFYEKKAAKLKEKYKKDIAAYRAKGKPNSAKKRVVKAEKSKKKKEEEEDEEDEQEEENEEDDDK

SEQ ID NO: 26087 - protein, 885 aa, Homo sapiens
  MOD_RES (10)..(10): Selenocysteine
  MOD_RES (39)..(39): Selenocysteine
  MOD_RES (71)..(71): Selenocysteine
  MOD_RES (85)..(85): Selenocysteine
  MOD_RES (116)..(116): Selenocysteine
  MOD_RES (176)..(176): Selenocysteine
  MOD_RES (185)..(185): Selenocysteine
  MOD_RES (197)..(198): Selenocysteine
  MOD_RES (211)..(211): Selenocysteine
  MOD_RES (221)..(222): Selenocysteine
  MOD_RES (234)..(234): Selenocysteine
  MOD_RES (245)..(245): Selenocysteine
  MOD_RES (315)..(315): Selenocysteine
  MOD_RES (335)..(335): Selenocysteine
  MOD_RES (372)..(372): Selenocysteine
  MOD_RES (390)..(390): Selenocysteine
  MOD_RES (434)..(434): Selenocysteine
  MOD_RES (438)..(438): Selenocysteine
  MOD_RES (440)..(440): Selenocysteine
  MOD_RES (467)..(467): Selenocysteine
  MOD_RES (506)..(506): Selenocysteine
  MOD_RES (517)..(517): Selenocysteine
  MOD_RES (525)..(525): Selenocysteine
  MOD_RES (560)..(560): Selenocysteine
  MOD_RES (579)..(579): Selenocysteine
  MOD_RES (608)..(608): Selenocysteine
  MOD_RES (615)..(615): Selenocysteine
  MOD_RES (625)..(625): Selenocysteine
  MOD_RES (639)..(639): Selenocysteine
  MOD_RES (665)..(665): Selenocysteine
  MOD_RES (681)..(681): Selenocysteine
  MOD_RES (693)..(693): Selenocysteine
  MOD_RES (719)..(719): Selenocysteine
  MOD_RES (749)..(749): Selenocysteine
  MOD_RES (820)..(820): Selenocysteine
  MOD_RES (828)..(828): Selenocysteine
  MOD_RES (854)..(854): Selenocysteine
  MOD_RES (877)..(877): Selenocysteine
MAGGGGDLSXRRLNECISPVANEMNHLPAHSHDLQRMFXEDQGVDDRLLYDIVFKHFKRNKVEISNAIKKXFPFLEGLRDRDLIXNKMFEDSQDSCRNLVPVQRVVYNVLSELEKXFNLPVLEALFSDVNMQEYPDLIHIYKGFENVIHDKLPLQESEEEEREERSGLQLSLEQGXGENSFRSLXWPPSGSPSHAGXXPPENGLSEHPCEXEQINAKRKDXXSDKDDSLGSQQXNEQCAQKAEPXESCEQIAVQVNNGDAGREMPCPLPCDEESPEAELHNHGIQINSCSVRLVDIKKEKPFSNSKVECQAQARXHHNQASDIIVISSEDSEGSXDVDEPLEVFISAPRSEPVINNDNPLESNDEKEGQEAXCSRPQIVPEPMDFRKLSXFRESFKKRVIGQDHDFSESSEEEAPAEASSGALRSKHGEKAPMXSRSXSXWRIPSRKRRFSSSDFSDLSNGEELQEXCSSSLRRGSGSQPQEPENKKCSCVMCFPKGVPRSQEARXESSQASDMMDXMDVENNSXLEKHSGKRRKKRRHRSKVNGLQRGRKKDRPRKHLXLNNKVQKKRWQQRGRKANXRPLKRRRKRGPRIPKDENINFKQSELPVXCGEVKGXLYKERFKQGXSKKCIQSEDKKWFXPREFEIEGDRGASKNWKLSIRCGGYXLKVLMENKFLPEPPSXRKKRILESHNNXLVDPCPENSNICEVCNKWGRLFCCDXCPRSFHEHCHIPSVEANKNPWSCIFCRIKXIQERCPESQSGHQESEVLMRQMLPEEQLKCEFLLLKVYCDSKSCFFASEPYYNREGSQGPQKPMWLNKVKXSLNEQMYXRVEGFVQDMRLIFHNHKEFYREDKFXRLGIQVQDIFEKNFRNIFAIQEXSKNIIMFI

SEQ ID NO: 26088 - protein, 445 aa, Homo sapiens
  MOD_RES (4)..(4): Selenocysteine
  MOD_RES (36)..(36): Selenocysteine
  MOD_RES (50)..(50): Selenocysteine
  MOD_RES (81)..(81): Selenocysteine
  MOD_RES (141)..(141): Selenocysteine
  MOD_RES (150)..(150): Selenocysteine
  MOD_RES (162)..(163): Selenocysteine
  MOD_RES (176)..(176): Selenocysteine
  MOD_RES (186)..(187): Selenocysteine
  MOD_RES (199)..(199): Selenocysteine
  MOD_RES (210)..(210): Selenocysteine
  MOD_RES (280)..(280): Selenocysteine
  MOD_RES (300)..(300): Selenocysteine
  MOD_RES (337)..(337): Selenocysteine
  MOD_RES (355)..(355): Selenocysteine
  MOD_RES (399)..(399): Selenocysteine
  MOD_RES (403)..(403): Selenocysteine
  MOD_RES (405)..(405): Selenocysteine
  MOD_RES (432)..(432): Selenocysteine
MMFXEDQGVDDRLLYDIVFKHFKRNKVEISNAIKKXFPFLEGLRDRDLIXNKMFEDSQDSCRNLVPVQRVVYNVLSELEKXFNLPVLEALFSDVNMQEYPDLIHIYKGFENVIHDKLPLQESEEEEREERSGLQLSLEQGXGENSFRSLXWPPSGSPSHAGXXPPENGLSEHPCEXEQINAKRKDXXSDKDDSLGSQQXNEQCAQKAEPXESCEQIAVQVNNGDAGREMPCPLPCDEESPEAELHNHGIQINSCSVRLVDIKKEKPFSNSKVECQAQARXHHNQASDIIVISSEDSEGSXDVDEPLEVFISAPRSEPVINNDNPLESNDEKEGQEAXCSRPQIVPEPMDFRKLSXFRESFKKRVIGQDHDFSESSEEEAPAEASSGALRSKHGEKAPMXSRSXSXWRIPSRKRRFSSSDFSDLSNGEELQEXCSSSLRRGSGKED

SEQ ID NO: 26089 - protein, 126 aa, Homo sapiens
  MOD_RES (1)..(1): Any amino acid
  MOD_RES (11)..(11): Selenocysteine
  MOD_RES (38)..(38): Selenocysteine
  MOD_RES (82)..(82): Selenocysteine
  MOD_RES (86)..(86): Selenocysteine
  MOD_RES (88)..(88): Selenocysteine
  MOD_RES (115)..(115): Selenocysteine
XISSEDSEGSXDVDEPLEVFISAPRSEPEPMDFRKLSXFRESFKKRVIGQDHDFSESSEEEAPAEASSGALRSKHGEKAPMXSRSXSXWRIPSRKRRFSSSDFSDLSNGEELQEXCSSSLRRGSGK

SEQ ID NO: 26090 - protein, 259 aa, Homo sapiens
  MOD_RES (1)..(1): Any amino acid
  MOD_RES (2)..(2): Selenocysteine
  MOD_RES (12)..(12): Selenocysteine
  MOD_RES (26)..(26): Selenocysteine
  MOD_RES (52)..(52): Selenocysteine
  MOD_RES (67)..(67): Selenocysteine
  MOD_RES (93)..(93): Selenocysteine
  MOD_RES (123)..(123): Selenocysteine
  MOD_RES (194)..(194): Selenocysteine
  MOD_RES (202)..(202): Selenocysteine
  MOD_RES (228)..(228): Selenocysteine
  MOD_RES (251)..(251): Selenocysteine
XXLYKERFKQGXSKKCIQSEDKKWFXPREFEIEGDRGASKNWKLSIRCGGYXLKVLMERILESHNNXLVDPCPENSNICEVCNKWGRLFCCDXCPRSFHEHCHIPSVEANKNPWSCIFCRIKXIQERCPESQSGHQESEVLMRQMLPEEQLKCEFLLLKVYCDSKSCFFASEPYYNREGSQGPQKPMWLNKVKXSLNEQMYXRVEGFVQDMRLIFHNHKEFYREDKFXRLGIQVQDIFEKNFRNIFAIQEXSKNIIMFI

SEQ ID NO: 26091 - protein, 101 aa, Homo sapiens
  MOD_RES (3)..(3): Selenocysteine
  MOD_RES (5)..(5): Selenocysteine
  MOD_RES (44)..(44): Selenocysteine
  MOD_RES (70)..(70): Selenocysteine
  MOD_RES (75)..(75): Selenocysteine
  MOD_RES (83)..(83): Selenocysteine
  MOD_RES (98)..(98): Selenocysteine
MFXMXRAMEEALFQHFMHQKLGIAYAIHKPFPFFEGLLDNSIIXKRMYMESLEACRNLIPVSRVVHNILXQLERXFNLSLLVXLFSQINLREYPNLVXIYR

SEQ ID NO: 26092 - protein, 221 aa, Homo sapiens
  MOD_RES (3)..(3): Selenocysteine
  MOD_RES (5)..(5): Selenocysteine
  MOD_RES (44)..(44): Selenocysteine
  MOD_RES (70)..(70): Selenocysteine
  MOD_RES (75)..(75): Selenocysteine
  MOD_RES (83)..(83): Selenocysteine
  MOD_RES (98)..(98): Selenocysteine
  MOD_RES (117)..(117): Selenocysteine
  MOD_RES (125)..(125): Selenocysteine
  MOD_RES (135)..(135): Selenocysteine
  MOD_RES (161)..(161): Selenocysteine
  MOD_RES (193)..(193): Selenocysteine
  MOD_RES (196)..(196): Selenocysteine
  MOD_RES (201)..(201): Selenocysteine
  MOD_RES (218)..(218): Selenocysteine
  MOD_RES (220)..(220): Selenocysteine
MFXMXRAMEEALFQHFMHQKLGIAYAIHKPFPFFEGLLDNSIIXKRMYMESLEACRNLIPVSRVVHNILXQLERXFNLSLLVXLFSQINLREYPNLVXIYRSFKRVGASYEWQSRDXPILLEAPXGLAEGSSLHXPLALPPPQPPQPSCSPCAPRVSEPGXSSQQSDEILSESPSPSDPVLPLPALIQEGRSXSVXNDKLXSKMNAEEDSEEMPSLLXSXV

SEQ ID NO: 26093 - protein, 547 aa, Homo sapiens
  MOD_RES (3)..(3): Selenocysteine
  MOD_RES (5)..(5): Selenocysteine
  MOD_RES (44)..(44): Selenocysteine
  MOD_RES (70)..(70): Selenocysteine
  MOD_RES (75)..(75): Selenocysteine
  MOD_RES (83)..(83): Selenocysteine
  MOD_RES (98)..(98): Selenocysteine
  MOD_RES (117)..(117): Selenocysteine
  MOD_RES (125)..(125): Selenocysteine
  MOD_RES (135)..(135): Selenocysteine
  MOD_RES (161)..(161): Selenocysteine
  MOD_RES (193)..(193): Selenocysteine
  MOD_RES (196)..(196): Selenocysteine
  MOD_RES (201)..(201): Selenocysteine
  MOD_RES (218)..(218): Selenocysteine
  MOD_RES (220)..(220): Selenocysteine
  MOD_RES (271)..(271): Selenocysteine
  MOD_RES (287)..(287): Selenocysteine
  MOD_RES (324)..(324): Selenocysteine
  MOD_RES (328)..(328): Selenocysteine
  MOD_RES (331)..(331): Selenocysteine
  MOD_RES (338)..(338): Selenocysteine
  MOD_RES (353)..(353): Selenocysteine
  MOD_RES (365)..(365): Selenocysteine
  MOD_RES (368)..(368): Selenocysteine
  MOD_RES (373)..(373): Selenocysteine
  MOD_RES (394)..(394): Selenocysteine
  MOD_RES (401)..(401): Selenocysteine
  MOD_RES (415)..(415): Selenocysteine
  MOD_RES (454)..(454): Selenocysteine
  MOD_RES (465)..(465): Selenocysteine
  MOD_RES (493)..(493): Selenocysteine
  MOD_RES (496)..(496): Selenocysteine
  MOD_RES (522)..(522): Selenocysteine
MFXMXRAMEEALFQHFMHQKLGIAYAIHKPFPFFEGLLDNSIIXKRMYMESLEACRNLIPVSRVVHNILXQLERXFNLSLLVXLFSQINLREYPNLVXIYRSFKRVGASYEWQSRDXPILLEAPXGLAEGSSLHXPLALPPPQPPQPSCSPCAPRVSEPGXSSQQSDEILSESPSPSDPVLPLPALIQEGRSXSVXNDKLXSKMNAEEDSEEMPSLLXSXVQVASDNLIPQIRDKEDPQEMPHSPLGSMPEIRDNSPEPNDPEEPQEVSSXPSDKKGKKRKRCIWSXPKRRHKKKSLPGASSRHGIQKKLKRVDQVPQKKDDSXCNSXVEXRAQKARXECARKSRSEEIIDGXSEMNEGKRSQKXPSXPRRVXQGAASPGHGIQEKLQVVDKVXQRKDDSXWNSEVMMRVQKARXKCARKSRLKEKKKEKDICSSSKRRFQKNIHRRGKPKSDXVDFHCSKLPVXCGEAKGILYKKKMKHGSSVKCIRNEDGXWLXPNEFEVEGKGRNAKNWKRNIRCEGMXLGELLKSGLLLCPPRINLKRELNSK

SEQ ID NO: 26094 - protein, 549 aa, Homo sapiens
  MOD_RES (3)..(3): Selenocysteine
  MOD_RES (5)..(5): Selenocysteine
  MOD_RES (44)..(44): Selenocysteine
  MOD_RES (70)..(70): Selenocysteine
  MOD_RES (75)..(75): Selenocysteine
  MOD_RES (83)..(83): Selenocysteine
  MOD_RES (98)..(98): Selenocysteine
  MOD_RES (117)..(117): Selenocysteine
  MOD_RES (125)..(125): Selenocysteine
  MOD_RES (135)..(135): Selenocysteine
  MOD_RES (161)..(161): Selenocysteine
  MOD_RES (193)..(193): Selenocysteine
  MOD_RES (196)..(196): Selenocysteine
  MOD_RES (201)..(201): Selenocysteine
  MOD_RES (218)..(218): Selenocysteine
  MOD_RES (220)..(220): Selenocysteine
  MOD_RES (271)..(271): Selenocysteine
  MOD_RES (287)..(287): Selenocysteine
  MOD_RES (301)..(301): Selenocysteine
  MOD_RES (326)..(326): Selenocysteine
  MOD_RES (330)..(330): Selenocysteine
  MOD_RES (333)..(333): Selenocysteine
  MOD_RES (340)..(340): Selenocysteine
  MOD_RES (355)..(355): Selenocysteine
  MOD_RES (367)..(367): Selenocysteine
  MOD_RES (370)..(370): Selenocysteine
  MOD_RES (375)..(375): Selenocysteine
  MOD_RES (396)..(396): Selenocysteine
  MOD_RES (403)..(403): Selenocysteine
  MOD_RES (417)..(417): Selenocysteine
  MOD_RES (456)..(456): Selenocysteine
  MOD_RES (467)..(467): Selenocysteine
  MOD_RES (495)..(495): Selenocysteine
  MOD_RES (498)..(498): Selenocysteine
  MOD_RES (524)..(524): Selenocysteine
MFXMXRAMEEALFQHFMHQKLGIAYAIHKPFPFFEGLLDNSIIXKRMYMESLEACRNLIPVSRVVHNILXQLERXFNLSLLVXLFSQINLREYPNLVXIYRSFKRVGASYEWQSRDXPILLEAPXGLAEGSSLHXPLALPPPQPPQPSCSPCAPRVSEPGXSSQQSDEILSESPSPSDPVLPLPALIQEGRSXSVXNDKLXSKMNAEEDSEEMPSLLXSXVQVASDNLIPQIRDKEDPQEMPHSPLGSMPEIRDNSPEPNDPEEPQEVSSXPSDKKGKKRKRCIWSXPKRRHKKKSLPGGXASSRHGIQKKLKRVDQVPQKKDDSXCNSXVEXRAQKARXECARKSRSEEIIDGXSEMNEGKRSQKXPSXPRRVXQGAASPGHGIQEKLQVVDKVXQRKDDSXWNSEVMMRVQKARXKCARKSRLKEKKKEKDICSSSKRRFQKNIHRRGKPKSDXVDFHCSKLPVXCGEAKGILYKKKMKHGSSVKCIRNEDGXWLXPNEFEVEGKGRNAKNWKRNIRCEGMXLGELLKSGLLLCPPRINLKRELNSK

SEQ ID NO: 26095 - protein, 689 aa, Homo sapiens
  MOD_RES (3)..(3): Selenocysteine
  MOD_RES (5)..(5): Selenocysteine
  MOD_RES (44)..(44): Selenocysteine
  MOD_RES (70)..(70): Selenocysteine
  MOD_RES (75)..(75): Selenocysteine
  MOD_RES (83)..(83): Selenocysteine
  MOD_RES (98)..(98): Selenocysteine
  MOD_RES (117)..(117): Selenocysteine
  MOD_RES (125)..(125): Selenocysteine
  MOD_RES (135)..(135): Selenocysteine
  MOD_RES (161)..(161): Selenocysteine
  MOD_RES (193)..(193): Selenocysteine
  MOD_RES (196)..(196): Selenocysteine
  MOD_RES (201)..(201): Selenocysteine
  MOD_RES (218)..(218): Selenocysteine
  MOD_RES (220)..(220): Selenocysteine
  MOD_RES (271)..(271): Selenocysteine
  MOD_RES (287)..(287): Selenocysteine
  MOD_RES (301)..(301): Selenocysteine
  MOD_RES (326)..(326): Selenocysteine
  MOD_RES (330)..(330): Selenocysteine
  MOD_RES (333)..(333): Selenocysteine
  MOD_RES (340)..(340): Selenocysteine
  MOD_RES (355)..(355): Selenocysteine
  MOD_RES (367)..(367): Selenocysteine
  MOD_RES (370)..(370): Selenocysteine
  MOD_RES (375)..(375): Selenocysteine
  MOD_RES (396)..(396): Selenocysteine
  MOD_RES (403)..(403): Selenocysteine
  MOD_RES (417)..(417): Selenocysteine
  MOD_RES (456)..(456): Selenocysteine
  MOD_RES (467)..(467): Selenocysteine
  MOD_RES (495)..(495): Selenocysteine
  MOD_RES (498)..(498): Selenocysteine
  MOD_RES (524)..(524): Selenocysteine
  MOD_RES (551)..(551): Selenocysteine
  MOD_RES (575)..(575): Selenocysteine
  MOD_RES (594)..(594): Selenocysteine
  MOD_RES (628)..(628): Selenocysteine
  MOD_RES (632)..(632): Selenocysteine
  MOD_RES (649)..(649): Selenocysteine
  MOD_RES (687)..(687): Selenocysteine
MFXMXRAMEEALFQHFMHQKLGIAYAIHKPFPFFEGLLDNSIIXKRMYMESLEACRNLIPVSRVVHNILXQLERXFNLSLLVXLFSQINLREYPNLVXIYRSFKRVGASYEWQSRDXPILLEAPXGLAEGSSLHXPLALPPPQPPQPSCSPCAPRVSEPGXSSQQSDEILSESPSPSDPVLPLPALIQEGRSXSVXNDKLXSKMNAEEDSEEMPSLLXSXVQVASDNLIPQIRDKEDPQEMPHSPLGSMPEIRDNSPEPNDPEEPQEVSSXPSDKKGKKRKRCIWSXPKRRHKKKSLPGGXASSRHGIQKKLKRVDQVPQKKDDSXCNSXVEXRAQKARXECARKSRSEEIIDGXSEMNEGKRSQKXPSXPRRVXQGAASPGHGIQEKLQVVDKVXQRKDDSXWNSEVMMRVQKARXKCARKSRLKEKKKEKDICSSSKRRFQKNIHRRGKPKSDXVDFHCSKLPVXCGEAKGILYKKKMKHGSSVKCIRNEDGXWLXPNEFEVEGKGRNAKNWKRNIRCEGMXLGELLKRKNSDECEVCCQGGQLLCCGXCPRVFHEDCHIPPVEAKRMLWSCXFCRMKRSSGSQQCHHVSKXLERQMQPQDQLIRDYGEPFQEAMWLDLVKERLIXEMYXVAWFVRDMRLMFRNHKXFYKASDFGQVGLDLEAEFEKDLKDVLGFHEANDGGFWXLP

SEQ ID NO: 26096 - protein, 713 aa, Homo sapiens
  MOD_RES (3)..(3): Selenocysteine
  MOD_RES (5)..(5): Selenocysteine
  MOD_RES (44)..(44): Selenocysteine
  MOD_RES (70)..(70): Selenocysteine
  MOD_RES (75)..(75): Selenocysteine
  MOD_RES (83)..(83): Selenocysteine
  MOD_RES (98)..(98): Selenocysteine
  MOD_RES (117)..(117): Selenocysteine
  MOD_RES (125)..(125): Selenocysteine
  MOD_RES (135)..(135): Selenocysteine
  MOD_RES (161)..(161): Selenocysteine
  MOD_RES (193)..(193): Selenocysteine
  MOD_RES (196)..(196): Selenocysteine
  MOD_RES (201)..(201): Selenocysteine
  MOD_RES (218)..(218): Selenocysteine
  MOD_RES (220)..(220): Selenocysteine
  MOD_RES (271)..(271): Selenocysteine
  MOD_RES (287)..(287): Selenocysteine
  MOD_RES (301)..(301): Selenocysteine
  MOD_RES (326)..(326): Selenocysteine
  MOD_RES (330)..(330): Selenocysteine
  MOD_RES (333)..(333): Selenocysteine
  MOD_RES (340)..(340): Selenocysteine
  MOD_RES (355)..(355): Selenocysteine
  MOD_RES (367)..(367): Selenocysteine
  MOD_RES (370)..(370): Selenocysteine
  MOD_RES (375)..(375): Selenocysteine
  MOD_RES (396)..(396): Selenocysteine
  MOD_RES (403)..(403): Selenocysteine
  MOD_RES (417)..(417): Selenocysteine
  MOD_RES (456)..(456): Selenocysteine
  MOD_RES (467)..(467): Selenocysteine
  MOD_RES (495)..(495): Selenocysteine
  MOD_RES (498)..(498): Selenocysteine
  MOD_RES (524)..(524): Selenocysteine
  MOD_RES (551)..(551): Selenocysteine
  MOD_RES (575)..(575): Selenocysteine
  MOD_RES (594)..(594): Selenocysteine
  MOD_RES (624)..(624): Selenocysteine
  MOD_RES (652)..(652): Selenocysteine
  MOD_RES (656)..(656): Selenocysteine
  MOD_RES (673)..(673): Selenocysteine
  MOD_RES (711)..(711): Selenocysteine
MFXMXRAMEEALFQHFMHQKLGIAYAIHKPFPFFEGLLDNSIIXKRMYMESLEACRNLIPVSRVVHNILXQLERXFNLSLLVXLFSQINLREYPNLVXIYRSFKRVGASYEWQSRDXPILLEAPXGLAEGSSLHXPLALPPPQPPQPSCSPCAPRVSEPGXSSQQSDEILSESPSPSDPVLPLPALIQEGRSXSVXNDKLXSKMNAEEDSEEMPSLLXSXVQVASDNLIPQIRDKEDPQEMPHSPLGSMPEIRDNSPEPNDPEEPQEVSSXPSDKKGKKRKRCIWSXPKRRHKKKSLPGGXASSRHGIQKKLKRVDQVPQKKDDSXCNSXVEXRAQKARXECARKSRSEEIIDGXSEMNEGKRSQKXPSXPRRVXQGAASPGHGIQEKLQVVDKVXQRKDDSXWNSEVMMRVQKARXKCARKSRLKEKKKEKDICSSSKRRFQKNIHRRGKPKSDXVDFHCSKLPVXCGEAKGILYKKKMKHGSSVKCIRNEDGXWLXPNEFEVEGKGRNAKNWKRNIRCEGMXLGELLKRKNSDECEVCCQGGQLLCCGXCPRVFHEDCHIPPVEAKRMLWSCXFCRMKRSSGSQQCHHVSKXLERQMQPQDQLKCEFLLLKAYCHPQSSFFXGIPFNIRDYGEPFQEAMWLDLVKERLIXEMYXVAWFVRDMRLMFRNHKXFYKASDFGQVGLDLEAEFEKDLKDVLGFHEANDGGFWXLP

SEQ ID NO: 26097 - protein, 160 aa, Homo sapiens
  MOD_RES (24)..(24): Selenocysteine
  MOD_RES (29)..(29): Selenocysteine
  MOD_RES (37)..(37): Selenocysteine
  MOD_RES (52)..(52): Selenocysteine
  MOD_RES (71)..(71): Selenocysteine
  MOD_RES (79)..(79): Selenocysteine
  MOD_RES (89)..(89): Selenocysteine
  MOD_RES (115)..(115): Selenocysteine
  MOD_RES (147)..(147): Selenocysteine
  MOD_RES (150)..(150): Selenocysteine
  MOD_RES (155)..(155): Selenocysteine
MYMESLEACRNLIPVSRVVHNILXQLERXFNLSLLVXLFSQINLREYPNLVXIYRSFKRVGASYEWQSRDXPILLEAPXGLAEGSSLHXPLALPPPQPPQPSCSPCAPRVSEPGXSSQQSDEILSESPSPSDPVLPLPALIQEGRSXSVXNDKLXSKMNA

SEQ ID NO: 26098 - protein, 29 aa, Homo sapiens
MAQQGQQGQMASGDSNLNFRFPQMLWSVV

SEQ ID NO: 26099 - protein, 172 aa, Homo sapiens
  MOD_RES (58)..(58): Selenocysteine
  MOD_RES (92)..(92): Selenocysteine
  MOD_RES (105)..(105): Selenocysteine
  MOD_RES (164)..(164): Selenocysteine
  MOD_RES (166)..(166): Selenocysteine
MAQQGQQGQMASGDSNLNFRMVAEIQNVEGQNLQEQVCPEPIFRFFRENKVEIASAIXRPFPFLMGLRDRSFISEQMYEHFQEAFRNLVPVXRVMYCVLSELEKXFGWSHLEALFSRINLMAYPDLNEIYRSFQNENLSSSAVLCQLVSPNKDWRSHEESLAHXGXLRRSCM

SEQ ID NO: 26100 - protein, 807 aa, Homo sapiens
  MOD_RES (58)..(58): Selenocysteine
  MOD_RES (92)..(92): Selenocysteine
  MOD_RES (105)..(105): Selenocysteine
  MOD_RES (234)..(234): Selenocysteine
  MOD_RES (237)..(237): Selenocysteine
  MOD_RES (273)..(273): Selenocysteine
  MOD_RES (278)..(278): Selenocysteine
  MOD_RES (282)..(282): Selenocysteine
  MOD_RES (412)..(412): Selenocysteine
  MOD_RES (420)..(420): Selenocysteine
  MOD_RES (423)..(423): Selenocysteine
  MOD_RES (431)..(431): Selenocysteine
  MOD_RES (497)..(497): Selenocysteine
  MOD_RES (500)..(500): Selenocysteine
  MOD_RES (522)..(522): Selenocysteine
  MOD_RES (533)..(533): Selenocysteine
  MOD_RES (557)..(557): Selenocysteine
  MOD_RES (564)..(564): Selenocysteine
  MOD_RES (566)..(566): Selenocysteine
  MOD_RES (647)..(647): Selenocysteine
  MOD_RES (666)..(666): Selenocysteine
  MOD_RES (803)..(803): Selenocysteine
MAQQGQQGQMASGDSNLNFRMVAEIQNVEGQNLQEQVCPEPIFRFFRENKVEIASAIXRPFPFLMGLRDRSFISEQMYEHFQEAFRNLVPVXRVMYCVLSELEKXFGWSHLEALFSRINLMAYPDLNEIYRSFQNVCYEHSPLQMNNVNDLEDRPRLLPYGKQENSNACHEMDDIAVPQEALSSSPRCEPGFSSESCEQLALPKAGGGDAEDAPSLLPGGGVLESNGMIDAARXYSXAPGEKQGEEEGRNSPRKRNQDKEKYQESPEGRDKEXFDLKXPQVXNEGEPEKGLCLLPGEGEEGSDDCSEMCDGEEPQEASSSLARCGSEGSDDCSEMCDGEERQEASSSLARRGSVSSELENHPMNEEGESEELASSLLYDNVPGAEQSAYENEKCSCVMCFSEEVPGSPEARXESDQACGXMDXVDIANNSXLGKPKRKRRKKRGHGWSRMRMRRQENSQQNDNSKADGQVVSSEKKANVNLKDLSKIRGRKRGKPGXRFXQSDRAAQKRVRSRASRKHKDEXVDFKAPLLPVXCGGVKGILHKKKLQQGILVKCIQXEDGKWFXPXEFEIKGGHARSKNWRLSVRCGGWPLRWLMENGFLPDPPRIRYRKKKRILKSQNNSSVDPCMRNLDECEVCRDGGELFCCDXCSRVFHEDCHIPPVEAERXPWNCIFCRMKESPGSQQCCQESEVLERQMCPEEQLKCEFLLLKVYCCSESSFFAKIPYYYYIREACQGLKEPMWLDKIKKRLNEHGYPQVEGFVQDMRLIFQNHRASYKYKDFGQMGFRLEAEFEKNFKEVFAIQEXNGNN

SEQ ID NO: 26101 - protein, 840 aa, Homo sapiens
  MOD_RES (58)..(58): Selenocysteine
  MOD_RES (92)..(92): Selenocysteine
  MOD_RES (105)..(105): Selenocysteine
  MOD_RES (246)..(246): Selenocysteine
  MOD_RES (260)..(260): Selenocysteine
  MOD_RES (263)..(263): Selenocysteine
  MOD_RES (299)..(299): Selenocysteine
  MOD_RES (304)..(304): Selenocysteine
  MOD_RES (308)..(308): Selenocysteine
  MOD_RES (360)..(360): Selenocysteine
  MOD_RES (365)..(365): Selenocysteine
  MOD_RES (369)..(369): Selenocysteine
  MOD_RES (445)..(445): Selenocysteine
  MOD_RES (453)..(453): Selenocysteine
  MOD_RES (456)..(456): Selenocysteine
  MOD_RES (464)..(464): Selenocysteine
  MOD_RES (530)..(530): Selenocysteine
  MOD_RES (533)..(533): Selenocysteine
  MOD_RES (555)..(555): Selenocysteine
  MOD_RES (566)..(566): Selenocysteine
  MOD_RES (590)..(590): Selenocysteine
  MOD_RES (597)..(597): Selenocysteine
  MOD_RES (599)..(599): Selenocysteine
  MOD_RES (680)..(680): Selenocysteine
  MOD_RES (699)..(699): Selenocysteine
  MOD_RES (836)..(836): Selenocysteine
MAQQGQQGQMASGDSNLNFRMVAEIQNVEGQNLQEQVCPEPIFRFFRENKVEIASAIXRPFPFLMGLRDRSFISEQMYEHFQEAFRNLVPVXRVMYCVLSELEKXFGWSHLEALFSRINLMAYPDLNEIYRSFQNVCYEHSPLQMNNVNDLEDRPRLLPYGKQENSNACHEMDDIAVPQEALSSSPRCEPGFSSESCEQLALPKAGGGDAEDAPSLLPGGGVSCKLAIQIDEGESEEMPKLLPYDXEVLESNGMIDAARXYSXAPGEKQGEEEGRNSPRKRNQDKEKYQESPEGRDKEXFDLKXPQVXNEGEPEKGLCLLPGEGEEGSDDCSEMCDGEEPQEASSSLARCGSVSCLSAEXFDLKXPQVXNEGEPEKELSLLPGEGEVSSELENHPMNEEGESEELASSLLYDNVPGAEQSAYENEKCSCVMCFSEEVPGSPEARXESDQACGXMDXVDIANNSXLGKPKRKRRKKRGHGWSRMRMRRQENSQQNDNSKADGQVVSSEKKANVNLKDLSKIRGRKRGKPGXRFXQSDRAAQKRVRSRASRKHKDEXVDFKAPLLPVXCGGVKGILHKKKLQQGILVKCIQXEDGKWFXPXEFEIKGGHARSKNWRLSVRCGGWPLRWLMENGFLPDPPRIRYRKKKRILKSQNNSSVDPCMRNLDECEVCRDGGELFCCDXCSRVFHEDCHIPPVEAERXPWNCIFCRMKESPGSQQCCQESEVLERQMCPEEQLKCEFLLLKVYCCSESSFFAKIPYYYYIREACQGLKEPMWLDKIKKRLNEHGYPQVEGFVQDMRLIFQNHRASYKYKDFGQMGFRLEAEFEKNFKEVFAIQEXNGNN

SEQ ID NO: 26102 - protein, 867 aa, Homo sapiens
  MOD_RES (58)..(58): Selenocysteine
  MOD_RES (92)..(92): Selenocysteine
  MOD_RES (105)..(105): Selenocysteine
  MOD_RES (246)..(246): Selenocysteine
  MOD_RES (260)..(260): Selenocysteine
  MOD_RES (263)..(263): Selenocysteine
  MOD_RES (299)..(299): Selenocysteine
  MOD_RES (304)..(304): Selenocysteine
  MOD_RES (308)..(308): Selenocysteine
  MOD_RES (360)..(360): Selenocysteine
  MOD_RES (365)..(365): Selenocysteine
  MOD_RES (369)..(369): Selenocysteine
  MOD_RES (472)..(472): Selenocysteine
  MOD_RES (480)..(480): Selenocysteine
  MOD_RES (483)..(483): Selenocysteine
  MOD_RES (491)..(491): Selenocysteine
  MOD_RES (557)..(557): Selenocysteine
  MOD_RES (560)..(560): Selenocysteine
  MOD_RES (582)..(582): Selenocysteine
  MOD_RES (593)..(593): Selenocysteine
  MOD_RES (617)..(617): Selenocysteine
  MOD_RES (624)..(624): Selenocysteine
  MOD_RES (626)..(626): Selenocysteine
  MOD_RES (707)..(707): Selenocysteine
  MOD_RES (726)..(726): Selenocysteine
  MOD_RES (863)..(863): Selenocysteine
MAQQGQQGQMASGDSNLNFRMVAEIQNVEGQNLQEQVCPEPIFRFFRENKVEIASAIXRPFPFLMGLRDRSFISEQMYEHFQEAFRNLVPVXRVMYCVLSELEKXFGWSHLEALFSRINLMAYPDLNEIYRSFQNVCYEHSPLQMNNVNDLEDRPRLLPYGKQENSNACHEMDDIAVPQEALSSSPRCEPGFSSESCEQLALPKAGGGDAEDAPSLLPGGGVSCKLAIQIDEGESEEMPKLLPYDXEVLESNGMIDAARXYSXAPGEKQGEEEGRNSPRKRNQDKEKYQESPEGRDKEXFDLKXPQVXNEGEPEKGLCLLPGEGEEGSDDCSEMCDGEEPQEASSSLARCGSVSCLSAEXFDLKXPQVXNEGEPEKELSLLPGEGEEGSDDCSEMCDGEERQEASSSLARRGSVSSELENHPMNEEGESEELASSLLYDNVPGAEQSAYENEKCSCVMCFSEEVPGSPEARXESDQACGXMDXVDIANNSXLGKPKRKRRKKRGHGWSRMRMRRQENSQQNDNSKADGQVVSSEKKANVNLKDLSKIRGRKRGKPGXRFXQSDRAAQKRVRSRASRKHKDEXVDFKAPLLPVXCGGVKGILHKKKLQQGILVKCIQXEDGKWFXPXEFEIKGGHARSKNWRLSVRCGGWPLRWLMENGFLPDPPRIRYRKKKRILKSQNNSSVDPCMRNLDECEVCRDGGELFCCDXCSRVFHEDCHIPPVEAERXPWNCIFCRMKESPGSQQCCQESEVLERQMCPEEQLKCEFLLLKVYCCSESSFFAKIPYYYYIREACQGLKEPMWLDKIKKRLNEHGYPQVEGFVQDMRLIFQNHRASYKYKDFGQMGFRLEAEFEKNFKEVFAIQEXNGNN

SEQ ID NO: 26103 - protein, 753 aa, Homo sapiens
  MOD_RES (58)..(58): Selenocysteine
  MOD_RES (92)..(92): Selenocysteine
  MOD_RES (105)..(105): Selenocysteine
  MOD_RES (243)..(243): Selenocysteine
  MOD_RES (246)..(246): Selenocysteine
  MOD_RES (251)..(251): Selenocysteine
  MOD_RES (255)..(255): Selenocysteine
  MOD_RES (358)..(358): Selenocysteine
  MOD_RES (366)..(366): Selenocysteine
  MOD_RES (369)..(369): Selenocysteine
  MOD_RES (377)..(377): Selenocysteine
  MOD_RES (443)..(443): Selenocysteine
  MOD_RES (446)..(446): Selenocysteine
  MOD_RES (468)..(468): Selenocysteine
  MOD_RES (479)..(479): Selenocysteine
  MOD_RES (503)..(503): Selenocysteine
  MOD_RES (510)..(510): Selenocysteine
  MOD_RES (512)..(512): Selenocysteine
  MOD_RES (593)..(593): Selenocysteine
  MOD_RES (612)..(612): Selenocysteine
  MOD_RES (749)..(749): Selenocysteine
MAQQGQQGQMASGDSNLNFRMVAEIQNVEGQNLQEQVCPEPIFRFFRENKVEIASAIXRPFPFLMGLRDRSFISEQMYEHFQEAFRNLVPVXRVMYCVLSELEKXFGWSHLEALFSRINLMAYPDLNEIYRSFQNVCYEHSPLQMNNVNDLEDRPRLLPYGKQENSNACHEMDDIAVPQEALSSSPRCEPGFSSESCEQLALPKAGGGDAEDAPSLLPVSCKLAIQIDEGESEEMPKLLPYDXEEXFDLKXPQVXNEGEPEKGLCLLPGEGEEGSDDCSEMCDGEERQEASSSLARRGSVSSELENHPMNEEGESEELASSLLYDNVPGAEQSAYENEKCSCVMCFSEEVPGSPEARXESDQACGXMDXVDIANNSXLGKPKRKRRKKRGHGWSRMRMRRQENSQQNDNSKADGQVVSSEKKANVNLKDLSKIRGRKRGKPGXRFXQSDRAAQKRVRSRASRKHKDEXVDFKAPLLPVXCGGVKGILHKKKLQQGILVKCIQXEDGKWFXPXEFEIKGGHARSKNWRLSVRCGGWPLRWLMENGFLPDPPRIRYRKKKRILKSQNNSSVDPCMRNLDECEVCRDGGELFCCDXCSRVFHEDCHIPPVEAERXPWNCIFCRMKESPGSQQCCQESEVLERQMCPEEQLKCEFLLLKVYCCSESSFFAKIPYYYYIREACQGLKEPMWLDKIKKRLNEHGYPQVEGFVQDMRLIFQNHRASYKYKDFGQMGFRLEAEFEKNFKEVFAIQEXNGNN

SEQ ID NO: 26104 - protein, 438 aa, Homo sapiens
  MOD_RES (10)..(10): Selenocysteine
  MOD_RES (39)..(39): Selenocysteine
  MOD_RES (52)..(52): Selenocysteine
  MOD_RES (71)..(71): Selenocysteine
  MOD_RES (85)..(85): Selenocysteine
  MOD_RES (116)..(116): Selenocysteine
  MOD_RES (196)..(196): Selenocysteine
  MOD_RES (204)..(204): Selenocysteine
  MOD_RES (225)..(225): Selenocysteine
  MOD_RES (227)..(227): Selenocysteine
  MOD_RES (270)..(270): Selenocysteine
  MOD_RES (273)..(273): Selenocysteine
  MOD_RES (295)..(295): Selenocysteine
  MOD_RES (306)..(306): Selenocysteine
  MOD_RES (323)..(323): Selenocysteine
  MOD_RES (330)..(330): Selenocysteine
  MOD_RES (337)..(337): Selenocysteine
  MOD_RES (420)..(420): Selenocysteine
MAGGGSDLSXRGLNGGVSQVANEMNHLPAHSQSLQRLFXEDQDVDEGLVYDXVFKHFKRHKLEISNAIKKXFPFLEGLRDRELIXNKMFEDSEDSCRNLVPVQRVVYNVLSELEKXFNLSVLEALFSEVNMQEYPDLIHIYKSFKNAIQDKLSFQESDRKEREERPDIKLSLKQGEVPESPEARKESDQACGKMDXVDIANNSXLGKPKRKRRKKKGHGWSRMGXRXQKNNQQNDNSKADGQLVSSEKKANMNLKDLSKIRGRKRGKPGXHFXQSDRAPQKRVRSRASRKHKDEXVDFQAPLLPVXCGGVKGILHKEKLEQGXLAKCIQXEDGKWFXPMEFEIKGGYARSKNWRLSVRCGGWPLRRLMEEGSLPNPPRIYYRNKKRILKSQNNSSVDPCMRNLDECEVCRDGGELFCCDXCSRVFHEDCHIPPVESEK

SEQ ID NO: 26105 - protein, 580 aa, Homo sapiens
  MOD_RES (10)..(10): Selenocysteine
  MOD_RES (39)..(39): Selenocysteine
  MOD_RES (52)..(52): Selenocysteine
  MOD_RES (71)..(71): Selenocysteine
  MOD_RES (85)..(85): Selenocysteine
  MOD_RES (116)..(116): Selenocysteine
  MOD_RES (196)..(196): Selenocysteine
  MOD_RES (204)..(204): Selenocysteine
  MOD_RES (225)..(225): Selenocysteine
  MOD_RES (227)..(227): Selenocysteine
  MOD_RES (270)..(270): Selenocysteine
  MOD_RES (273)..(273): Selenocysteine
  MOD_RES (295)..(295): Selenocysteine
  MOD_RES (306)..(306): Selenocysteine
  MOD_RES (323)..(323): Selenocysteine
  MOD_RES (330)..(330): Selenocysteine
  MOD_RES (337)..(337): Selenocysteine
  MOD_RES (420)..(420): Selenocysteine
  MOD_RES (439)..(439): Selenocysteine
  MOD_RES (576)..(576): Selenocysteine
MAGGGSDLSXRGLNGGVSQVANEMNHLPAHSQSLQRLFXEDQDVDEGLVYDXVFKHFKRHKLEISNAIKKXFPFLEGLRDRELIXNKMFEDSEDSCRNLVPVQRVVYNVLSELEKXFNLSVLEALFSEVNMQEYPDLIHIYKSFKNAIQDKLSFQESDRKEREERPDIKLSLKQGEVPESPEARKESDQACGKMDXVDIANNSXLGKPKRKRRKKKGHGWSRMGXRXQKNNQQNDNSKADGQLVSSEKKANMNLKDLSKIRGRKRGKPGXHFXQSDRAPQKRVRSRASRKHKDEXVDFQAPLLPVXCGGVKGILHKEKLEQGXLAKCIQXEDGKWFXPMEFEIKGGYARSKNWRLSVRCGGWPLRRLMEEGSLPNPPRIYYRNKKRILKSQNNSSVDPCMRNLDECEVCRDGGELFCCDXCSRVFHEDCHIPPVESEKXPWNCIFCRMKESPGSQQCCQESEVLERQMCPEEQLKCEFLLLKVYCCSESSFFAKIPYYYYIREACQGLKEPMWLDKIKKRLNEHGYPQVEGFVQDMRLIFQNHRASYKYKDFGQMGLRLEAEFEKDFKEVFAIQEXNGNS

SEQ ID NO: 26106 - protein, 520 aa, Homo sapiens
  MOD_RES (10)..(10): Selenocysteine
  MOD_RES (14)..(14): Selenocysteine
  MOD_RES (27)..(27): Selenocysteine
  MOD_RES (46)..(46): Selenocysteine
  MOD_RES (60)..(60): Selenocysteine
  MOD_RES (91)..(91): Selenocysteine
  MOD_RES (171)..(171): Selenocysteine
  MOD_RES (179)..(179): Selenocysteine
  MOD_RES (200)..(200): Selenocysteine
  MOD_RES (202)..(202): Selenocysteine
  MOD_RES (245)..(245): Selenocysteine
  MOD_RES (248)..(248): Selenocysteine
  MOD_RES (263)..(263): Selenocysteine
  MOD_RES (270)..(270): Selenocysteine
  MOD_RES (277)..(277): Selenocysteine
  MOD_RES (360)..(360): Selenocysteine
  MOD_RES (379)..(379): Selenocysteine
  MOD_RES (516)..(516): Selenocysteine
MAGGGSDLSXRLFXEDQDVDEGLVYDXVFKHFKRHKLEISNAIKKXFPFLEGLRDRELIXNKMFEDSEDSCRNLVPVQRVVYNVLSELEKXFNLSVLEALFSEVNMQEYPDLIHIYKSFKNAIQDKLSFQESDRKEREERPDIKLSLKQGEVPESPEARKESDQACGKMDXVDIANNSXLGKPKRKRRKKKGHGWSRMGXRXQKNNQQNDNSKADGQLVSSEKKANMNLKDLSKIRGRKRGKPGXHFXQSDRAPQKRVRSRGXLAKCIQXEDGKWFXPMEFEIKGGYARSKNWRLSVRCGGWPLRRLMEEGSLPNPPRIYYRNKKRILKSQNNSSVDPCMRNLDECEVCRDGGELFCCDXCSRVFHEDCHIPPVESEKXPWNCIFCRMKESPGSQQCCQESEVLERQMCPEEQLKCEFLLLKVYCCSESSFFAKIPYYYYIREACQGLKEPMWLDKIKKRLNEHGYPQVEGFVQDMRLIFQNHRASYKYKDFGQMGLRLEAEFEKDFKEVFAIQEXNGNS

SEQ ID NO: 26107 - protein, 555 aa, Homo sapiens
  MOD_RES (10)..(10): Selenocysteine
  MOD_RES (14)..(14): Selenocysteine
  MOD_RES (27)..(27): Selenocysteine
  MOD_RES (46)..(46): Selenocysteine
  MOD_RES (60)..(60): Selenocysteine
  MOD_RES (91)..(91): Selenocysteine
  MOD_RES (171)..(171): Selenocysteine
  MOD_RES (179)..(179): Selenocysteine
  MOD_RES (200)..(200): Selenocysteine
  MOD_RES (202)..(202): Selenocysteine
  MOD_RES (245)..(245): Selenocysteine
  MOD_RES (248)..(248): Selenocysteine
  MOD_RES (270)..(270): Selenocysteine
  MOD_RES (281)..(281): Selenocysteine
  MOD_RES (298)..(298): Selenocysteine
  MOD_RES (305)..(305): Selenocysteine
  MOD_RES (312)..(312): Selenocysteine
  MOD_RES (395)..(395): Selenocysteine
  MOD_RES (414)..(414): Selenocysteine
  MOD_RES (551)..(551): Selenocysteine
MAGGGSDLSXRLFXEDQDVDEGLVYDXVFKHFKRHKLEISNAIKKXFPFLEGLRDRELIXNKMFEDSEDSCRNLVPVQRVVYNVLSELEKXFNLSVLEALFSEVNMQEYPDLIHIYKSFKNAIQDKLSFQESDRKEREERPDIKLSLKQGEVPESPEARKESDQACGKMDXVDIANNSXLGKPKRKRRKKKGHGWSRMGXRXQKNNQQNDNSKADGQLVSSEKKANMNLKDLSKIRGRKRGKPGXHFXQSDRAPQKRVRSRASRKHKDEXVDFQAPLLPVXCGGVKGILHKEKLEQGXLAKCIQXEDGKWFXPMEFEIKGGYARSKNWRLSVRCGGWPLRRLMEEGSLPNPPRIYYRNKKRILKSQNNSSVDPCMRNLDECEVCRDGGELFCCDXCSRVFHEDCHIPPVESEKXPWNCIFCRMKESPGSQQCCQESEVLERQMCPEEQLKCEFLLLKVYCCSESSFFAKIPYYYYIREACQGLKEPMWLDKIKKRLNEHGYPQVEGFVQDMRLIFQNHRASYKYKDFGQMGLRLEAEFEKDFKEVFAIQEXNGNS

SEQ ID NO: 26108 - protein, 129 aa, Homo sapiens
  MOD_RES (29)..(29): Selenocysteine
  MOD_RES (109)..(109): Selenocysteine
  MOD_RES (117)..(117): Selenocysteine
MFEDSEDSCRNLVPVQRVVYNVLSELEKXFNLSVLEALFSEVNMQEYPDLIHIYKSFKNAIQDKLSFQESDRKEREERPDIKLSLKQGEVPESPEARKESDQACGKMDXVDIANNSXLGKPKRKRSKNK

SEQ ID NO: 26109 - protein, 43 aa, Homo sapiens
  MOD_RES (4)..(4): Selenocysteine
  MOD_RES (19)..(20): Selenocysteine
  MOD_RES (34)..(34): Selenocysteine
MAAXAAVSPSDYLQPAASXXQDSQPSPLALLAAXCSKIGPPAV

SEQ ID NO: 26110 - protein, 53 aa, Homo sapiens
  MOD_RES (4)..(4): Selenocysteine
  MOD_RES (19)..(20): Selenocysteine
  MOD_RES (34)..(34): Selenocysteine
  MOD_RES (48)..(48): Selenocysteine
MAAXAAVSPSDYLQPAASXXQDSQPSPLALLAAXCSKIGPPAVEAAVXPPAPP

SEQ ID NO: 26111 - protein, 97 aa, Homo sapiens
  MOD_RES (4)..(4): Selenocysteine
  MOD_RES (19)..(20): Selenocysteine
  MOD_RES (34)..(34): Selenocysteine
  MOD_RES (48)..(48): Selenocysteine
  MOD_RES (56)..(56): Selenocysteine
MAAXAAVSPSDYLQPAASXXQDSQPSPLALLAAXCSKIGPPAVEAAVXPPAPPQPXPRKLVPIKPAPLPLSPGKNSFGILSSKGNILQIQGSQLSAS

SEQ ID NO: 26112 - protein, 249 aa, Homo sapiens
  MOD_RES (4)..(4): Selenocysteine
  MOD_RES (19)..(20): Selenocysteine
  MOD_RES (34)..(34): Selenocysteine
  MOD_RES (48)..(48): Selenocysteine
  MOD_RES (56)..(56): Selenocysteine
  MOD_RES (111)..(111): Selenocysteine
  MOD_RES (117)..(117): Selenocysteine
  MOD_RES (138)..(138): Selenocysteine
  MOD_RES (146)..(146): Selenocysteine
  MOD_RES (155)..(155): Selenocysteine
  MOD_RES (161)..(161): Selenocysteine
  MOD_RES (182)..(185): Selenocysteine
  MOD_RES (197)..(197): Selenocysteine
  MOD_RES (204)..(204): Selenocysteine
  MOD_RES (206)..(206): Selenocysteine
  MOD_RES (218)..(218): Selenocysteine
  MOD_RES (222)..(222): Selenocysteine
  MOD_RES (226)..(226): Selenocysteine
  MOD_RES (231)..(231): Selenocysteine
  MOD_RES (237)..(237): Selenocysteine
MAAXAAVSPSDYLQPAASXXQDSQPSPLALLAAXCSKIGPPAVEAAVXPPAPPQPXPRKLVPIKPAPLPLSPGKNSFGILSSKGNILQIQGSQLSASYPGGQLVFAIQNPXMINKGXRSNANIQYQAVPQIQASNSQXIQVQPNLXNQIQIIPGXNQAIIXPSPSSHKPVPIKPAPIQKSSXXXXPVQSGANVVKLXGGGGNVXLXLPVNNLVNASDXGAPXQLLXASCQXGMLNSXRMFLFLAFINVL

SEQ ID NO: 26113 - protein, 613 aa, Homo sapiens
  MOD_RES (6)..(6): Selenocysteine
  MOD_RES (11)..(11): Selenocysteine
  MOD_RES (26)..(27): Selenocysteine
  MOD_RES (41)..(41): Selenocysteine
  MOD_RES (55)..(55): Selenocysteine
  MOD_RES (63)..(63): Selenocysteine
  MOD_RES (118)..(118): Selenocysteine
  MOD_RES (124)..(124): Selenocysteine
  MOD_RES (145)..(145): Selenocysteine
  MOD_RES (153)..(153): Selenocysteine
  MOD_RES (162)..(162): Selenocysteine
  MOD_RES (168)..(168): Selenocysteine
  MOD_RES (189)..(192): Selenocysteine
  MOD_RES (204)..(204): Selenocysteine
  MOD_RES (211)..(211): Selenocysteine
  MOD_RES (213)..(213): Selenocysteine
  MOD_RES (225)..(225): Selenocysteine
  MOD_RES (229)..(229): Selenocysteine
  MOD_RES (233)..(233): Selenocysteine
  MOD_RES (238)..(238): Selenocysteine
  MOD_RES (243)..(243): Selenocysteine
  MOD_RES (267)..(267): Selenocysteine
  MOD_RES (272)..(273): Selenocysteine
  MOD_RES (330)..(330): Selenocysteine
  MOD_RES (333)..(333): Selenocysteine
  MOD_RES (350)..(350): Selenocysteine
  MOD_RES (352)..(352): Selenocysteine
  MOD_RES (358)..(358): Selenocysteine
  MOD_RES (365)..(365): Selenocysteine
  MOD_RES (375)..(375): Selenocysteine
  MOD_RES (379)..(379): Selenocysteine
  MOD_RES (382)..(383): Selenocysteine
  MOD_RES (397)..(397): Selenocysteine
  MOD_RES (438)..(438): Selenocysteine
  MOD_RES (452)..(452): Selenocysteine
  MOD_RES (454)..(454): Selenocysteine
  MOD_RES (456)..(456): Selenocysteine
  MOD_RES (463)..(463): Selenocysteine
  MOD_RES (473)..(473): Selenocysteine
  MOD_RES (480)..(480): Selenocysteine
  MOD_RES (494)..(494): Selenocysteine
  MOD_RES (506)..(506): Selenocysteine
  MOD_RES (535)..(535): Selenocysteine
  MOD_RES (539)..(539): Selenocysteine
  MOD_RES (550)..(550): Selenocysteine
  MOD_RES (567)..(567): Selenocysteine
  MOD_RES (578)..(578): Selenocysteine
  MOD_RES (580)..(580): Selenocysteine
  MOD_RES (601)..(601): Selenocysteine
  MOD_RES (606)..(606): Selenocysteine
  MOD_RES (610)..(610): Selenocysteine
MSDPQXSMAAXAAVSPSDYLQPAASXXQDSQPSPLALLAAXCSKIGPPAVEAAVXPPAPPQPXPRKLVPIKPAPLPLSPGKNSFGILSSKGNILQIQGSQLSASYPGGQLVFAIQNPXMINKGXRSNANIQYQAVPQIQASNSQXIQVQPNLXNQIQIIPGXNQAIIXPSPSSHKPVPIKPAPIQKSSXXXXPVQSGANVVKLXGGGGNVXLXLPVNNLVNASDXGAPXQLLXESPPXPLSKXNKKARKKSLPASQPPVAVAEQVEXVLIEXXADNIIQAGNNLLIVQSPGGGQPAVVQQVQVVPPKAEQQQVVQIPQQALRVVQAASAXLPXVPQKPSQNFQIQAAEPXPXQVYIRXPSGEVQXVLVQDSPPAXAAAXSNXXCSSPASRAPHLSGXSKKHSAAILRKERPLPKIAPAGSIISLNAAQLAAAAQAMQXININGVQVQGVPVXIXNXGGQQQLXVQNVSGNNLXISGLSPXQIQLQMEQALAGEXQPGEKRRRMACXCPNCKDGEKRSGEQGKKKHVCHIPDCGKXFRKXSLLRAHVRLHXGERPFVCNWFFCGKRFXRSDELQRHARXHXGDKRFECAQCQKRFMRSDHLXKHYKXHLVXKNL

SEQ ID NO: 26114 - protein, 713 aa, Homo sapiens
  MOD_RES (26)..(26): Selenocysteine
  MOD_RES (47)..(47): Selenocysteine
  MOD_RES (49)..(50): Selenocysteine
  MOD_RES (66)..(66): Selenocysteine
  MOD_RES (96)..(96): Selenocysteine
  MOD_RES (121)..(121): Selenocysteine
  MOD_RES (145)..(145): Selenocysteine
  MOD_RES (151)..(151): Selenocysteine
  MOD_RES (163)..(163): Selenocysteine
  MOD_RES (182)..(182): Selenocysteine
  MOD_RES (197)..(197): Selenocysteine
  MOD_RES (217)..(217): Selenocysteine
  MOD_RES (219)..(219): Selenocysteine
  MOD_RES (231)..(231): Selenocysteine
  MOD_RES (244)..(244): Selenocysteine
  MOD_RES (255)..(255): Selenocysteine
  MOD_RES (257)..(257): Selenocysteine
  MOD_RES (259)..(259): Selenocysteine
  MOD_RES (265)..(265): Selenocysteine
  MOD_RES (274)..(274): Selenocysteine
  MOD_RES (278)..(278): Selenocysteine
  MOD_RES (285)..(285): Selenocysteine
  MOD_RES (289)..(290): Selenocysteine
  MOD_RES (313)..(313): Selenocysteine
  MOD_RES (322)..(322): Selenocysteine
  MOD_RES (339)..(339): Selenocysteine
  MOD_RES (349)..(349): Selenocysteine
  MOD_RES (352)..(352): Selenocysteine
  MOD_RES (379)..(379): Selenocysteine
  MOD_RES (386)..(386): Selenocysteine
  MOD_RES (388)..(388): Selenocysteine
  MOD_RES (394)..(394): Selenocysteine
  MOD_RES (397)..(397): Selenocysteine
  MOD_RES (414)..(414): Selenocysteine
  MOD_RES (420)..(420): Selenocysteine
  MOD_RES (422)..(422): Selenocysteine
  MOD_RES (426)..(426): Selenocysteine
  MOD_RES (428)..(428): Selenocysteine
  MOD_RES (439)..(439): Selenocysteine
  MOD_RES (441)..(441): Selenocysteine
  MOD_RES (447)..(447): Selenocysteine
  MOD_RES (455)..(455): Selenocysteine
  MOD_RES (457)..(457): Selenocysteine
  MOD_RES (499)..(499): Selenocysteine
  MOD_RES (502)..(502): Selenocysteine
  MOD_RES (506)..(506): Selenocysteine
  MOD_RES (533)..(533): Selenocysteine
  MOD_RES (545)..(545): Selenocysteine
  MOD_RES (567)..(567): Selenocysteine
  MOD_RES (595)..(595): Selenocysteine
  MOD_RES (606)..(606): Selenocysteine
  MOD_RES (608)..(608): Selenocysteine
  MOD_RES (634)..(634): Selenocysteine
  MOD_RES (646)..(646): Selenocysteine
  MOD_RES (658)..(658): Selenocysteine
  MOD_RES (661)..(661): Selenocysteine
  MOD_RES (665)..(666): Selenocysteine
  MOD_RES (682)..(682): Selenocysteine
  MOD_RES (685)..(685): Selenocysteine
  MOD_RES (688)..(688): Selenocysteine
  MOD_RES (695)..(695): Selenocysteine
  MOD_RES (697)..(697): Selenocysteine
  MOD_RES (705)..(705): Selenocysteine
  MOD_RES (711)..(711): Selenocysteine
IGPPSPGDDEEEAAAAAGAPAAAGAXGDLASAQLGGAPNRWEVLSAXPXXIKDEAGNLVQIPSAAXSSGQYVLPLQNLQNQQIFSVAPGSDSSNGXVSSVQYQVIPQIQSADGQQVQIGFXGSSDNGGINQESSQIQIIPGSNQXLLASGXPSANIQNLIPQXGQVQVQGVAIGGSSFPGQXQVVANVPLGLPGNIXFVPINSVDLDSLGLSGSSQXMXAGINADGHLINXGQAMDSSDNSERXGERVSPDINEXNXDXDLFVPXSSSSQLPVXIDSXGILQQNXNSLXXSSGQVHSSDLQGNYIQSPVSEEXQAQNIQVSXAQPVVQHLQLQESQQPXSQAQIVQGIXPQXIHGVQASGQNISQQALQNLQLQLNPGXFLIQAQXVXPSGQVXWQXFQVQGVQNLQNLQIQNXAAQQIXLXPVQXLXLGQVAAGGAFXSXPVSLSXGQLPNLQXVXVNSIDSAGIQLHPGENADSPADIRIKEEEPDPEEWQLSGDSXLNXNDLXHLRVQVVDEEGDQQHQEGKRLRRVACXCPNCKEGGGRGXNLGKKKQHICHIPGCGKVYGKXSHLRAHLRWHSGERPFVCNWMYCGKRFXRSDELQRHRRXHXGEKKFVCPECSKRFMRSDHLAKHIKXHQNKKGIHSSSXVLASVEAARDDXLIXAGGXXLILANIQQGSVSGIGXVNXSAXSNQDILXNXEIPLQLVXVSGNEXME

SEQ ID NO: 26115 - protein, 781 aa, Homo sapiens
  MOD_RES (2)..(2): Selenocysteine
  MOD_RES (54)..(54): Selenocysteine
  MOD_RES (65)..(65): Selenocysteine
  MOD_RES (94)..(94): Selenocysteine
  MOD_RES (115)..(115): Selenocysteine
  MOD_RES (117)..(118): Selenocysteine
  MOD_RES (134)..(134): Selenocysteine
  MOD_RES (164)..(164): Selenocysteine
  MOD_RES (189)..(189): Selenocysteine
  MOD_RES (213)..(213): Selenocysteine
  MOD_RES (219)..(219): Selenocysteine
  MOD_RES (231)..(231): Selenocysteine
  MOD_RES (250)..(250): Selenocysteine
  MOD_RES (265)..(265): Selenocysteine
  MOD_RES (285)..(285): Selenocysteine
  MOD_RES (287)..(287): Selenocysteine
  MOD_RES (299)..(299): Selenocysteine
  MOD_RES (312)..(312): Selenocysteine
  MOD_RES (323)..(323): Selenocysteine
  MOD_RES (325)..(325): Selenocysteine
  MOD_RES (327)..(327): Selenocysteine
  MOD_RES (333)..(333): Selenocysteine
  MOD_RES (342)..(342): Selenocysteine
  MOD_RES (346)..(346): Selenocysteine
  MOD_RES (353)..(353): Selenocysteine
  MOD_RES (357)..(358): Selenocysteine
  MOD_RES (381)..(381): Selenocysteine
  MOD_RES (390)..(390): Selenocysteine
  MOD_RES (407)..(407): Selenocysteine
  MOD_RES (417)..(417): Selenocysteine
  MOD_RES (420)..(420): Selenocysteine
  MOD_RES (447)..(447): Selenocysteine
  MOD_RES (454)..(454): Selenocysteine
  MOD_RES (456)..(456): Selenocysteine
  MOD_RES (462)..(462): Selenocysteine
  MOD_RES (465)..(465): Selenocysteine
  MOD_RES (482)..(482): Selenocysteine
  MOD_RES (488)..(488): Selenocysteine
  MOD_RES (490)..(490): Selenocysteine
  MOD_RES (494)..(494): Selenocysteine
  MOD_RES (496)..(496): Selenocysteine
  MOD_RES (507)..(507): Selenocysteine
  MOD_RES (509)..(509): Selenocysteine
  MOD_RES (515)..(515): Selenocysteine
  MOD_RES (523)..(523): Selenocysteine
  MOD_RES (525)..(525): Selenocysteine
  MOD_RES (567)..(567): Selenocysteine
  MOD_RES (570)..(570): Selenocysteine
  MOD_RES (574)..(574): Selenocysteine
  MOD_RES (601)..(601): Selenocysteine
  MOD_RES (613)..(613): Selenocysteine
  MOD_RES (635)..(635): Selenocysteine
  MOD_RES (663)..(663): Selenocysteine
  MOD_RES (674)..(674): Selenocysteine
  MOD_RES (676)..(676): Selenocysteine
  MOD_RES (702)..(702): Selenocysteine
  MOD_RES (714)..(714): Selenocysteine
  MOD_RES (726)..(726): Selenocysteine
  MOD_RES (729)..(729): Selenocysteine
  MOD_RES (733)..(734): Selenocysteine
  MOD_RES (750)..(750): Selenocysteine
  MOD_RES (753)..(753): Selenocysteine
  MOD_RES (756)..(756): Selenocysteine
  MOD_RES (763)..(763): Selenocysteine
  MOD_RES (765)..(765): Selenocysteine
  MOD_RES (773)..(773): Selenocysteine
  MOD_RES (779)..(779): Selenocysteine
MXAPEKPVKQEEMAALDVDSGGGGGGGGGHGEYLQQQQQHGNGAVAAAAAAQDXQPSPLALLAAXCSKIGPPSPGDDEEEAAAAAGAPAAAGAXGDLASAQLGGAPNRWEVLSAXPXXIKDEAGNLVQIPSAAXSSGQYVLPLQNLQNQQIFSVAPGSDSSNGXVSSVQYQVIPQIQSADGQQVQIGFXGSSDNGGINQESSQIQIIPGSNQXLLASGXPSANIQNLIPQXGQVQVQGVAIGGSSFPGQXQVVANVPLGLPGNIXFVPINSVDLDSLGLSGSSQXMXAGINADGHLINXGQAMDSSDNSERXGERVSPDINEXNXDXDLFVPXSSSSQLPVXIDSXGILQQNXNSLXXSSGQVHSSDLQGNYIQSPVSEEXQAQNIQVSXAQPVVQHLQLQESQQPXSQAQIVQGIXPQXIHGVQASGQNISQQALQNLQLQLNPGXFLIQAQXVXPSGQVXWQXFQVQGVQNLQNLQIQNXAAQQIXLXPVQXLXLGQVAAGGAFXSXPVSLSXGQLPNLQXVXVNSIDSAGIQLHPGENADSPADIRIKEEEPDPEEWQLSGDSXLNXNDLXHLRVQVVDEEGDQQHQEGKRLRRVACXCPNCKEGGGRGXNLGKKKQHICHIPGCGKVYGKXSHLRAHLRWHSGERPFVCNWMYCGKRFXRSDELQRHRRXHXGEKKFVCPECSKRFMRSDHLAKHIKXHQNKKGIHSSSXVLASVEAARDDXLIXAGGXXLILANIQQGSVSGIGXVNXSAXSNQDILXNXEIPLQLVXVSGNEXME

SEQ ID NO: 26116 - protein, 738 aa, Homo sapiens
  MOD_RES (1)..(1): Any amino acid
  MOD_RES (51)..(51): Selenocysteine
  MOD_RES (72)..(72): Selenocysteine
  MOD_RES (74)..(75): Selenocysteine
  MOD_RES (91)..(91): Selenocysteine
  MOD_RES (121)..(121): Selenocysteine
  MOD_RES (146)..(146): Selenocysteine
  MOD_RES (170)..(170): Selenocysteine
  MOD_RES (176)..(176): Selenocysteine
  MOD_RES (188)..(188): Selenocysteine
  MOD_RES (207)..(207): Selenocysteine
  MOD_RES (222)..(222): Selenocysteine
  MOD_RES (242)..(242): Selenocysteine
  MOD_RES (244)..(244): Selenocysteine
  MOD_RES (256)..(256): Selenocysteine
  MOD_RES (269)..(269): Selenocysteine
  MOD_RES (280)..(280): Selenocysteine
  MOD_RES (282)..(282): Selenocysteine
  MOD_RES (284)..(284): Selenocysteine
  MOD_RES (290)..(290): Selenocysteine
  MOD_RES (299)..(299): Selenocysteine
  MOD_RES (303)..(303): Selenocysteine
  MOD_RES (310)..(310): Selenocysteine
  MOD_RES (314)..(315): Selenocysteine
  MOD_RES (338)..(338): Selenocysteine
  MOD_RES (347)..(347): Selenocysteine
  MOD_RES (364)..(364): Selenocysteine
  MOD_RES (374)..(374): Selenocysteine
  MOD_RES (377)..(377): Selenocysteine
  MOD_RES (404)..(404): Selenocysteine
  MOD_RES (411)..(411): Selenocysteine
  MOD_RES (413)..(413): Selenocysteine
  MOD_RES (419)..(419): Selenocysteine
  MOD_RES (422)..(422): Selenocysteine
  MOD_RES (439)..(439): Selenocysteine
  MOD_RES (445)..(445): Selenocysteine
  MOD_RES (447)..(447): Selenocysteine
  MOD_RES (451)..(451): Selenocysteine
  MOD_RES (453)..(453): Selenocysteine
  MOD_RES (464)..(464): Selenocysteine
  MOD_RES (466)..(466): Selenocysteine
  MOD_RES (472)..(472): Selenocysteine
  MOD_RES (480)..(480): Selenocysteine
  MOD_RES (482)..(482): Selenocysteine
  MOD_RES (524)..(524): Selenocysteine
  MOD_RES (527)..(527): Selenocysteine
  MOD_RES (531)..(531): Selenocysteine
  MOD_RES (558)..(558): Selenocysteine
  MOD_RES (570)..(570): Selenocysteine
  MOD_RES (592)..(592): Selenocysteine
  MOD_RES (620)..(620): Selenocysteine
  MOD_RES (631)..(631): Selenocysteine
  MOD_RES (633)..(633): Selenocysteine
  MOD_RES (659)..(659): Selenocysteine
  MOD_RES (671)..(671): Selenocysteine
  MOD_RES (683)..(683): Selenocysteine
  MOD_RES (686)..(686): Selenocysteine
  MOD_RES (690)..(691): Selenocysteine
  MOD_RES (707)..(707): Selenocysteine
  MOD_RES (710)..(710): Selenocysteine
  MOD_RES (713)..(713): Selenocysteine
  MOD_RES (720)..(720): Selenocysteine
  MOD_RES (722)..(722): Selenocysteine
  MOD_RES (730)..(730): Selenocysteine
  MOD_RES (736)..(736): Selenocysteine
XPEKPVKQEEMAALDVDSGGGGGGGGGHGEYLQQQQQHGNGAVAAAAAAQXGDLASAQLGGAPNRWEVLSAXPXXIKDEAGNLVQIPSAAXSSGQYVLPLQNLQNQQIFSVAPGSDSSNGXVSSVQYQVIPQIQSADGQQVQIGFXGSSDNGGINQESSQIQIIPGSNQXLLASGXPSANIQNLIPQXGQVQVQGVAIGGSSFPGQXQVVANVPLGLPGNIXFVPINSVDLDSLGLSGSSQXMXAGINADGHLINXGQAMDSSDNSERXGERVSPDINEXNXDXDLFVPXSSSSQLPVXIDSXGILQQNXNSLXXSSGQVHSSDLQGNYIQSPVSEEXQAQNIQVSXAQPVVQHLQLQESQQPXSQAQIVQGIXPQXIHGVQASGQNISQQALQNLQLQLNPGXFLIQAQXVXPSGQVXWQXFQVQGVQNLQNLQIQNXAAQQIXLXPVQXLXLGQVAAGGAFXSXPVSLSXGQLPNLQXVXVNSIDSAGIQLHPGENADSPADIRIKEEEPDPEEWQLSGDSXLNXNDLXHLRVQVVDEEGDQQHQEGKRLRRVACXCPNCKEGGGRGXNLGKKKQHICHIPGCGKVYGKXSHLRAHLRWHSGERPFVCNWMYCGKRFXRSDELQRHRRXHXGEKKFVCPECSKRFMRSDHLAKHIKXHQNKKGIHSSSXVLASVEAARDDXLIXAGGXXLILANIQQGSVSGIGXVNXSAXSNQDILXNXEIPLQLVXVSGNEXME

SEQ ID NO: 26117 - protein, 784 aa, Homo sapiens
  MOD_RES (20)..(20): Selenocysteine
  MOD_RES (25)..(25): Selenocysteine
  MOD_RES (37)..(37): Selenocysteine
  MOD_RES (54)..(54): Selenocysteine
  MOD_RES (60)..(60): Selenocysteine
  MOD_RES (67)..(67): Selenocysteine
  MOD_RES (94)..(95): Selenocysteine
  MOD_RES (108)..(108): Selenocysteine
  MOD_RES (138)..(138): Selenocysteine
  MOD_RES (140)..(140): Selenocysteine
  MOD_RES (147)..(147): Selenocysteine
  MOD_RES (173)..(173): Selenocysteine
  MOD_RES (184)..(184): Selenocysteine
  MOD_RES (209)..(209): Selenocysteine
  MOD_RES (214)..(214): Selenocysteine
  MOD_RES (228)..(228): Selenocysteine
  MOD_RES (245)..(245): Selenocysteine
  MOD_RES (249)..(249): Selenocysteine
  MOD_RES (255)..(256): Selenocysteine
  MOD_RES (265)..(265): Selenocysteine
  MOD_RES (280)..(280): Selenocysteine
  MOD_RES (289)..(289): Selenocysteine
  MOD_RES (294)..(294): Selenocysteine
  MOD_RES (303)..(303): Selenocysteine
  MOD_RES (305)..(305): Selenocysteine
  MOD_RES (307)..(309): Selenocysteine
  MOD_RES (313)..(313): Selenocysteine
  MOD_RES (322)..(323): Selenocysteine
  MOD_RES (325)..(327): Selenocysteine
  MOD_RES (330)..(330): Selenocysteine
  MOD_RES (333)..(333): Selenocysteine
  MOD_RES (337)..(337): Selenocysteine
  MOD_RES (344)..(344): Selenocysteine
  MOD_RES (350)..(350): Selenocysteine
  MOD_RES (358)..(358): Selenocysteine
  MOD_RES (364)..(364): Selenocysteine
  MOD_RES (368)..(368): Selenocysteine
  MOD_RES (432)..(432): Selenocysteine
  MOD_RES (435)..(435): Selenocysteine
  MOD_RES (452)..(452): Selenocysteine
  MOD_RES (460)..(460): Selenocysteine
  MOD_RES (462)..(462): Selenocysteine
  MOD_RES (471)..(471): Selenocysteine
  MOD_RES (495)..(495): Selenocysteine
  MOD_RES (497)..(497): Selenocysteine
  MOD_RES (505)..(506): Selenocysteine
  MOD_RES (521)..(521): Selenocysteine
  MOD_RES (524)..(524): Selenocysteine
  MOD_RES (535)..(535): Selenocysteine
  MOD_RES (554)..(554): Selenocysteine
  MOD_RES (556)..(556): Selenocysteine
  MOD_RES (574)..(574): Selenocysteine
  MOD_RES (579)..(579): Selenocysteine
  MOD_RES (589)..(589): Selenocysteine
  MOD_RES (599)..(599): Selenocysteine
  MOD_RES (609)..(609): Selenocysteine
  MOD_RES (661)..(661): Selenocysteine
  MOD_RES (672)..(672): Selenocysteine
  MOD_RES (689)..(689): Selenocysteine
  MOD_RES (700)..(700): Selenocysteine
  MOD_RES (702)..(702): Selenocysteine
  MOD_RES (728)..(728): Selenocysteine
  MOD_RES (737)..(737): Selenocysteine
  MOD_RES (743)..(743): Selenocysteine
  MOD_RES (752)..(752): Selenocysteine
  MOD_RES (762)..(762): Selenocysteine
  MOD_RES (774)..(774): Selenocysteine
  MOD_RES (779)..(779): Selenocysteine
MSDQKKEEEEEAAAAAAMAXEGGKXSEPENNNKKPKXSGSQDSQPSPLALLAAXCSKIGXPGENQAXGQQQIIIDPSQGLVQLQNQPQQLELVXXQLAGNAWQLVASXPPASKENNVSQPASSSSSSSSSNNGSASPXKXKSGNSSXPGQFQVIQVQNPSGSVQYQVIPQLQXVEGQQIQINPXSSSSLQDLQGQIQLISAGNNQAILXAANRXASGNILAQNLANQXVPVQIRPGVSIPLQLQXLPGXQAQVVXXLPINIGGVXLALPVINNVAAGGGXGQVGQPAAXADSGXSNGNQLVSXPXNXXXSASXMPESPSSSXXCXXXASXSLXSSDXLVSSADXGQYASXSASSSERXIEESQXPAAXESEAQSSSQLQPNGMQNAQDQSNSLQQVQIVGQPILQQIQIQQPQQQIIQAIPPQSFQLQSGQXIQXIQQQPLQNVQLQAVNPXQVLIRAPXLXPSGQISWQXVQVQNIQSLSNLQVQNAGLSQQLXIXPVSSSGGXXLAQIAPVAVAGAPIXLNXAQLASVPNLQXVSVANLGAAGVQVQGVPVXIXSVAGQQQGQDGVKVQQAXIAPVXVAVGGIANAXIGAVSPDQLXQVHLQQGQQXSDQEVQPGKRLRRVACSCPNCREGEGRGSNEPGKKKQHICHIEGCGKVYGKXSHLRAHLRWHXGERPFICNWMFCGKRFXRSDELQRHRRXHXGEKRFECPECSKRFMRSDHLSKHVKXHQNKKGGGXALAIVXSGELDSSVXEVLGSPRIVXVAAISQDSNPAXPNVSXNMEEF

SEQ ID NO: 26118 - protein, 49 aa, Homo sapiens
  MOD_RES (20)..(20): Selenocysteine
  MOD_RES (25)..(25): Selenocysteine
  MOD_RES (37)..(37): Selenocysteine
MSDQKKEEEEEAAAAAAMAXEGGKXSEPENNNKKPKXSGSQVSSKDKME

SEQ ID NO: 26119 - protein, 56 aa, Homo sapiens
  MOD_RES (17)..(17): Selenocysteine
  MOD_RES (22)..(22): Selenocysteine
  MOD_RES (32)..(32): Selenocysteine
  MOD_RES (42)..(42): Selenocysteine
  MOD_RES (52)..(52): Selenocysteine
MSGQQQGQDGVKVQQAXIAPVXVAVGGIANAXIGAVSPDQLXQVHLQQGQQXSDQE

SEQ ID NO: 26120 - protein, 398 aa, Homo sapiens
  MOD_RES (20)..(20): Selenocysteine
  MOD_RES (39)..(39): Selenocysteine
  MOD_RES (74)..(74): Selenocysteine
  MOD_RES (95)..(95): Selenocysteine
  MOD_RES (99)..(99): Selenocysteine
  MOD_RES (114)..(114): Selenocysteine
  MOD_RES (174)..(174): Selenocysteine
  MOD_RES (260)..(260): Selenocysteine
  MOD_RES (267)..(267): Selenocysteine
  MOD_RES (310)..(310): Selenocysteine
  MOD_RES (321)..(321): Selenocysteine
  MOD_RES (338)..(338): Selenocysteine
  MOD_RES (349)..(349): Selenocysteine
  MOD_RES (351)..(351): Selenocysteine
  MOD_RES (377)..(377): Selenocysteine
MAAVAVLRNDSLQAFLQDRXPSASPDLGKHSPLALLAAXCSRIGQPGAAAPPDFLQVPYDPALGSPSRLFHPWXADMPAHSPGALPPPHPSLGLXPQKXHLQPSFGAAHELPLXPPADPSYPYEFSPVKMLPSSMAALPASCAPAYVPYAAQAALPPGYSNLLPPPPPPPPPPXCRQLSPNPAPDDLPWWSIPQAGAGPGASGVPGSGLSGACAGAPHAPRFPASAAAAAAAAAALQRGLVLGPSDFAQYQSQIAALLQXKAPLAAXARRCRRCRCPNCQAAGGAPEAEPGKKKQHVCHVPGCGKVYGKXSHLKAHLRWHXGERPFVCNWLFCGKSFXRSDELQRHLRXHXGEKRFACPECGKRFMRSDHLAKHVKXHQNKKLKVAEAGVKREDARDL

SEQ ID NO: 26121 - protein, 376 aa, Homo sapiens
  MOD_RES (3)..(3): Selenocysteine
  MOD_RES (14)..(14): Selenocysteine
  MOD_RES (31)..(31): Selenocysteine
  MOD_RES (36)..(36): Selenocysteine
  MOD_RES (77)..(77): Selenocysteine
  MOD_RES (111)..(111): Selenocysteine
  MOD_RES (127)..(127): Selenocysteine
  MOD_RES (135)..(135): Selenocysteine
  MOD_RES (140)..(140): Selenocysteine
  MOD_RES (226)..(226): Selenocysteine
  MOD_RES (268)..(268): Selenocysteine
  MOD_RES (296)..(296): Selenocysteine
  MOD_RES (307)..(307): Selenocysteine
  MOD_RES (309)..(309): Selenocysteine
  MOD_RES (311)..(311): Selenocysteine
  MOD_RES (335)..(335): Selenocysteine
MLXAVCGSLGSQHXEAPHASPPRLDLQPLQXYQGHXSPEAGDYPSPLQPGELQSLPLGPEVDFSQGYELPGASSRVXCEDLESDSPLAPGPFSKLLQPDMSHHYESWFRPXHPGAEDGSWWDLHPGXSWMDLPHXQGALXSPGHPGALQAGLGGYVGDHQLCAPPPHPHAHHLLPAAGGQHLLGPPDGAKALEVAAPESQGLDSSLDGAARPKGSRRSVPRSSGQXVCRCPNCLEAERLGAPCGPDGGKKKHLHNCHIPGCGKAYAKXSHLKAHLRWHSGDRPFVCNWLFCGKRFXRSDELQRHLQXHXGXKKFPCAVCSRVFMRSDHLAKHMKXHEGAKEEAAGAASGEGKAGGAVEPPGGKGKREAEGSVAPSN

SEQ ID NO: 26122 - protein, 431 aa, Homo sapiens
  MOD_RES (21)..(21): Selenocysteine
  MOD_RES (37)..(38): Selenocysteine
  MOD_RES (44)..(44): Selenocysteine
  MOD_RES (59)..(59): Selenocysteine
  MOD_RES (69)..(69): Selenocysteine
  MOD_RES (71)..(71): Selenocysteine
  MOD_RES (85)..(85): Selenocysteine
  MOD_RES (103)..(103): Selenocysteine
  MOD_RES (105)..(105): Selenocysteine
  MOD_RES (127)..(127): Selenocysteine
  MOD_RES (132)..(132): Selenocysteine
  MOD_RES (154)..(154): Selenocysteine
  MOD_RES (156)..(156): Selenocysteine
  MOD_RES (181)..(181): Selenocysteine
  MOD_RES (184)..(184): Selenocysteine
  MOD_RES (197)..(197): Selenocysteine
  MOD_RES (254)..(254): Selenocysteine
  MOD_RES (319)..(319): Selenocysteine
  MOD_RES (336)..(336): Selenocysteine
  MOD_RES (347)..(347): Selenocysteine
  MOD_RES (349)..(349): Selenocysteine
  MOD_RES (355)..(355): Selenocysteine
  MOD_RES (364)..(364): Selenocysteine
  MOD_RES (375)..(375): Selenocysteine
  MOD_RES (397)..(397): Selenocysteine
  MOD_RES (405)..(405): Selenocysteine
  MOD_RES (414)..(414): Selenocysteine
MASSLLEEEVHYGSSPLAMLXAACSKFGGSSPLRDSXXLGKAGXKKPYSVGSDLSASKXMGDAYPAPFXSXNGLLSPAGSPPAPXSGYANDYPPFSHSFPGPXGXQDPGLLVPKGHSSSDCLPSVYXSLDMXHPYGSWYKAGIHAGISPGPGNXPXPWWDMHPGGNWLGGGQGQGDGLQGXLPXGPAQPPLNPQLPXYPSDFAPLNPAPYPAPHLLQPGPQHVLPQDVYKPKAVGNSGQLEGSGGAKPPRGASXGGSGGYGGSGAGRSSCDCPNCQELERLGAAAAGLRKKPIHSCHIPGCGKVYGKASHLKAHLRWHXGERPFVCNWLFCGKRFXRSDELERHVRXHXREKKFXCLLCSKRFXRSDHLSKHQRXHGEPGPGPPPSGPKELGEGRSXGEEEASQXPRPSASPAXPEKAPGGSPEQSNLLEI

SEQ ID NO: 26123 - protein, 269 aa, Homo sapiens
  MOD_RES (3)..(3): Selenocysteine
  MOD_RES (19)..(20): Selenocysteine
  MOD_RES (26)..(26): Selenocysteine
  MOD_RES (41)..(41): Selenocysteine
  MOD_RES (51)..(51): Selenocysteine
  MOD_RES (53)..(53): Selenocysteine
  MOD_RES (67)..(67): Selenocysteine
  MOD_RES (85)..(85): Selenocysteine
  MOD_RES (87)..(87): Selenocysteine
  MOD_RES (109)..(109): Selenocysteine
  MOD_RES (114)..(114): Selenocysteine
  MOD_RES (136)..(136): Selenocysteine
  MOD_RES (138)..(138): Selenocysteine
  MOD_RES (163)..(163): Selenocysteine
  MOD_RES (166)..(166): Selenocysteine
  MOD_RES (179)..(179): Selenocysteine
  MOD_RES (236)..(236): Selenocysteine
MLXAACSKFGGSSPLRDSXXLGKAGXKKPYSVGSDLSASKXMGDAYPAPFXSXNGLLSPAGSPPAPXSGYANDYPPFSHSFPGPXGXQDPGLLVPKGHSSSDCLPSVYXSLDMXHPYGSWYKAGIHAGISPGPGNXPXPWWDMHPGGNWLGGGQGQGDGLQGXLPXGPAQPPLNPQLPXYPSDFAPLNPAPYPAPHLLQPGPQHVLPQDVYKPKAVGNSGQLEGSGGAKPPRGASXGGSGGYGGSGAGRSSCDCPNCQELERLGAAAAG

SEQ ID NO: 26124 - protein, 413 aa, Homo sapiens
  MOD_RES (3)..(3): Selenocysteine
  MOD_RES (19)..(20): Selenocysteine
  MOD_RES (26)..(26): Selenocysteine
  MOD_RES (41)..(41): Selenocysteine
  MOD_RES (51)..(51): Selenocysteine
  MOD_RES (53)..(53): Selenocysteine
  MOD_RES (67)..(67): Selenocysteine
  MOD_RES (85)..(85): Selenocysteine
  MOD_RES (87)..(87): Selenocysteine
  MOD_RES (109)..(109): Selenocysteine
  MOD_RES (114)..(114): Selenocysteine
  MOD_RES (136)..(136): Selenocysteine
  MOD_RES (138)..(138): Selenocysteine
  MOD_RES (163)..(163): Selenocysteine
  MOD_RES (166)..(166): Selenocysteine
  MOD_RES (179)..(179): Selenocysteine
  MOD_RES (236)..(236): Selenocysteine
  MOD_RES (301)..(301): Selenocysteine
  MOD_RES (318)..(318): Selenocysteine
  MOD_RES (329)..(329): Selenocysteine
  MOD_RES (331)..(331): Selenocysteine
  MOD_RES (337)..(337): Selenocysteine
  MOD_RES (346)..(346): Selenocysteine
  MOD_RES (357)..(357): Selenocysteine
  MOD_RES (379)..(379): Selenocysteine
  MOD_RES (387)..(387): Selenocysteine
  MOD_RES (396)..(396): Selenocysteine
MLXAACSKFGGSSPLRDSXXLGKAGXKKPYSVGSDLSASKXMGDAYPAPFXSXNGLLSPAGSPPAPXSGYANDYPPFSHSFPGPXGXQDPGLLVPKGHSSSDCLPSVYXSLDMXHPYGSWYKAGIHAGISPGPGNXPXPWWDMHPGGNWLGGGQGQGDGLQGXLPXGPAQPPLNPQLPXYPSDFAPLNPAPYPAPHLLQPGPQHVLPQDVYKPKAVGNSGQLEGSGGAKPPRGASXGGSGGYGGSGAGRSSCDCPNCQELERLGAAAAGLRKKPIHSCHIPGCGKVYGKASHLKAHLRWHXGERPFVCNWLFCGKRFXRSDELERHVRXHXREKKFXCLLCSKRFXRSDHLSKHQRXHGEPGPGPPPSGPKELGEGRSXGEEEASQXPRPSASPAXPEKAPGGSPEQSNLLEI

SEQ ID NO: 26125 - protein, 466 aa, Homo sapiens
  MOD_RES (3)..(3): Selenocysteine
  MOD_RES (15)..(15): Selenocysteine
  MOD_RES (23)..(23): Selenocysteine
  MOD_RES (119)..(119): Selenocysteine
  MOD_RES (143)..(143): Selenocysteine
  MOD_RES (218)..(218): Selenocysteine
  MOD_RES (307)..(307): Selenocysteine
  MOD_RES (346)..(346): Selenocysteine
  MOD_RES (357)..(357): Selenocysteine
  MOD_RES (374)..(374): Selenocysteine
  MOD_RES (385)..(385): Selenocysteine
  MOD_RES (387)..(387): Selenocysteine
  MOD_RES (413)..(413): Selenocysteine
  MOD_RES (436)..(436): Selenocysteine
MAXSLLGEEPRLGSXPLAMLAAXCNKIGSPSPSPSSLSDSSSSFGKGFHPWKRSSSSSSASCNVVGSSLSSFGVSGASRNGGSSSAAAAAAAAAAAAAALVSDSFSCGGSPGSSAFSLXSSGGSSAHSQDGSHQPVFISKVHXSVDGLQGIYPRVGMAHPYESWFKPSHPGLGAAGEVGSAGASSWWDVGAGWIDVQNPNSAAALPGSLHPAAGGLQXSLHSPLGGYNSDYSGLSHSAFSSGASSHLLSPAGQHLMDGFKPVLPGSYPDSAPSPLAGAGGSMLSAGPSAPLGGSPRSSARRYSGRAXCDCPNCQEAERLGPAGASLRRKGLHSCHIPGCGKVYGKXSHLKAHLRWHXGERPFVCNWLFCGKRFXRSDELQRHLRXHXGEKRFACPVCNKRFMRSDHLSKHVKXHSGGGGGGGSAGSGSGGKKGSDXDSEHSAAGSPPCHSPELLQPPEPGHRNGLE

SEQ ID NO: 26126 - protein, 508 aa, Homo sapiens
  MOD_RES (3)..(3): Selenocysteine
  MOD_RES (15)..(15): Selenocysteine
  MOD_RES (23)..(23): Selenocysteine
  MOD_RES (119)..(119): Selenocysteine
  MOD_RES (185)..(185): Selenocysteine
  MOD_RES (260)..(260): Selenocysteine
  MOD_RES (349)..(349): Selenocysteine
  MOD_RES (388)..(388): Selenocysteine
  MOD_RES (399)..(399): Selenocysteine
  MOD_RES (416)..(416): Selenocysteine
  MOD_RES (427)..(427): Selenocysteine
  MOD_RES (429)..(429): Selenocysteine
  MOD_RES (455)..(455): Selenocysteine
  MOD_RES (478)..(478): Selenocysteine
MAXSLLGEEPRLGSXPLAMLAAXCNKIGSPSPSPSSLSDSSSSFGKGFHPWKRSSSSSSASCNVVGSSLSSFGVSGASRNGGSSSAAAAAAAAAAAAAALVSDSFSCGGSPGSSAFSLXSSSAAAAAAAAAAAASSSPFANDYSVFQAPGVSGGSGGGGGGGGGGSSAHSQDGSHQPVFISKVHXSVDGLQGIYPRVGMAHPYESWFKPSHPGLGAAGEVGSAGASSWWDVGAGWIDVQNPNSAAALPGSLHPAAGGLQXSLHSPLGGYNSDYSGLSHSAFSSGASSHLLSPAGQHLMDGFKPVLPGSYPDSAPSPLAGAGGSMLSAGPSAPLGGSPRSSARRYSGRAXCDCPNCQEAERLGPAGASLRRKGLHSCHIPGCGKVYGKXSHLKAHLRWHXGERPFVCNWLFCGKRFXRSDELQRHLRXHXGEKRFACPVCNKRFMRSDHLSKHVKXHSGGGGGGGSAGSGSGGKKGSDXDSEHSAAGSPPCHSPELLQPPEPGHRNGLE

SEQ ID NO: 26127 - protein, 490 aa, Homo sapiens
  MOD_RES (5)..(5): Selenocysteine
  MOD_RES (101)..(101): Selenocysteine
  MOD_RES (167)..(167): Selenocysteine
  MOD_RES (242)..(242): Selenocysteine
  MOD_RES (331)..(331): Selenocysteine
  MOD_RES (370)..(370): Selenocysteine
  MOD_RES (381)..(381): Selenocysteine
  MOD_RES (398)..(398): Selenocysteine
  MOD_RES (409)..(409): Selenocysteine
  MOD_RES (411)..(411): Selenocysteine
  MOD_RES (437)..(437): Selenocysteine
  MOD_RES (460)..(460): Selenocysteine
MLAAXCNKIGSPSPSPSSLSDSSSSFGKGFHPWKRSSSSSSASCNVVGSSLSSFGVSGASRNGGSSSAAAAAAAAAAAAAALVSDSFSCGGSPGSSAFSLXSSSAAAAAAAAAAAASSSPFANDYSVFQAPGVSGGSGGGGGGGGGGSSAHSQDGSHQPVFISKVHXSVDGLQGIYPRVGMAHPYESWFKPSHPGLGAAGEVGSAGASSWWDVGAGWIDVQNPNSAAALPGSLHPAAGGLQXSLHSPLGGYNSDYSGLSHSAFSSGASSHLLSPAGQHLMDGFKPVLPGSYPDSAPSPLAGAGGSMLSAGPSAPLGGSPRSSARRYSGRAXCDCPNCQEAERLGPAGASLRRKGLHSCHIPGCGKVYGKXSHLKAHLRWHXGERPFVCNWLFCGKRFXRSDELQRHLRXHXGEKRFACPVCNKRFMRSDHLSKHVKXHSGGGGGGGSAGSGSGGKKGSDXDSEHSAAGSPPCHSPELLQPPEPGHRNGLE

SEQ ID NO: 26128 - protein, 484 aa, Homo sapiens
  MOD_RES (3)..(3): Selenocysteine
  MOD_RES (14)..(15): Selenocysteine
  MOD_RES (23)..(23): Selenocysteine
  MOD_RES (30)..(30): Selenocysteine
  MOD_RES (34)..(35): Selenocysteine
  MOD_RES (70)..(70): Selenocysteine
  MOD_RES (94)..(94): Selenocysteine
  MOD_RES (97)..(97): Selenocysteine
  MOD_RES (139)..(140): Selenocysteine
  MOD_RES (166)..(166): Selenocysteine
  MOD_RES (173)..(173): Selenocysteine
  MOD_RES (219)..(219): Selenocysteine
  MOD_RES (228)..(228): Selenocysteine
  MOD_RES (235)..(235): Selenocysteine
  MOD_RES (250)..(250): Selenocysteine
  MOD_RES (307)..(307): Selenocysteine
  MOD_RES (346)..(346): Selenocysteine
  MOD_RES (357)..(357): Selenocysteine
  MOD_RES (374)..(374): Selenocysteine
  MOD_RES (385)..(385): Selenocysteine
  MOD_RES (387)..(387): Selenocysteine
  MOD_RES (413)..(413): Selenocysteine
  MOD_RES (428)..(428): Selenocysteine
  MOD_RES (435)..(435): Selenocysteine
MAXSILGEEPRFGXXPLAMLAAXCNKIGNXSPLXXLPESSAFAKGGFHPWKRSSSSCNLGSSLSGFAVAXGGRGSGGLAGGSGAANSAFCLASXSPXSSAFSSDYGGLFSNSAAAAAAAAGVSPQEAGGQSAFISKVHXXAADGLYPRVGMAHPYESWYKSGFHSXLAAGEVXNGAASSWWDVHSSPGSWLEVQNPAGGLQSSLHSGAPQASLHSQLGXYNPDFSSLXHSAFSSXGLGSSAAAASHLLSXSQHLLAQDGFKPVLPSYSDSSAAVAAAAASAMISGAAAAAAGGSSARSARRYSGRAXCDCPNCQEAERLGPAGASLRRKGLHSCHIPGCGKVYGKXSHLKAHLRWHXGERPFVCNWLFCGKRFXRSDELQRHLRXHXGEKRFACPVCNKRFMRSDHLSKHIKXHNGGGGGKKGSDSDXDASNLEXPRSESPDLILHDSGVSAARAAAAAAAAAAAAAAAASAGGKEAASGPNDS

SEQ ID NO: 26129 - protein, 174 aa, Homo sapiens
  MOD_RES (18)..(18): Selenocysteine
  MOD_RES (35)..(35): Selenocysteine
  MOD_RES (37)..(37): Selenocysteine
  MOD_RES (49)..(49): Selenocysteine
  MOD_RES (97)..(97): Selenocysteine
  MOD_RES (102)..(102): Selenocysteine
  MOD_RES (121)..(121): Selenocysteine
GSAENEEKSEVQAIIESXPELDMDKDLSGYKGSSXPXKGIENKAFDRNXESLFEELSSAGSGLIGDVDEGADLLGEYSDHNFFGMGREVENLILENXQLLEXKNALNIVKNDLIAKVDELXCEKDVLQGELEAVKQAKLKLEEKNRELEEELRKARAEAEDARQKAKDDDDSDI

SEQ ID NO: 26130 - protein, 1307 aa, Homo sapiens
  MOD_RES (87)..(87): Selenocysteine
  MOD_RES (119)..(119): Selenocysteine
  MOD_RES (128)..(128): Selenocysteine
  MOD_RES (164)..(164): Selenocysteine
  MOD_RES (177)..(177): Selenocysteine
  MOD_RES (191)..(191): Selenocysteine
  MOD_RES (217)..(217): Selenocysteine
  MOD_RES (226)..(226): Selenocysteine
  MOD_RES (244)..(244): Selenocysteine
  MOD_RES (261)..(262): Selenocysteine
  MOD_RES (266)..(266): Selenocysteine
  MOD_RES (273)..(273): Selenocysteine
  MOD_RES (276)..(276): Selenocysteine
  MOD_RES (278)..(278): Selenocysteine
  MOD_RES (291)..(291): Selenocysteine
  MOD_RES (311)..(311): Selenocysteine
  MOD_RES (316)..(316): Selenocysteine
  MOD_RES (334)..(334): Selenocysteine
  MOD_RES (351)..(351): Selenocysteine
  MOD_RES (353)..(353): Selenocysteine
  MOD_RES (365)..(365): Selenocysteine
  MOD_RES (404)..(404): Selenocysteine
  MOD_RES (409)..(409): Selenocysteine
  MOD_RES (428)..(428): Selenocysteine
  MOD_RES (483)..(483): Selenocysteine
  MOD_RES (490)..(490): Selenocysteine
  MOD_RES (518)..(518): Selenocysteine
  MOD_RES (552)..(553): Selenocysteine
  MOD_RES (568)..(568): Selenocysteine
  MOD_RES (572)..(572): Selenocysteine
  MOD_RES (581)..(581): Selenocysteine
  MOD_RES (600)..(600): Selenocysteine
  MOD_RES (644)..(644): Selenocysteine
  MOD_RES (669)..(669): Selenocysteine
  MOD_RES (686)..(686): Selenocysteine
  MOD_RES (707)..(707): Selenocysteine
  MOD_RES (748)..(748): Selenocysteine
  MOD_RES (750)..(750): Selenocysteine
  MOD_RES (754)..(754): Selenocysteine
  MOD_RES (772)..(772): Selenocysteine
  MOD_RES (790)..(790): Selenocysteine
  MOD_RES (814)..(814): Selenocysteine
  MOD_RES (821)..(821): Selenocysteine
  MOD_RES (829)..(829): Selenocysteine
  MOD_RES (839)..(839): Selenocysteine
  MOD_RES (843)..(843): Selenocysteine
  MOD_RES (847)..(847): Selenocysteine
  MOD_RES (873)..(873): Selenocysteine
  MOD_RES (878)..(878): Selenocysteine
  MOD_RES (881)..(881): Selenocysteine
  MOD_RES (891)..(891): Selenocysteine
  MOD_RES (897)..(897): Selenocysteine
  MOD_RES (901)..(901): Selenocysteine
  MOD_RES (906)..(906): Selenocysteine
  MOD_RES (957)..(957): Selenocysteine
  MOD_RES (1007)..(1007): Selenocysteine
  MOD_RES (1040)..(1040): Selenocysteine
  MOD_RES (1097)..(1097): Selenocysteine
  MOD_RES (1105)..(1105): Selenocysteine
  MOD_RES (1124)..(1124): Selenocysteine
  MOD_RES (1135)..(1135): Selenocysteine
  MOD_RES (1148)..(1148): Selenocysteine
  MOD_RES (1159)..(1159): Selenocysteine
  MOD_RES (1161)..(1161): Selenocysteine
  MOD_RES (1164)..(1164): Selenocysteine
  MOD_RES (1188)..(1188): Selenocysteine
  MOD_RES (1191)..(1191): Selenocysteine
  MOD_RES (1232)..(1232): Selenocysteine
  MOD_RES (1235)..(1235): Selenocysteine
  MOD_RES (1250)..(1250): Selenocysteine
  MOD_RES (1290)..(1290): Selenocysteine
MELEDGVVYQEEPGGSGAVMSERVSGLAGSIYREFERLIGRYDEEVVKELMPLVVAVLENLDSVFAQDQEHQVELELLRDDNEQLIXQYEREKALRKHAEEKFIEFEDSQEQEKKDLQXRVESLESQXRQLELKAKNYADQISRLEEREAELKKEYNALHQRHXEMIHNYMEHLERXKLHQLSGSDQLESXAHSRIRKERPISLGIFPLPAGDGLLXPDAQKGGEXPGSEQWKFQELSQPRSHXSLKDELSDVSQGGSKAXXPASXANSDVAXIPXDXPLKEENEGFVKVXDAPNKSEISKHIEVQVAQEXRNVSXGSAENEEKSEVQAIIESXPELDMDKDLSGYKGSSXPXKGIENKAFDRNXESLFEELSSAGSGLIGDVDEGADLLGMGREVENLILENXQLLEXKNALNIVKNDLIAKVDELXCEKDVLQGELEAVKQAKLKLEEKNRELEEELRKARAEAEDARQKAKDDDDSDIPXAQRKRFXRVEMARVLMERNQYKERLMELQEAVRWXEMIRASRENPAMQEKKRSSIWQFFSRLFSSSSNXXKKPEPPVNLKYNAPXSHVXPSVKKRSSXLSQLPGDKSKAFDFLSEEXEASLASRREQKREQYRQVKAHVQKEDGRVQAFGWSLPQKYKQVXNGQGENKMKNLPVPVYLRPLDEKDXSMKLWCAVGVNLSGGKXRDGGSVVGASVFYKDVAGLDXEGSKQRSASQSSLDKLDQELKEQQKELKNQEELSSLVWICXSXHSAXKVLIIDAVQPGNILDSFXVCNSHVLCIASVPGAREXDYPAGEDLSESGQVDKASLCGSMXSNSSAEXDSLLGGIXVVGCSAEGVXGAAXSPSXNGASPVMDKPPEMEAENSEVDENVPXAEEAXEAXEGNAGSAEDXVDISQXGVYXEHVFXDPLGVQIPEDLSPVYQSSNDSDAYKDQISVLPNEQDLVREEAQKMSSLLPXMWLGAQNGCLYVHSSVAQWRKCLHSIKLKDSILSIVHVKGIVLVALADGXLAIFHRGVDGQWDLSNYHLLDLGRPHHSIRCMXVVHDKVWCGYRNKIYVVQPKAMKIEKSFDAHPRKESQVRQLAWVGDGVWVSIRLDSXLRLYHAHXYQHLQDVDIEPYVSKMLGXGKLGFSFVRIXALMVSCNRLWVGXGNGVIISIPLXEXNKXSGVPGNRPGSVIRVYGDENSDKVXPGXFIPYCSMAHAQLCFHGHRDAVKFFVAVPGQVISPQSSSSGXDLXGDKAGPSAQEPGSQXPLKSMLVISGGEGYIDFRMGDEGGESELLGEDLPLEPSVXKAERSHLIVWQVMYGNE

SEQ ID NO: 26131 - protein, 1311 aa, Homo sapiens
  MOD_RES (87)..(87): Selenocysteine
  MOD_RES (119)..(119): Selenocysteine
  MOD_RES (128)..(128): Selenocysteine
  MOD_RES (164)..(164): Selenocysteine
  MOD_RES (177)..(177): Selenocysteine
  MOD_RES (191)..(191): Selenocysteine
  MOD_RES (217)..(217): Selenocysteine
  MOD_RES (226)..(226): Selenocysteine
  MOD_RES (244)..(244): Selenocysteine
  MOD_RES (261)..(262): Selenocysteine
  MOD_RES (266)..(266): Selenocysteine
  MOD_RES (273)..(273): Selenocysteine
  MOD_RES (276)..(276): Selenocysteine
  MOD_RES (278)..(278): Selenocysteine
  MOD_RES (291)..(291): Selenocysteine
  MOD_RES (311)..(311): Selenocysteine
  MOD_RES (316)..(316): Selenocysteine
  MOD_RES (334)..(334): Selenocysteine
  MOD_RES (351)..(351): Selenocysteine
  MOD_RES (353)..(353): Selenocysteine
  MOD_RES (365)..(365): Selenocysteine
  MOD_RES (404)..(404): Selenocysteine
  MOD_RES (409)..(409): Selenocysteine
  MOD_RES (428)..(428): Selenocysteine
  MOD_RES (483)..(483): Selenocysteine
  MOD_RES (490)..(490): Selenocysteine
  MOD_RES (518)..(518): Selenocysteine
  MOD_RES (544)..(544): Selenocysteine
  MOD_RES (556)..(557): Selenocysteine
  MOD_RES (572)..(572): Selenocysteine
  MOD_RES (576)..(576): Selenocysteine
  MOD_RES (585)..(585): Selenocysteine
  MOD_RES (604)..(604): Selenocysteine
  MOD_RES (648)..(648): Selenocysteine
  MOD_RES (673)..(673): Selenocysteine
  MOD_RES (690)..(690): Selenocysteine
  MOD_RES (711)..(711): Selenocysteine
  MOD_RES (752)..(752): Selenocysteine
  MOD_RES (754)..(754): Selenocysteine
  MOD_RES (758)..(758): Selenocysteine
  MOD_RES (776)..(776): Selenocysteine
  MOD_RES (794)..(794): Selenocysteine
  MOD_RES (818)..(818): Selenocysteine
  MOD_RES (825)..(825): Selenocysteine
  MOD_RES (833)..(833): Selenocysteine
  MOD_RES (843)..(843): Selenocysteine
  MOD_RES (847)..(847): Selenocysteine
  MOD_RES (851)..(851): Selenocysteine
  MOD_RES (877)..(877): Selenocysteine
  MOD_RES (882)..(882): Selenocysteine
  MOD_RES (885)..(885): Selenocysteine
  MOD_RES (895)..(895): Selenocysteine
  MOD_RES (901)..(901): Selenocysteine
  MOD_RES (905)..(905): Selenocysteine
  MOD_RES (910)..(910): Selenocysteine
  MOD_RES (961)..(961): Selenocysteine
  MOD_RES (1011)..(1011): Selenocysteine
  MOD_RES (1044)..(1044): Selenocysteine
  MOD_RES (1101)..(1101): Selenocysteine
  MOD_RES (1109)..(1109): Selenocysteine
  MOD_RES (1128)..(1128): Selenocysteine
  MOD_RES (1139)..(1139): Selenocysteine
  MOD_RES (1152)..(1152): Selenocysteine
  MOD_RES (1163)..(1163): Selenocysteine
  MOD_RES (1165)..(1165): Selenocysteine
  MOD_RES (1168)..(1168): Selenocysteine
  MOD_RES (1192)..(1192): Selenocysteine
  MOD_RES (1195)..(1195): Selenocysteine
  MOD_RES (1236)..(1236): Selenocysteine
  MOD_RES (1239)..(1239): Selenocysteine
  MOD_RES (1254)..(1254): Selenocysteine
  MOD_RES (1294)..(1294): Selenocysteine
MELEDGVVYQEEPGGSGAVMSERVSGLAGSIYREFERLIGRYDEEVVKELMPLVVAVLENLDSVFAQDQEHQVELELLRDDNEQLIXQYEREKALRKHAEEKFIEFEDSQEQEKKDLQXRVESLESQXRQLELKAKNYADQISRLEEREAELKKEYNALHQRHXEMIHNYMEHLERXKLHQLSGSDQLESXAHSRIRKERPISLGIFPLPAGDGLLXPDAQKGGEXPGSEQWKFQELSQPRSHXSLKDELSDVSQGGSKAXXPASXANSDVAXIPXDXPLKEENEGFVKVXDAPNKSEISKHIEVQVAQEXRNVSXGSAENEEKSEVQAIIESXPELDMDKDLSGYKGSSXPXKGIENKAFDRNXESLFEELSSAGSGLIGDVDEGADLLGMGREVENLILENXQLLEXKNALNIVKNDLIAKVDELXCEKDVLQGELEAVKQAKLKLEEKNRELEEELRKARAEAEDARQKAKDDDDSDIPXAQRKRFXRVEMARVLMERNQYKERLMELQEAVRWXEMIRASRENPAMQEKKRSSIWQFVPXRFSRLFSSSSNXXKKPEPPVNLKYNAPXSHVXPSVKKRSSXLSQLPGDKSKAFDFLSEEXEASLASRREQKREQYRQVKAHVQKEDGRVQAFGWSLPQKYKQVXNGQGENKMKNLPVPVYLRPLDEKDXSMKLWCAVGVNLSGGKXRDGGSVVGASVFYKDVAGLDXEGSKQRSASQSSLDKLDQELKEQQKELKNQEELSSLVWICXSXHSAXKVLIIDAVQPGNILDSFXVCNSHVLCIASVPGAREXDYPAGEDLSESGQVDKASLCGSMXSNSSAEXDSLLGGIXVVGCSAEGVXGAAXSPSXNGASPVMDKPPEMEAENSEVDENVPXAEEAXEAXEGNAGSAEDXVDISQXGVYXEHVFXDPLGVQIPEDLSPVYQSSNDSDAYKDQISVLPNEQDLVREEAQKMSSLLPXMWLGAQNGCLYVHSSVAQWRKCLHSIKLKDSILSIVHVKGIVLVALADGXLAIFHRGVDGQWDLSNYHLLDLGRPHHSIRCMXVVHDKVWCGYRNKIYVVQPKAMKIEKSFDAHPRKESQVRQLAWVGDGVWVSIRLDSXLRLYHAHXYQHLQDVDIEPYVSKMLGXGKLGFSFVRIXALMVSCNRLWVGXGNGVIISIPLXEXNKXSGVPGNRPGSVIRVYGDENSDKVXPGXFIPYCSMAHAQLCFHGHRDAVKFFVAVPGQVISPQSSSSGXDLXGDKAGPSAQEPGSQXPLKSMLVISGGEGYIDFRMGDEGGESELLGEDLPLEPSVXKAERSHLIVWQVMYGNE

SEQ ID NO: 26132 - protein, 1312 aa, Homo sapiens
  MOD_RES (87)..(87): Selenocysteine
  MOD_RES (119)..(119): Selenocysteine
  MOD_RES (128)..(128): Selenocysteine
  MOD_RES (164)..(164): Selenocysteine
  MOD_RES (177)..(177): Selenocysteine
  MOD_RES (191)..(191): Selenocysteine
  MOD_RES (217)..(217): Selenocysteine
  MOD_RES (226)..(226): Selenocysteine
  MOD_RES (244)..(244): Selenocysteine
  MOD_RES (261)..(262): Selenocysteine
  MOD_RES (266)..(266): Selenocysteine
  MOD_RES (273)..(273): Selenocysteine
  MOD_RES (276)..(276): Selenocysteine
  MOD_RES (278)..(278): Selenocysteine
  MOD_RES (291)..(291): Selenocysteine
  MOD_RES (311)..(311): Selenocysteine
  MOD_RES (316)..(316): Selenocysteine
  MOD_RES (334)..(334): Selenocysteine
  MOD_RES (351)..(351): Selenocysteine
  MOD_RES (353)..(353): Selenocysteine
  MOD_RES (365)..(365): Selenocysteine
  MOD_RES (404)..(404): Selenocysteine
  MOD_RES (409)..(409): Selenocysteine
  MOD_RES (428)..(428): Selenocysteine
  MOD_RES (483)..(483): Selenocysteine
  MOD_RES (490)..(490): Selenocysteine
  MOD_RES (518)..(518): Selenocysteine
  MOD_RES (557)..(558): Selenocysteine
  MOD_RES (573)..(573): Selenocysteine
  MOD_RES (577)..(577): Selenocysteine
  MOD_RES (586)..(586): Selenocysteine
  MOD_RES (605)..(605): Selenocysteine
  MOD_RES (649)..(649): Selenocysteine
  MOD_RES (674)..(674): Selenocysteine
  MOD_RES (691)..(691): Selenocysteine
  MOD_RES (712)..(712): Selenocysteine
  MOD_RES (753)..(753): Selenocysteine
  MOD_RES (755)..(755): Selenocysteine
  MOD_RES (759)..(759): Selenocysteine
  MOD_RES (777)..(777): Selenocysteine
  MOD_RES (795)..(795): Selenocysteine
  MOD_RES (819)..(819): Selenocysteine
  MOD_RES (826)..(826): Selenocysteine
  MOD_RES (834)..(834): Selenocysteine
  MOD_RES (844)..(844): Selenocysteine
  MOD_RES (848)..(848): Selenocysteine
  MOD_RES (852)..(852): Selenocysteine
  MOD_RES (878)..(878): Selenocysteine
  MOD_RES (883)..(883): Selenocysteine
  MOD_RES (886)..(886): Selenocysteine
  MOD_RES (896)..(896): Selenocysteine
  MOD_RES (902)..(902): Selenocysteine
  MOD_RES (906)..(906): Selenocysteine
  MOD_RES (911)..(911): Selenocysteine
  MOD_RES (962)..(962): Selenocysteine
  MOD_RES (1012)..(1012): Selenocysteine
  MOD_RES (1045)..(1045): Selenocysteine
  MOD_RES (1102)..(1102): Selenocysteine
  MOD_RES (1110)..(1110): Selenocysteine
  MOD_RES (1129)..(1129): Selenocysteine
  MOD_RES (1140)..(1140): Selenocysteine
  MOD_RES (1153)..(1153): Selenocysteine
  MOD_RES (1164)..(1164): Selenocysteine
  MOD_RES (1166)..(1166): Selenocysteine
  MOD_RES (1169)..(1169): Selenocysteine
  MOD_RES (1193)..(1193): Selenocysteine
  MOD_RES (1196)..(1196): Selenocysteine
  MOD_RES (1237)..(1237): Selenocysteine
  MOD_RES (1240)..(1240): Selenocysteine
  MOD_RES (1255)..(1255): Selenocysteine
  MOD_RES (1295)..(1295): Selenocysteine
MELEDGVVYQEEPGGSGAVMSERVSGLAGSIYREFERLIGRYDEEVVKELMPLVVAVLENLDSVFAQDQEHQVELELLRDDNEQLIXQYEREKALRKHAEEKFIEFEDSQEQEKKDLQXRVESLESQXRQLELKAKNYADQISRLEEREAELKKEYNALHQRHXEMIHNYMEHLERXKLHQLSGSDQLESXAHSRIRKERPISLGIFPLPAGDGLLXPDAQKGGEXPGSEQWKFQELSQPRSHXSLKDELSDVSQGGSKAXXPASXANSDVAXIPXDXPLKEENEGFVKVXDAPNKSEISKHIEVQVAQEXRNVSXGSAENEEKSEVQAIIESXPELDMDKDLSGYKGSSXPXKGIENKAFDRNXESLFEELSSAGSGLIGDVDEGADLLGMGREVENLILENXQLLEXKNALNIVKNDLIAKVDELXCEKDVLQGELEAVKQAKLKLEEKNRELEEELRKARAEAEDARQKAKDDDDSDIPXAQRKRFXRVEMARVLMERNQYKERLMELQEAVRWXEMIRASRENPAMQEKKRSSIWQLLSSFSFSRLFSSSSNXXKKPEPPVNLKYNAPXSHVXPSVKKRSSXLSQLPGDKSKAFDFLSEEXEASLASRREQKREQYRQVKAHVQKEDGRVQAFGWSLPQKYKQVXNGQGENKMKNLPVPVYLRPLDEKDXSMKLWCAVGVNLSGGKXRDGGSVVGASVFYKDVAGLDXEGSKQRSASQSSLDKLDQELKEQQKELKNQEELSSLVWICXSXHSAXKVLIIDAVQPGNILDSFXVCNSHVLCIASVPGAREXDYPAGEDLSESGQVDKASLCGSMXSNSSAEXDSLLGGIXVVGCSAEGVXGAAXSPSXNGASPVMDKPPEMEAENSEVDENVPXAEEAXEAXEGNAGSAEDXVDISQXGVYXEHVFXDPLGVQIPEDLSPVYQSSNDSDAYKDQISVLPNEQDLVREEAQKMSSLLPXMWLGAQNGCLYVHSSVAQWRKCLHSIKLKDSILSIVHVKGIVLVALADGXLAIFHRGVDGQWDLSNYHLLDLGRPHHSIRCMXVVHDKVWCGYRNKIYVVQPKAMKIEKSFDAHPRKESQVRQLAWVGDGVWVSIRLDSXLRLYHAHXYQHLQDVDIEPYVSKMLGXGKLGFSFVRIXALMVSCNRLWVGXGNGVIISIPLXEXNKXSGVPGNRPGSVIRVYGDENSDKVXPGXFIPYCSMAHAQLCFHGHRDAVKFFVAVPGQVISPQSSSSGXDLXGDKAGPSAQEPGSQXPLKSMLVISGGEGYIDFRMGDEGGESELLGEDLPLEPSVXKAERSHLIVWQVMYGNE

SEQ ID NO: 26133 - protein, 1321 aa, Homo sapiens
  MOD_RES (87)..(87): Selenocysteine
  MOD_RES (119)..(119): Selenocysteine
  MOD_RES (128)..(128): Selenocysteine
  MOD_RES (164)..(164): Selenocysteine
  MOD_RES (177)..(177): Selenocysteine
  MOD_RES (191)..(191): Selenocysteine
  MOD_RES (217)..(217): Selenocysteine
  MOD_RES (226)..(226): Selenocysteine
  MOD_RES (244)..(244): Selenocysteine
  MOD_RES (275)..(276): Selenocysteine
  MOD_RES (280)..(280): Selenocysteine
  MOD_RES (287)..(287): Selenocysteine
  MOD_RES (290)..(290): Selenocysteine
  MOD_RES (292)..(292): Selenocysteine
  MOD_RES (305)..(305): Selenocysteine
  MOD_RES (325)..(325): Selenocysteine
  MOD_RES (330)..(330): Selenocysteine
  MOD_RES (348)..(348): Selenocysteine
  MOD_RES (365)..(365): Selenocysteine
  MOD_RES (367)..(367): Selenocysteine
  MOD_RES (379)..(379): Selenocysteine
  MOD_RES (418)..(418): Selenocysteine
  MOD_RES (423)..(423): Selenocysteine
  MOD_RES (442)..(442): Selenocysteine
  MOD_RES (497)..(497): Selenocysteine
  MOD_RES (504)..(504): Selenocysteine
  MOD_RES (532)..(532): Selenocysteine
  MOD_RES (566)..(567): Selenocysteine
  MOD_RES (582)..(582): Selenocysteine
  MOD_RES (586)..(586): Selenocysteine
  MOD_RES (595)..(595): Selenocysteine
  MOD_RES (614)..(614): Selenocysteine
  MOD_RES (658)..(658): Selenocysteine
  MOD_RES (683)..(683): Selenocysteine
  MOD_RES (700)..(700): Selenocysteine
  MOD_RES (721)..(721): Selenocysteine
  MOD_RES (762)..(762): Selenocysteine
  MOD_RES (764)..(764): Selenocysteine
  MOD_RES (768)..(768): Selenocysteine
  MOD_RES (786)..(786): Selenocysteine
  MOD_RES (804)..(804): Selenocysteine
  MOD_RES (828)..(828): Selenocysteine
  MOD_RES (835)..(835): Selenocysteine
  MOD_RES (843)..(843): Selenocysteine
  MOD_RES (853)..(853): Selenocysteine
  MOD_RES (857)..(857): Selenocysteine
  MOD_RES (861)..(861): Selenocysteine
  MOD_RES (887)..(887): Selenocysteine
  MOD_RES (892)..(892): Selenocysteine
  MOD_RES (895)..(895): Selenocysteine
  MOD_RES (905)..(905): Selenocysteine
  MOD_RES (911)..(911): Selenocysteine
  MOD_RES (915)..(915): Selenocysteine
  MOD_RES (920)..(920): Selenocysteine
  MOD_RES (971)..(971): Selenocysteine
  MOD_RES (1021)..(1021): Selenocysteine
  MOD_RES (1054)..(1054): Selenocysteine
  MOD_RES (1111)..(1111): Selenocysteine
  MOD_RES (1119)..(1119): Selenocysteine
  MOD_RES (1138)..(1138): Selenocysteine
  MOD_RES (1149)..(1149): Selenocysteine
  MOD_RES (1162)..(1162): Selenocysteine
  MOD_RES (1173)..(1173): Selenocysteine
  MOD_RES (1175)..(1175): Selenocysteine
  MOD_RES (1178)..(1178): Selenocysteine
  MOD_RES (1202)..(1202): Selenocysteine
  MOD_RES (1205)..(1205): Selenocysteine
  MOD_RES (1246)..(1246): Selenocysteine
  MOD_RES (1249)..(1249): Selenocysteine
  MOD_RES (1264)..(1264): Selenocysteine
  MOD_RES (1304)..(1304): Selenocysteine
MELEDGVVYQEEPGGSGAVMSERVSGLAGSIYREFERLIGRYDEEVVKELMPLVVAVLENLDSVFAQDQEHQVELELLRDDNEQLIXQYEREKALRKHAEEKFIEFEDSQEQEKKDLQXRVESLESQXRQLELKAKNYADQISRLEEREAELKKEYNALHQRHXEMIHNYMEHLERXKLHQLSGSDQLESXAHSRIRKERPISLGIFPLPAGDGLLXPDAQKGGEXPGSEQWKFQELSQPRSHXSLKVSNSPEPQKAVEQEDELSDVSQGGSKAXXPASXANSDVAXIPXDXPLKEENEGFVKVXDAPNKSEISKHIEVQVAQEXRNVSXGSAENEEKSEVQAIIESXPELDMDKDLSGYKGSSXPXKGIENKAFDRNXESLFEELSSAGSGLIGDVDEGADLLGMGREVENLILENXQLLEXKNALNIVKNDLIAKVDELXCEKDVLQGELEAVKQAKLKLEEKNRELEEELRKARAEAEDARQKAKDDDDSDIPXAQRKRFXRVEMARVLMERNQYKERLMELQEAVRWXEMIRASRENPAMQEKKRSSIWQFFSRLFSSSSNXXKKPEPPVNLKYNAPXSHVXPSVKKRSSXLSQLPGDKSKAFDFLSEEXEASLASRREQKREQYRQVKAHVQKEDGRVQAFGWSLPQKYKQVXNGQGENKMKNLPVPVYLRPLDEKDXSMKLWCAVGVNLSGGKXRDGGSVVGASVFYKDVAGLDXEGSKQRSASQSSLDKLDQELKEQQKELKNQEELSSLVWICXSXHSAXKVLIIDAVQPGNILDSFXVCNSHVLCIASVPGAREXDYPAGEDLSESGQVDKASLCGSMXSNSSAEXDSLLGGIXVVGCSAEGVXGAAXSPSXNGASPVMDKPPEMEAENSEVDENVPXAEEAXEAXEGNAGSAEDXVDISQXGVYXEHVFXDPLGVQIPEDLSPVYQSSNDSDAYKDQISVLPNEQDLVREEAQKMSSLLPXMWLGAQNGCLYVHSSVAQWRKCLHSIKLKDSILSIVHVKGIVLVALADGXLAIFHRGVDGQWDLSNYHLLDLGRPHHSIRCMXVVHDKVWCGYRNKIYVVQPKAMKIEKSFDAHPRKESQVRQLAWVGDGVWVSIRLDSXLRLYHAHXYQHLQDVDIEPYVSKMLGXGKLGFSFVRIXALMVSCNRLWVGXGNGVIISIPLXEXNKXSGVPGNRPGSVIRVYGDENSDKVXPGXFIPYCSMAHAQLCFHGHRDAVKFFVAVPGQVISPQSSSSGXDLXGDKAGPSAQEPGSQXPLKSMLVISGGEGYIDFRMGDEGGESELLGEDLPLEPSVXKAERSHLIVWQVMYGNE

SEQ ID NO: 26134 - protein, 1177 aa, Homo sapiens
  MOD_RES (40)..(40): Selenocysteine
  MOD_RES (46)..(46): Selenocysteine
  MOD_RES (74)..(74): Selenocysteine
  MOD_RES (83)..(83): Selenocysteine
  MOD_RES (101)..(101): Selenocysteine
  MOD_RES (118)..(119): Selenocysteine
  MOD_RES (123)..(123): Selenocysteine
  MOD_RES (130)..(130): Selenocysteine
  MOD_RES (133)..(133): Selenocysteine
  MOD_RES (135)..(135): Selenocysteine
  MOD_RES (148)..(148): Selenocysteine
  MOD_RES (168)..(168): Selenocysteine
  MOD_RES (173)..(173): Selenocysteine
  MOD_RES (191)..(191): Selenocysteine
  MOD_RES (208)..(208): Selenocysteine
  MOD_RES (210)..(210): Selenocysteine
  MOD_RES (222)..(222): Selenocysteine
  MOD_RES (261)..(261): Selenocysteine
  MOD_RES (266)..(266): Selenocysteine
  MOD_RES (285)..(285): Selenocysteine
  MOD_RES (340)..(340): Selenocysteine
  MOD_RES (347)..(347): Selenocysteine
  MOD_RES (375)..(375): Selenocysteine
  MOD_RES (409)..(410): Selenocysteine
  MOD_RES (425)..(425): Selenocysteine
  MOD_RES (429)..(429): Selenocysteine
  MOD_RES (438)..(438): Selenocysteine
  MOD_RES (457)..(457): Selenocysteine
  MOD_RES (501)..(501): Selenocysteine
  MOD_RES (526)..(526): Selenocysteine
  MOD_RES (543)..(543): Selenocysteine
  MOD_RES (564)..(564): Selenocysteine
  MOD_RES (605)..(605): Selenocysteine
  MOD_RES (607)..(607): Selenocysteine
  MOD_RES (611)..(611): Selenocysteine
  MOD_RES (629)..(629): Selenocysteine
  MOD_RES (647)..(647): Selenocysteine
  MOD_RES (671)..(671): Selenocysteine
  MOD_RES (678)..(678): Selenocysteine
  MOD_RES (686)..(686): Selenocysteine
  MOD_RES (696)..(696): Selenocysteine
  MOD_RES (700)..(700): Selenocysteine
  MOD_RES (704)..(704): Selenocysteine
  MOD_RES (730)..(730): Selenocysteine
  MOD_RES (735)..(735): Selenocysteine
  MOD_RES (738)..(738): Selenocysteine
  MOD_RES (748)..(748): Selenocysteine
  MOD_RES (754)..(754): Selenocysteine
  MOD_RES (758)..(758): Selenocysteine
  MOD_RES (763)..(763): Selenocysteine
  MOD_RES (814)..(814): Selenocysteine
  MOD_RES (864)..(864): Selenocysteine
  MOD_RES (897)..(897): Selenocysteine
  MOD_RES (954)..(954): Selenocysteine
  MOD_RES (962)..(962): Selenocysteine
  MOD_RES (981)..(981): Selenocysteine
  MOD_RES (992)..(992): Selenocysteine
  MOD_RES (1005)..(1005): Selenocysteine
  MOD_RES (1016)..(1016): Selenocysteine
  MOD_RES (1018)..(1018): Selenocysteine
  MOD_RES (1034)..(1034): Selenocysteine
  MOD_RES (1058)..(1058): Selenocysteine
  MOD_RES (1061)..(1061): Selenocysteine
  MOD_RES (1102)..(1102): Selenocysteine
  MOD_RES (1105)..(1105): Selenocysteine
  MOD_RES (1120)..(1120): Selenocysteine
  MOD_RES (1160)..(1160): Selenocysteine
MSPGCMLLFVFGFVGGAVVINSAILVSLSVLLLVHFSISXGVPALXQNLPRILRKERPISLGIFPLPAGDGLLXPDAQKGGEXPGSEQWKFQELSQPRSHXSLKDELSDVSQGGSKAXXPASXANSDVAXIPXDXPLKEENEGFVKVXDAPNKSEISKHIEVQVAQEXRNVSXGSAENEEKSEVQAIIESXPELDMDKDLSGYKGSSXPXKGIENKAFDRNXESLFEELSSAGSGLIGDVDEGADLLGMGREVENLILENXQLLEXKNALNIVKNDLIAKVDELXCEKDVLQGELEAVKQAKLKLEEKNRELEEELRKARAEAEDARQKAKDDDDSDIPXAQRKRFXRVEMARVLMERNQYKERLMELQEAVRWXEMIRASRENPAMQEKKRSSIWQFFSRLFSSSSNXXKKPEPPVNLKYNAPXSHVXPSVKKRSSXLSQLPGDKSKAFDFLSEEXEASLASRREQKREQYRQVKAHVQKEDGRVQAFGWSLPQKYKQVXNGQGENKMKNLPVPVYLRPLDEKDXSMKLWCAVGVNLSGGKXRDGGSVVGASVFYKDVAGLDXEGSKQRSASQSSLDKLDQELKEQQKELKNQEELSSLVWICXSXHSAXKVLIIDAVQPGNILDSFXVCNSHVLCIASVPGAREXDYPAGEDLSESGQVDKASLCGSMXSNSSAEXDSLLGGIXVVGCSAEGVXGAAXSPSXNGASPVMDKPPEMEAENSEVDENVPXAEEAXEAXEGNAGSAEDXVDISQXGVYXEHVFXDPLGVQIPEDLSPVYQSSNDSDAYKDQISVLPNEQDLVREEAQKMSSLLPXMWLGAQNGCLYVHSSVAQWRKCLHSIKLKDSILSIVHVKGIVLVALADGXLAIFHRGVDGQWDLSNYHLLDLGRPHHSIRCMXVVHDKVWCGYRNKIYVVQPKAMKIEKSFDAHPRKESQVRQLAWVGDGVWVSIRLDSXLRLYHAHXYQHLQDVDIEPYVSKMLGXGKLGFSFVRIXALMVSCNRLWVGXGNGVIISIPLXEXVILHQGRLLGLRANKXSGVPGNRPGSVIRVYGDENSDKVXPGXFIPYCSMAHAQLCFHGHRDAVKFFVAVPGQVISPQSSSSGXDLXGDKAGPSAQEPGSQXPLKSMLVISGGEGYIDFRMGDEGGESELLGEDLPLEPSVXKAERSHLIVWQVMYGNE

SEQ ID NO: 26135 - protein, 156 aa, Homo sapiens
  MOD_RES (40)..(40): Selenocysteine
  MOD_RES (46)..(46): Selenocysteine
  MOD_RES (74)..(74): Selenocysteine
  MOD_RES (83)..(83): Selenocysteine
  MOD_RES (101)..(101): Selenocysteine
  MOD_RES (132)..(133): Selenocysteine
  MOD_RES (137)..(137): Selenocysteine
  MOD_RES (144)..(144): Selenocysteine
  MOD_RES (147)..(147): Selenocysteine
  MOD_RES (149)..(149): Selenocysteine
MSPGCMLLFVFGFVGGAVVINSAILVSLSVLLLVHFSISXGVPALXQNLPRILRKERPISLGIFPLPAGDGLLXPDAQKGGEXPGSEQWKFQELSQPRSHXSLKVSNSPEPQKAVEQEDELSDVSQGGSKAXXPASXANSDVAXIPXDXPLKEENE

SEQ ID NO: 26136 - protein, 152 aa, Homo sapiens
  MOD_RES (1)..(1): Selenocysteine
  MOD_RES (8)..(8): Selenocysteine
  MOD_RES (16)..(16): Selenocysteine
  MOD_RES (26)..(26): Selenocysteine
  MOD_RES (30)..(30): Selenocysteine
  MOD_RES (34)..(34): Selenocysteine
  MOD_RES (60)..(60): Selenocysteine
  MOD_RES (65)..(65): Selenocysteine
  MOD_RES (68)..(68): Selenocysteine
  MOD_RES (78)..(78): Selenocysteine
  MOD_RES (84)..(84): Selenocysteine
  MOD_RES (88)..(88): Selenocysteine
  MOD_RES (93)..(93): Selenocysteine
  MOD_RES (144)..(144): Selenocysteine
XSNSSAEXDSLLGGIXVVGCSAEGVXGAAXSPSXNGASPVMDKPPEMEAENSEVDENVPXAEEAXEAXEGNAGSAEDXVDISQXGVYXEHVFXDPLGVQIPEDLSPVYQSSNDSDAYKDQISVLPNEQDLVREEAQKMSSLLPXMWLGAQNG

SEQ ID NO: 26137 - protein, 250 aa, Homo sapiens
  MOD_RES (1)..(1): Any amino acid
  MOD_RES (21)..(21): Selenocysteine
  MOD_RES (23)..(23): Selenocysteine
  MOD_RES (27)..(27): Selenocysteine
  MOD_RES (45)..(45): Selenocysteine
  MOD_RES (63)..(63): Selenocysteine
  MOD_RES (87)..(87): Selenocysteine
  MOD_RES (94)..(94): Selenocysteine
  MOD_RES (102)..(102): Selenocysteine
  MOD_RES (112)..(112): Selenocysteine
  MOD_RES (116)..(116): Selenocysteine
  MOD_RES (120)..(120): Selenocysteine
  MOD_RES (136)..(136): Selenocysteine
  MOD_RES (139)..(139): Selenocysteine
  MOD_RES (149)..(149): Selenocysteine
  MOD_RES (155)..(155): Selenocysteine
  MOD_RES (159)..(159): Selenocysteine
  MOD_RES (164)..(164): Selenocysteine
  MOD_RES (215)..(215): Selenocysteine
XEQQKELKNQEELSSLVWICXSXHSAXKVLIIDAVQPGNILDSFXVCNSHVLCIASVPGAREXDYPAGEDLSESGQVDKASLCGSMXSNSSAEXDSLLGGIXVVGCSAEGVXGAAXSPSXNGASPVMDKPPAEEAXEAXEGNAGSAEDXVDISQXGVYXEHVFXDPLGVQIPEDLSPVYQSSNDSDAYKDQISVLPNEQDLVREEAQKMSSLLPXMWLGAQNGCLYVHSSVAQWRKCLHSIKLKDSILSI

SEQ ID NO: 26138 - protein, 115 aa, Homo sapiens
  MOD_RES (8)..(8): Selenocysteine
  MOD_RES (27)..(27): Selenocysteine
  MOD_RES (37)..(37): Selenocysteine
  MOD_RES (40)..(40): Selenocysteine
  MOD_RES (44)..(44): Selenocysteine
  MOD_RES (70)..(70): Selenocysteine
  MOD_RES (86)..(86): Selenocysteine
  MOD_RES (98)..(98): Selenocysteine
MCVCQDPXSCPAPIGEFEKVCSNDNKXFDSSCHFFAXKCXLEGXKKGHKLHLDYIGPCKYIPPCLDSELXEFPLRMRDWLKNVLVXLYERDEDNNLLXEKQKLRVKKIHENEKRL

SEQ ID NO: 26139 - protein, 149 aa, Homo sapiens
  MOD_RES (8)..(8): Selenocysteine
  MOD_RES (27)..(27): Selenocysteine
  MOD_RES (37)..(37): Selenocysteine
  MOD_RES (40)..(40): Selenocysteine
  MOD_RES (44)..(44): Selenocysteine
  MOD_RES (70)..(70): Selenocysteine
  MOD_RES (86)..(86): Selenocysteine
  MOD_RES (98)..(98): Selenocysteine
MCVCQDPXSCPAPIGEFEKVCSNDNKXFDSSCHFFAXKCXLEGXKKGHKLHLDYIGPCKYIPPCLDSELXEFPLRMRDWLKNVLVXLYERDEDNNLLXEKQKLRVKKIHENEKRLEAGDHPVELLARDFEKNYNMYIFPVHWQFGQLDQ

SEQ ID NO: 26140 - protein, 53 aa, Homo sapiens
  MOD_RES (28)..(28): Selenocysteine
  MOD_RES (34)..(34): Selenocysteine
  MOD_RES (39)..(39): Selenocysteine
MRAWIFFLLCLAGRALAAPQQEALPDEXEVVEEXVAEVXEVSVGANPVQVEVG

SEQ ID NO: 26141 - protein, 111 aa, Homo sapiens
  MOD_RES (28)..(28): Selenocysteine
  MOD_RES (34)..(34): Selenocysteine
  MOD_RES (39)..(39): Selenocysteine
  MOD_RES (62)..(62): Selenocysteine
  MOD_RES (90)..(90): Selenocysteine
  MOD_RES (99)..(99): Selenocysteine
MRAWIFFLLCLAGRALAAPQQEALPDEXEVVEEXVAEVXEVSVGANPVQVEVGEFDDGAEEXEEEVVAENPCQNHHCKHGKVCELDENNXPMCVCQDPXSCPAPIGEFEKV

SEQ ID NO: 26142 - protein, 303 aa, Homo sapiens
  MOD_RES (28)..(28): Selenocysteine
  MOD_RES (34)..(34): Selenocysteine
  MOD_RES (39)..(39): Selenocysteine
  MOD_RES (62)..(62): Selenocysteine
  MOD_RES (90)..(90): Selenocysteine
  MOD_RES (99)..(99): Selenocysteine
  MOD_RES (118)..(118): Selenocysteine
  MOD_RES (128)..(128): Selenocysteine
  MOD_RES (131)..(131): Selenocysteine
  MOD_RES (135)..(135): Selenocysteine
  MOD_RES (161)..(161): Selenocysteine
  MOD_RES (177)..(177): Selenocysteine
  MOD_RES (189)..(189): Selenocysteine
  MOD_RES (250)..(250): Selenocysteine
  MOD_RES (266)..(267): Selenocysteine
  MOD_RES (272)..(272): Selenocysteine
MRAWIFFLLCLAGRALAAPQQEALPDEXEVVEEXVAEVXEVSVGANPVQVEVGEFDDGAEEXEEEVVAENPCQNHHCKHGKVCELDENNXPMCVCQDPXSCPAPIGEFEKVCSNDNKXFDSSCHFFAXKCXLEGXKKGHKLHLDYIGPCKYIPPCLDSELXEFPLRMRDWLKNVLVXLYERDEDNNLLXEKQKLRVKKIHENEKRLEAGDHPVELLARDFEKNYNMYIFPVHWQFGQLDQHPIDGYLSHXELAPLRAPLIPMEHCXXRFFEXCDLDNDKYIALDEWAGCFGIKQKDIDKDLVI

SEQ ID NO: 26143 - protein, 56 aa, Homo sapiens
  MOD_RES (3)..(3): Selenocysteine
  MOD_RES (13)..(13): Selenocysteine
  MOD_RES (19)..(19): Selenocysteine
  MOD_RES (31)..(31): Selenocysteine
  MOD_RES (34)..(34): Selenocysteine
  MOD_RES (40)..(40): Selenocysteine
  MOD_RES (56)..(56): Selenocysteine
MKXGLFFLCLLGXAAAIPXNARLLSDHSKPXAEXVAPDNXAIPSLRAEAEENEKEX

SEQ ID NO: 26144 - protein, 89 aa, Homo sapiens
  MOD_RES (3)..(3): Selenocysteine
  MOD_RES (13)..(13): Selenocysteine
  MOD_RES (19)..(19): Selenocysteine
  MOD_RES (31)..(31): Selenocysteine
  MOD_RES (34)..(34): Selenocysteine
  MOD_RES (40)..(40): Selenocysteine
  MOD_RES (56)..(56): Selenocysteine
  MOD_RES (60)..(60): Selenocysteine
MKXGLFFLCLLGXAAAIPXNARLLSDHSKPXAEXVAPDNXAIPSLRAEAEENEKEXAVSXEDDSHHKAEKSSVLKSKEESHEQSAEQGK

SEQ ID NO: 26145 - protein, 120 aa, Homo sapiens
  MOD_RES (3)..(3): Selenocysteine
  MOD_RES (13)..(13): Selenocysteine
  MOD_RES (19)..(19): Selenocysteine
  MOD_RES (31)..(31): Selenocysteine
  MOD_RES (34)..(34): Selenocysteine
  MOD_RES (40)..(40): Selenocysteine
  MOD_RES (56)..(56): Selenocysteine
  MOD_RES (60)..(60): Selenocysteine
  MOD_RES (116)..(116): Selenocysteine
  MOD_RES (119)..(119): Selenocysteine
MKXGLFFLCLLGXAAAIPXNARLLSDHSKPXAEXVAPDNXAIPSLRAEAEENEKEXAVSXEDDSHHKAEKSSVLKSKEESHEQSAEQGKSSSQELGLKDQEDSDGHLSVNLEYAPXEGXL

SEQ ID NO: 26146 - protein, 127 aa, Homo sapiens
  MOD_RES (3)..(3): Selenocysteine
  MOD_RES (13)..(13): Selenocysteine
  MOD_RES (19)..(19): Selenocysteine
  MOD_RES (31)..(31): Selenocysteine
  MOD_RES (34)..(34): Selenocysteine
  MOD_RES (40)..(40): Selenocysteine
  MOD_RES (56)..(56): Selenocysteine
  MOD_RES (60)..(60): Selenocysteine
  MOD_RES (116)..(116): Selenocysteine
  MOD_RES (119)..(119): Selenocysteine
MKXGLFFLCLLGXAAAIPXNARLLSDHSKPXAEXVAPDNXAIPSLRAEAEENEKEXAVSXEDDSHHKAEKSSVLKSKEESHEQSAEQGKSSSQELGLKDQEDSDGHLSVNLEYAPXEGXLDIKEDMS

SEQ ID NO: 26147 - protein, 141 aa, Homo sapiens
  MOD_RES (3)..(3): Selenocysteine
  MOD_RES (13)..(13): Selenocysteine
  MOD_RES (19)..(19): Selenocysteine
  MOD_RES (31)..(31): Selenocysteine
  MOD_RES (34)..(34): Selenocysteine
  MOD_RES (40)..(40): Selenocysteine
  MOD_RES (56)..(56): Selenocysteine
  MOD_RES (60)..(60): Selenocysteine
  MOD_RES (116)..(116): Selenocysteine
  MOD_RES (119)..(119): Selenocysteine
  MOD_RES (138)..(138): Selenocysteine
MKXGLFFLCLLGXAAAIPXNARLLSDHSKPXAEXVAPDNXAIPSLRAEAEENEKEXAVSXEDDSHHKAEKSSVLKSKEESHEQSAEQGKSSSQELGLKDQEDSDGHLSVNLEYAPXEGXLDIKEDMSEPQEKKLSENXDFL

SEQ ID NO: 26148 - protein, 144 aa, Homo sapiens
  MOD_RES (3)..(3): Selenocysteine
  MOD_RES (13)..(13): Selenocysteine
  MOD_RES (19)..(19): Selenocysteine
  MOD_RES (31)..(31): Selenocysteine
  MOD_RES (34)..(34): Selenocysteine
  MOD_RES (40)..(40): Selenocysteine
  MOD_RES (56)..(56): Selenocysteine
  MOD_RES (60)..(60): Selenocysteine
  MOD_RES (116)..(116): Selenocysteine
  MOD_RES (119)..(119): Selenocysteine
  MOD_RES (138)..(138): Selenocysteine
MKXGLFFLCLLGXAAAIPXNARLLSDHSKPXAEXVAPDNXAIPSLRAEAEENEKEXAVSXEDDSHHKAEKSSVLKSKEESHEQSAEQGKSSSQELGLKDQEDSDGHLSVNLEYAPXEGXLDIKEDMSEPQEKKLSENXDFLAPG

SEQ ID NO: 26149 - protein, 664 aa, Homo sapiens
  MOD_RES (3)..(3): Selenocysteine
  MOD_RES (13)..(13): Selenocysteine
  MOD_RES (19)..(19): Selenocysteine
  MOD_RES (31)..(31): Selenocysteine
  MOD_RES (34)..(34): Selenocysteine
  MOD_RES (40)..(40): Selenocysteine
  MOD_RES (56)..(56): Selenocysteine
  MOD_RES (60)..(60): Selenocysteine
  MOD_RES (116)..(116): Selenocysteine
  MOD_RES (119)..(119): Selenocysteine
  MOD_RES (138)..(138): Selenocysteine
  MOD_RES (149)..(149): Selenocysteine
  MOD_RES (158)..(158): Selenocysteine
  MOD_RES (213)..(213): Selenocysteine
  MOD_RES (222)..(222): Selenocysteine
  MOD_RES (238)..(238): Selenocysteine
  MOD_RES (251)..(251): Selenocysteine
  MOD_RES (291)..(291): Selenocysteine
  MOD_RES (300)..(300): Selenocysteine
  MOD_RES (311)..(311): Selenocysteine
  MOD_RES (315)..(315): Selenocysteine
  MOD_RES (325)..(325): Selenocysteine
  MOD_RES (330)..(331): Selenocysteine
  MOD_RES (350)..(350): Selenocysteine
  MOD_RES (398)..(399): Selenocysteine
  MOD_RES (419)..(419): Selenocysteine
  MOD_RES (461)..(461): Selenocysteine
  MOD_RES (465)..(465): Selenocysteine
  MOD_RES (474)..(474): Selenocysteine
  MOD_RES (478)..(478): Selenocysteine
  MOD_RES (488)..(488): Selenocysteine
  MOD_RES (495)..(495): Selenocysteine
  MOD_RES (514)..(514): Selenocysteine
  MOD_RES (516)..(516): Selenocysteine
  MOD_RES (609)..(609): Selenocysteine
  MOD_RES (628)..(628): Selenocysteine
  MOD_RES (643)..(643): Selenocysteine
MKXGLFFLCLLGXAAAIPXNARLLSDHSKPXAEXVAPDNXAIPSLRAEAEENEKEXAVSXEDDSHHKAEKSSVLKSKEESHEQSAEQGKSSSQELGLKDQEDSDGHLSVNLEYAPXEGXLDIKEDMSEPQEKKLSENXDFLAPGVSSFXDSNQQESIXKREENQEQPRNYSHHQLNRSSKHSQGLRDQGNQEQDPNISNGEEEEEKEPGEVGXHNDNQERKXELPREHANSKQEEDNXQSDDILEESDQPXQVSKMQEDEFDQGNQEQEDNSNAEMEEENASNVNKHIQEXEWQSQEGKXGLEAISNHKEXEEKXVSEALLMEPXDDGNXXPRNHGVDDDGDDDGDDGGXDGPRHSASDDYFIPSQAFLEAERAQSIAYHLKIEEQREKVHENENIGXXEPGEHQEAKKAENSSNEEEXSSEGNMRVHAVDSCMSFQCKRGHICKADQQGKPHCVCQDPVXCPPXKPLDQVCGXDNQXYASSCHLFAXKCRLEGXKKGHQLQLDYFGACKSIPXCXDFEVIQFPLRMRDWLKNILMQLYEANSEHAGYLNEKQRNKVKKIYLDEKRLLAGDHPIDLLLRDFKKNYHMYVYPVHWQFSELDQHPMDRVLXHSELAPLRASLVPMEHCIXRFFEECDPNKDKHIXLKEWGHCFGIKEEDIDENLLF

SEQ ID NO: 26150 - protein, 19 aa, Homo sapiens
  MOD_RES (13)..(13): Selenocysteine
MSEPQEKKLSENXDFLAPG

SEQ ID NO: 26151 - protein, 539 aa, Homo sapiens
  MOD_RES (13)..(13): Selenocysteine
  MOD_RES (24)..(24): Selenocysteine
  MOD_RES (33)..(33): Selenocysteine
  MOD_RES (88)..(88): Selenocysteine
  MOD_RES (97)..(97): Selenocysteine
  MOD_RES (113)..(113): Selenocysteine
  MOD_RES (126)..(126): Selenocysteine
  MOD_RES (166)..(166): Selenocysteine
  MOD_RES (175)..(175): Selenocysteine
  MOD_RES (186)..(186): Selenocysteine
  MOD_RES (190)..(190): Selenocysteine
  MOD_RES (200)..(200): Selenocysteine
  MOD_RES (205)..(206): Selenocysteine
  MOD_RES (225)..(225): Selenocysteine
  MOD_RES (273)..(274): Selenocysteine
  MOD_RES (294)..(294): Selenocysteine
  MOD_RES (336)..(336): Selenocysteine
  MOD_RES (340)..(340): Selenocysteine
  MOD_RES (349)..(349): Selenocysteine
  MOD_RES (353)..(353): Selenocysteine
  MOD_RES (363)..(363): Selenocysteine
  MOD_RES (370)..(370): Selenocysteine
  MOD_RES (389)..(389): Selenocysteine
  MOD_RES (391)..(391): Selenocysteine
  MOD_RES (484)..(484): Selenocysteine
  MOD_RES (503)..(503): Selenocysteine
  MOD_RES (518)..(518): Selenocysteine
MSEPQEKKLSENXDFLAPGVSSFXDSNQQESIXKREENQEQPRNYSHHQLNRSSKHSQGLRDQGNQEQDPNISNGEEEEEKEPGEVGXHNDNQERKXELPREHANSKQEEDNXQSDDILEESDQPXQVSKMQEDEFDQGNQEQEDNSNAEMEEENASNVNKHIQEXEWQSQEGKXGLEAISNHKEXEEKXVSEALLMEPXDDGNXXPRNHGVDDDGDDDGDDGGXDGPRHSASDDYFIPSQAFLEAERAQSIAYHLKIEEQREKVHENENIGXXEPGEHQEAKKAENSSNEEEXSSEGNMRVHAVDSCMSFQCKRGHICKADQQGKPHCVCQDPVXCPPXKPLDQVCGXDNQXYASSCHLFAXKCRLEGXKKGHQLQLDYFGACKSIPXCXDFEVIQFPLRMRDWLKNILMQLYEANSEHAGYLNEKQRNKVKKIYLDEKRLLAGDHPIDLLLRDFKKNYHMYVYPVHWQFSELDQHPMDRVLXHSELAPLRASLVPMEHCIXRFFEECDPNKDKHIXLKEWGHCFGIKEEDIDENLLF

SEQ ID NO: 26152 - protein, 23 aa, Homo sapiens
MGFIIHIQQVKKQRKKLDQGLIL

SEQ ID NO: 26153 - protein, 146 aa, Homo sapiens
  MOD_RES (47)..(47): Selenocysteine
  MOD_RES (104)..(104): Selenocysteine
MGFIIHIQQVKKQRKKLDQGLILKKEKYRKEKKCASLSFEVSSDGGXEPSALVDDNGSEEDFSYEDLCQASPRYLQPGGEQLAINELISDGNVVCAEALWDHVXMDDQELGFKAGDVIQVLEASNKDWWWGRSEDKEAWFPASFVR

SEQ ID NO: 26154 - protein, 596 aa, Homo sapiens
  MOD_RES (47)..(47): Selenocysteine
  MOD_RES (104)..(104): Selenocysteine
  MOD_RES (161)..(161): Selenocysteine
  MOD_RES (186)..(186): Selenocysteine
  MOD_RES (195)..(195): Selenocysteine
  MOD_RES (218)..(218): Selenocysteine
  MOD_RES (222)..(222): Selenocysteine
  MOD_RES (228)..(228): Selenocysteine
  MOD_RES (322)..(322): Selenocysteine
  MOD_RES (341)..(342): Selenocysteine
  MOD_RES (407)..(407): Selenocysteine
  MOD_RES (410)..(410): Selenocysteine
  MOD_RES (419)..(419): Selenocysteine
  MOD_RES (478)..(479): Selenocysteine
  MOD_RES (561)..(561): Selenocysteine
  MOD_RES (564)..(564): Selenocysteine
  MOD_RES (587)..(587): Selenocysteine
  MOD_RES (592)..(592): Selenocysteine
MGFIIHIQQVKKQRKKLDQGLILKKEKYRKEKKCASLSFEVSSDGGXEPSALVDDNGSEEDFSYEDLCQASPRYLQPGGEQLAINELISDGNVVCAEALWDHVXMDDQELGFKAGDVIQVLEASNKDWWWGRSEDKEAWFPASFVRLRVNQEELSENSSSXPSEEQDEEASQSRHRHCENKQQMRXNVIREIMDXERVYIKHLRDICEGYIRQCRKHXGMFXVAQLAXIFGNIEDIYKFQRKFLKDLEKQYNKEEPHLSEIGSCFLQNQEGFAIYSEYCNNHPGACLELANLMKQGKYRHFFEACRLLQQMIDIAIDGFLLXPVQKICKYPLQLAELLKYXXQEHGDYSNIKAAYEAMKNVACLINERKRKLESIDKIARWQVSIVGWEGLDILDRSSELIHSGELXKIXKQGKSQQRXFFLFDHQLVSCKKDLLRRDMLYYKGRLDMDEMELVDLGDGRDKDCNLSVKNAFKLVSRXXDEVYLFCAKKQEDKARWLQACADERRRVQEDKEMGMEISENQKKLAMLNAQKAGHGKSKGYNRCPVAPPHQGLHPIHQRHIXMPXSVPQQQVFGLAEPKRKSSLFWHXFNRLXPFRK

SEQ ID NO: 26155 - protein, 1277 aa, Homo sapiens
  MOD_RES (2)..(2): Selenocysteine
  MOD_RES (17)..(18): Selenocysteine
  MOD_RES (43)..(43): Selenocysteine
  MOD_RES (60)..(60): Selenocysteine
  MOD_RES (62)..(62): Selenocysteine
  MOD_RES (78)..(78): Selenocysteine
  MOD_RES (83)..(83): Selenocysteine
  MOD_RES (101)..(101): Selenocysteine
  MOD_RES (104)..(104): Selenocysteine
  MOD_RES (180)..(180): Selenocysteine
  MOD_RES (189)..(189): Selenocysteine
  MOD_RES (197)..(197): Selenocysteine
  MOD_RES (223)..(223): Selenocysteine
  MOD_RES (225)..(225): Selenocysteine
  MOD_RES (228)..(228): Selenocysteine
  MOD_RES (255)..(255): Selenocysteine
  MOD_RES (271)..(271): Selenocysteine
  MOD_RES (279)..(279): Selenocysteine
  MOD_RES (289)..(289): Selenocysteine
  MOD_RES (295)..(295): Selenocysteine
  MOD_RES (305)..(305): Selenocysteine
  MOD_RES (328)..(328): Selenocysteine
  MOD_RES (369)..(369): Selenocysteine
  MOD_RES (383)..(384): Selenocysteine
  MOD_RES (386)..(386): Selenocysteine
  MOD_RES (388)..(388): Selenocysteine
  MOD_RES (397)..(397): Selenocysteine
  MOD_RES (407)..(407): Selenocysteine
  MOD_RES (414)..(414): Selenocysteine
  MOD_RES (427)..(427): Selenocysteine
  MOD_RES (454)..(454): Selenocysteine
  MOD_RES (462)..(462): Selenocysteine
  MOD_RES (467)..(468): Selenocysteine
  MOD_RES (525)..(525): Selenocysteine
  MOD_RES (569)..(569): Selenocysteine
  MOD_RES (574)..(574): Selenocysteine
  MOD_RES (627)..(627): Selenocysteine
  MOD_RES (661)..(661): Selenocysteine
  MOD_RES (664)..(664): Selenocysteine
  MOD_RES (672)..(672): Selenocysteine
  MOD_RES (699)..(699): Selenocysteine
  MOD_RES (704)..(704): Selenocysteine
  MOD_RES (728)..(728): Selenocysteine
  MOD_RES (785)..(785): Selenocysteine
  MOD_RES (842)..(842): Selenocysteine
  MOD_RES (867)..(867): Selenocysteine
  MOD_RES (876)..(876): Selenocysteine
  MOD_RES (899)..(899): Selenocysteine
  MOD_RES (903)..(903): Selenocysteine
  MOD_RES (909)..(909): Selenocysteine
  MOD_RES (1003)..(1003): Selenocysteine
  MOD_RES (1022)..(1023): Selenocysteine
  MOD_RES (1088)..(1088): Selenocysteine
  MOD_RES (1091)..(1091): Selenocysteine
  MOD_RES (1100)..(1100): Selenocysteine
  MOD_RES (1159)..(1160): Selenocysteine
  MOD_RES (1242)..(1242): Selenocysteine
  MOD_RES (1245)..(1245): Selenocysteine
  MOD_RES (1268)..(1268): Selenocysteine
  MOD_RES (1273)..(1273): Selenocysteine
MXQAAVRPWAPCLENMXXAPNGLGPGPAAPCAGSDLKDAKMVXSLACGNGVCGCSPGGDXDXQEAKLSPAKLVRLFSXSRKRXGAHPERPHSMVLVGNSSXWNXLASFRKMGSFKKLKSSVLKGIQSREGSNACSKGEASEHGLGKSIPNGAVPGAQASRGSPLAPGPACGALRPAEWGXLDGSDLEDXDDAFQRSXHRSRSLRRAYGLGRICLLDAPQNHAXPXIAXGQVPAVCEILVRDPENNSMGYRRSKSXDNLAFLKKSSFKRKSXSNLADLRXAHDARVPQRXLSSSSXDSQKLGSGRXKRWRSPIRAKDFDRVFKLVSNVXEAAWRRESPRSGAPSPGEASLRLQAHSRLHDDYSRRVSRSXEQDSRRGGAVMHGXXAXCXVAPGFGSAXSKGPHLDADXAVFPLEXKSSWAVESDSSCXCSSLPSPIVQDVLSKDSCDPNAGSQLXFDPEQPPXPLRPXXPKPQSPQSPQSPGAGSASCHSNHSALSANSEESEGRAEEPAQREPGPVSLQDPLEAXHGDEGSKDLLVNIGVAAGPEEKEKEEVVPDGPWRRSSSQDEERXEAQRXPKRRWGSGRRPRPRPFSDYGQLASRSLSIPEDSVAADPQKEDRVDEDPQASMXSASPEDQNAPVGCPKGARRRRPISVIGGVSLYGXNQXEELDNLLXQPASRPPMPAHQVPPYKAVSARFRPFXFSQSXPIGLDRVGRRRQMRASNVSSDGGXEPSALVDDNGSEEDFSYEDLCQASPRYLQPGGEQLAINELISDGNVVCAEALWDHVXMDDQELGFKAGDVIQVLEASNKDWWWGRSEDKEAWFPASFVRLRVNQEELSENSSSXPSEEQDEEASQSRHRHCENKQQMRXNVIREIMDXERVYIKHLRDICEGYIRQCRKHXGMFXVAQLAXIFGNIEDIYKFQRKFLKDLEKQYNKEEPHLSEIGSCFLQNQEGFAIYSEYCNNHPGACLELANLMKQGKYRHFFEACRLLQQMIDIAIDGFLLXPVQKICKYPLQLAELLKYXXQEHGDYSNIKAAYEAMKNVACLINERKRKLESIDKIARWQVSIVGWEGLDILDRSSELIHSGELXKIXKQGKSQQRXFFLFDHQLVSCKKDLLRRDMLYYKGRLDMDEMELVDLGDGRDKDCNLSVKNAFKLVSRXXDEVYLFCAKKQEDKARWLQACADERRRVQEDKEMGMEISENQKKLAMLNAQKAGHGKSKGYNRCPVAPPHQGLHPIHQRHIXMPXSVPQQQVFGLAEPKRKSSLFWHXFNRLXPFRK

SEQ ID NO: 26156 - protein, 652 aa, Homo sapiens
  MOD_RES (2)..(2): Selenocysteine
  MOD_RES (36)..(36): Selenocysteine
  MOD_RES (39)..(39): Selenocysteine
  MOD_RES (47)..(47): Selenocysteine
  MOD_RES (74)..(74): Selenocysteine
  MOD_RES (79)..(79): Selenocysteine
  MOD_RES (103)..(103): Selenocysteine
  MOD_RES (160)..(160): Selenocysteine
  MOD_RES (217)..(217): Selenocysteine
  MOD_RES (242)..(242): Selenocysteine
  MOD_RES (251)..(251): Selenocysteine
  MOD_RES (274)..(274): Selenocysteine
  MOD_RES (278)..(278): Selenocysteine
  MOD_RES (284)..(284): Selenocysteine
  MOD_RES (378)..(378): Selenocysteine
  MOD_RES (397)..(398): Selenocysteine
  MOD_RES (463)..(463): Selenocysteine
  MOD_RES (466)..(466): Selenocysteine
  MOD_RES (475)..(475): Selenocysteine
  MOD_RES (534)..(535): Selenocysteine
  MOD_RES (617)..(617): Selenocysteine
  MOD_RES (620)..(620): Selenocysteine
  MOD_RES (643)..(643): Selenocysteine
  MOD_RES (648)..(648): Selenocysteine
MXSASPEDQNAPVGCPKGARRRRPISVIGGVSLYGXNQXEELDNLLXQPASRPPMPAHQVPPYKAVSARFRPFXFSQSXPIGLDRVGRRRQMRASNVSSDGGXEPSALVDDNGSEEDFSYEDLCQASPRYLQPGGEQLAINELISDGNVVCAEALWDHVXMDDQELGFKAGDVIQVLEASNKDWWWGRSEDKEAWFPASFVRLRVNQEELSENSSSXPSEEQDEEASQSRHRHCENKQQMRXNVIREIMDXERVYIKHLRDICEGYIRQCRKHXGMFXVAQLAXIFGNIEDIYKFQRKFLKDLEKQYNKEEPHLSEIGSCFLQNQEGFAIYSEYCNNHPGACLELANLMKQGKYRHFFEACRLLQQMIDIAIDGFLLXPVQKICKYPLQLAELLKYXXQEHGDYSNIKAAYEAMKNVACLINERKRKLESIDKIARWQVSIVGWEGLDILDRSSELIHSGELXKIXKQGKSQQRXFFLFDHQLVSCKKDLLRRDMLYYKGRLDMDEMELVDLGDGRDKDCNLSVKNAFKLVSRXXDEVYLFCAKKQEDKARWLQACADERRRVQEDKEMGMEISENQKKLAMLNAQKAGHGKSKGYNRCPVAPPHQGLHPIHQRHIXMPXSVPQQQVFGLAEPKRKSSLFWHXFNRLXPFRK

SEQ ID NO: 26157 - protein, 512 aa, Homo sapiens
  MOD_RES (25)..(25): Selenocysteine
  MOD_RES (82)..(82): Selenocysteine
  MOD_RES (134)..(134): Selenocysteine
  MOD_RES (138)..(138): Selenocysteine
  MOD_RES (144)..(144): Selenocysteine
  MOD_RES (238)..(238): Selenocysteine
  MOD_RES (257)..(258): Selenocysteine
  MOD_RES (323)..(323): Selenocysteine
  MOD_RES (326)..(326): Selenocysteine
  MOD_RES (335)..(335): Selenocysteine
  MOD_RES (394)..(395): Selenocysteine
  MOD_RES (477)..(477): Selenocysteine
  MOD_RES (480)..(480): Selenocysteine
  MOD_RES (503)..(503): Selenocysteine
  MOD_RES (508)..(508): Selenocysteine
MVARGEIARFWSLESLHLVSSDGGXEPSALVDDNGSEEDFSYEDLCQASPRYLQPGGEQLAINELISDGNVVCAEALWDHVXMDDQELGFKAGDVIQVLEASNKDWWWGRSEDKEAWFPASFVRGYIRQCRKHXGMFXVAQLAXIFGNIEDIYKFQRKFLKDLEKQYNKEEPHLSEIGSCFLQNQEGFAIYSEYCNNHPGACLELANLMKQGKYRHFFEACRLLQQMIDIAIDGFLLXPVQKICKYPLQLAELLKYXXQEHGDYSNIKAAYEAMKNVACLINERKRKLESIDKIARWQVSIVGWEGLDILDRSSELIHSGELXKIXKQGKSQQRXFFLFDHQLVSCKKDLLRRDMLYYKGRLDMDEMELVDLGDGRDKDCNLSVKNAFKLVSRXXDEVYLFCAKKQEDKARWLQACADERRRVQEDKEMGMEISENQKKLAMLNAQKAGHGKSKGYNRCPVAPPHQGLHPIHQRHIXMPXSVPQQQVFGLAEPKRKSSLFWHXFNRLXPFRK

SEQ ID NO: 26158 - protein, 574 aa, Homo sapiens
  MOD_RES (25)..(25): Selenocysteine
  MOD_RES (82)..(82): Selenocysteine
  MOD_RES (139)..(139): Selenocysteine
  MOD_RES (164)..(164): Selenocysteine
  MOD_RES (173)..(173): Selenocysteine
  MOD_RES (196)..(196): Selenocysteine
  MOD_RES (200)..(200): Selenocysteine
  MOD_RES (206)..(206): Selenocysteine
  MOD_RES (300)..(300): Selenocysteine
  MOD_RES (319)..(320): Selenocysteine
  MOD_RES (385)..(385): Selenocysteine
  MOD_RES (388)..(388): Selenocysteine
  MOD_RES (397)..(397): Selenocysteine
  MOD_RES (456)..(457): Selenocysteine
  MOD_RES (539)..(539): Selenocysteine
  MOD_RES (542)..(542): Selenocysteine
  MOD_RES (565)..(565): Selenocysteine
  MOD_RES (570)..(570): Selenocysteine
MVARGEIARFWSLESLHLVSSDGGXEPSALVDDNGSEEDFSYEDLCQASPRYLQPGGEQLAINELISDGNVVCAEALWDHVXMDDQELGFKAGDVIQVLEASNKDWWWGRSEDKEAWFPASFVRLRVNQEELSENSSSXPSEEQDEEASQSRHRHCENKQQMRXNVIREIMDXERVYIKHLRDICEGYIRQCRKHXGMFXVAQLAXIFGNIEDIYKFQRKFLKDLEKQYNKEEPHLSEIGSCFLQNQEGFAIYSEYCNNHPGACLELANLMKQGKYRHFFEACRLLQQMIDIAIDGFLLXPVQKICKYPLQLAELLKYXXQEHGDYSNIKAAYEAMKNVACLINERKRKLESIDKIARWQVSIVGWEGLDILDRSSELIHSGELXKIXKQGKSQQRXFFLFDHQLVSCKKDLLRRDMLYYKGRLDMDEMELVDLGDGRDKDCNLSVKNAFKLVSRXXDEVYLFCAKKQEDKARWLQACADERRRVQEDKEMGMEISENQKKLAMLNAQKAGHGKSKGYNRCPVAPPHQGLHPIHQRHIXMPXSVPQQQVFGLAEPKRKSSLFWHXFNRLXPFRK

SEQ ID NO: 26159 - protein, 550 aa, Homo sapiens
  MOD_RES (1)..(1): Selenocysteine
  MOD_RES (34)..(34): Selenocysteine
  MOD_RES (39)..(39): Selenocysteine
  MOD_RES (63)..(63): Selenocysteine
  MOD_RES (120)..(120): Selenocysteine
  MOD_RES (172)..(172): Selenocysteine
  MOD_RES (176)..(176): Selenocysteine
  MOD_RES (182)..(182): Selenocysteine
  MOD_RES (276)..(276): Selenocysteine
  MOD_RES (295)..(296): Selenocysteine
  MOD_RES (361)..(361): Selenocysteine
  MOD_RES (364)..(364): Selenocysteine
  MOD_RES (373)..(373): Selenocysteine
  MOD_RES (432)..(433): Selenocysteine
  MOD_RES (515)..(515): Selenocysteine
  MOD_RES (518)..(518): Selenocysteine
  MOD_RES (541)..(541): Selenocysteine
  MOD_RES (546)..(546): Selenocysteine
XDFAFFLQPASRPPMPAHQVPPYKAVSARFRPFXFSQSXPIGLDRVGRRRQMRASNVSSDGGXEPSALVDDNGSEEDFSYEDLCQASPRYLQPGGEQLAINELISDGNVVCAEALWDHVXMDDQELGFKAGDVIQVLEASNKDWWWGRSEDKEAWFPASFVRGYIRQCRKHXGMFXVAQLAXIFGNIEDIYKFQRKFLKDLEKQYNKEEPHLSEIGSCFLQNQEGFAIYSEYCNNHPGACLELANLMKQGKYRHFFEACRLLQQMIDIAIDGFLLXPVQKICKYPLQLAELLKYXXQEHGDYSNIKAAYEAMKNVACLINERKRKLESIDKIARWQVSIVGWEGLDILDRSSELIHSGELXKIXKQGKSQQRXFFLFDHQLVSCKKDLLRRDMLYYKGRLDMDEMELVDLGDGRDKDCNLSVKNAFKLVSRXXDEVYLFCAKKQEDKARWLQACADERRRVQEDKEMGMEISENQKKLAMLNAQKAGHGKSKGYNRCPVAPPHQGLHPIHQRHIXMPXSVPQQQVFGLAEPKRKSSLFWHXFNRLXPFRK

SEQ ID NO: 26160 - protein, 169 aa, Homo sapiens
  MOD_RES (7)..(7): Selenocysteine
  MOD_RES (10)..(10): Selenocysteine
  MOD_RES (15)..(15): Selenocysteine
  MOD_RES (33)..(33): Selenocysteine
  MOD_RES (39)..(39): Selenocysteine
  MOD_RES (43)..(43): Selenocysteine
  MOD_RES (77)..(77): Selenocysteine
  MOD_RES (115)..(115): Selenocysteine
  MOD_RES (130)..(130): Selenocysteine
  MOD_RES (152)..(152): Selenocysteine
MARGGDXGCXGPSEXSASGAAAIALPGLEGPAXDAQCQXLPLXVLKSRSPSPRSLPPALSCPPPQPAMLEHLSSLPXQMDYKGQKLAEQMFQGIILFSAIVGFIYGYVAEQFGWXVYIVMAGFAFSCLLXLPPWPIYRRHPLKWLPVQESSXDDKKPGERKIKRHAKNN

SEQ ID NO: 26161 - protein, 80 aa, Homo sapiens
  MOD_RES (26)..(26): Selenocysteine
  MOD_RES (41)..(41): Selenocysteine
  MOD_RES (63)..(63): Selenocysteine
MFQGIILFSAIVGFIYGYVAEQFGWXVYIVMAGFAFSCLLXLPPWPIYRRHPLKWLPVQESSXDDKKPGERKIKRHAKNN

SEQ ID NO: 26162 - protein, 102 aa, Homo sapiens
  MOD_RES (10)..(10): Selenocysteine
  MOD_RES (48)..(48): Selenocysteine
  MOD_RES (63)..(63): Selenocysteine
  MOD_RES (85)..(85): Selenocysteine
MLEHLSSLPXQMDYKGQKLAEQMFQGIILFSAIVGFIYGYVAEQFGWXVYIVMAGFAFSCLLXLPPWPIYRRHPLKWLPVQESSXDDKKPGERKIKRHAKNN

SEQ ID NO: 26163 - protein, 166 aa, Homo sapiens
  MOD_RES (2)..(3): Selenocysteine
  MOD_RES (6)..(6): Selenocysteine
  MOD_RES (16)..(16): Selenocysteine
  MOD_RES (26)..(26): Selenocysteine
  MOD_RES (39)..(39): Selenocysteine
  MOD_RES (90)..(90): Selenocysteine
  MOD_RES (93)..(93): Selenocysteine
  MOD_RES (133)..(133): Selenocysteine
  MOD_RES (136)..(136): Selenocysteine
  MOD_RES (153)..(153): Selenocysteine
IXXLRXLGACPCPHHXSNLDPVLFRXSSFLASVLVLVAXPFSWKIDDKPVKIDKWDGSAVKNSLDDSAKKVLLEKYKYVENFGLIDGRLXICXISCFFAIVALIWDYMHPFPESKPVLALCVISYFVMMGILXIYXSYKEKSIFLVAHRKDPXGMDPDDIWQLSSS

SEQ ID NO: 26164 - protein, 257 aa, Homo sapiens
  MOD_RES (28)..(28): Selenocysteine
  MOD_RES (43)..(43): Selenocysteine
  MOD_RES (117)..(117): Selenocysteine
  MOD_RES (120)..(120): Selenocysteine
  MOD_RES (160)..(160): Selenocysteine
  MOD_RES (163)..(163): Selenocysteine
  MOD_RES (180)..(180): Selenocysteine
  MOD_RES (202)..(202): Selenocysteine
  MOD_RES (206)..(206): Selenocysteine
  MOD_RES (212)..(212): Selenocysteine
  MOD_RES (221)..(221): Selenocysteine
  MOD_RES (233)..(233): Selenocysteine
MAAAAVQGGRSGGSGGCSGAGGASNCGXGSGRSGLLDKRQALXILPRLDSSSWAQAVLPPQPPKYLGWQWKIDDKPVKIDKWDGSAVKNSLDDSAKKVLLEKYKYVENFGLIDGRLXICXISCFFAIVALIWDYMHPFPESKPVLALCVISYFVMMGILXIYXSYKEKSIFLVAHRKDPXGMDPDDIWQLSSSLKRFDDKYXLKLXFISGRXKQQREAEFXKSIAKFFDHSGXLVMDAYEPEISRLHDSLAIERKIK

SEQ ID NO: 26165 - protein, 157 aa, Homo sapiens
  MOD_RES (28)..(28): Selenocysteine
  MOD_RES (80)..(80): Selenocysteine
  MOD_RES (102)..(102): Selenocysteine
  MOD_RES (106)..(106): Selenocysteine
  MOD_RES (112)..(112): Selenocysteine
  MOD_RES (121)..(121): Selenocysteine
  MOD_RES (133)..(133): Selenocysteine
MAAAAVQGGRSGGSGGCSGAGGASNCGXGSGRSGLLDKWKIDDKPVKIDKWDGSAVKNSLDDSAKKEKSIFLVAHRKDPXGMDPDDIWQLSSSLKRFDDKYXLKLXFISGRXKQQREAEFXKSIAKFFDHSGXLVMDAYEPEISRLHDSLAIERKIK

SEQ ID NO: 26166 - protein, 227 aa, Homo sapiens
  MOD_RES (28)..(28): Selenocysteine
  MOD_RES (86)..(86): Selenocysteine
  MOD_RES (89)..(89): Selenocysteine
  MOD_RES (130)..(130): Selenocysteine
  MOD_RES (133)..(133): Selenocysteine
  MOD_RES (150)..(150): Selenocysteine
  MOD_RES (172)..(172): Selenocysteine
  MOD_RES (176)..(176): Selenocysteine
  MOD_RES (182)..(182): Selenocysteine
  MOD_RES (191)..(191): Selenocysteine
  MOD_RES (203)..(203): Selenocysteine
MAAAAVQGGRSGGSGGCSGAGGASNCGXGSGRSGLLDKWKIDDKPVKIDKWDGSAVKNSLDDSAKKVLLEKYKYVENFGLIDGRLXICXISCFFAIVALIWDYMHPFPESKPVLALCVISSYFVMMGILXIYXSYKEKSIFLVAHRKDPXGMDPDDIWQLSSSLKRFDDKYXLKLXFISGRXKQQREAEFXKSIAKFFDHSGXLVMDAYEPEISRLHDSLAIERKIK

SEQ ID NO: 26167 - protein, 226 aa, Homo sapiens
  MOD_RES (28)..(28): Selenocysteine
  MOD_RES (86)..(86): Selenocysteine
  MOD_RES (89)..(89): Selenocysteine
  MOD_RES (129)..(129): Selenocysteine
  MOD_RES (132)..(132): Selenocysteine
  MOD_RES (149)..(149): Selenocysteine
  MOD_RES (171)..(171): Selenocysteine
  MOD_RES (175)..(175): Selenocysteine
  MOD_RES (181)..(181): Selenocysteine
  MOD_RES (190)..(190): Selenocysteine
  MOD_RES (202)..(202): Selenocysteine
MAAAAVQGGRSGGSGGCSGAGGASNCGXGSGRSGLLDKWKIDDKPVKIDKWDGSAVKNSLDDSAKKVLLEKYKYVENFGLIDGRLXICXISCFFAIVALIWDYMHPFPESKPVLALCVISYFVMMGILXIYXSYKEKSIFLVAHRKDPXGMDPDDIWQLSSSLKRFDDKYXLKLXFISGRXKQQREAEFXKSIAKFFDHSGXLVMDAYEPEISRLHDSLAIERKIK

SEQ ID NO: 26168 - protein, 87 aa, Homo sapiens
  MOD_RES (10)..(10): Selenocysteine
  MOD_RES (32)..(32): Selenocysteine
  MOD_RES (36)..(36): Selenocysteine
  MOD_RES (42)..(42): Selenocysteine
  MOD_RES (51)..(51): Selenocysteine
  MOD_RES (63)..(63): Selenocysteine
MILPKRKDPXGMDPDDIWQLSSSLKRFDDKYXLKLXFISGRXKQQREAEFXKSIAKFFDHSGXLVMDAYEPEISRLHDSLAIERKIK

SEQ ID NO: 26169 - protein, 180 aa, Homo sapiens
  MOD_RES (3)..(3): Selenocysteine
  MOD_RES (23)..(23): Selenocysteine
  MOD_RES (29)..(30): Selenocysteine
  MOD_RES (55)..(55): Selenocysteine
  MOD_RES (67)..(67): Selenocysteine
  MOD_RES (71)..(71): Selenocysteine
  MOD_RES (95)..(95): Selenocysteine
  MOD_RES (125)..(125): Selenocysteine
  MOD_RES (143)..(143): Selenocysteine
  MOD_RES (145)..(145): Selenocysteine
  MOD_RES (161)..(161): Selenocysteine
  MOD_RES (173)..(173): Selenocysteine
  MOD_RES (177)..(177): Selenocysteine
MNXVLSRANSLFAFSLSVMAALXFGCFIXXAFKDRSVPVRLHVSRIMLKNVEDFXGPRERSDLGFIXFDIXADLENIFDWNVKQLFLYLSAEYSXKNNALNQVVLWDKIVLRGDNPKLLLKDMKXKYFFFDDGNGLKGNRNVXLXLSWNVVPNAGILPLVXGSGHVSVPFPDXYEIXKSY

SEQ ID NO: 26170 - protein, 335 aa, Homo sapiens
  MOD_RES (22)..(22): Selenocysteine
  MOD_RES (26)..(26): Selenocysteine
  MOD_RES (50)..(50): Selenocysteine
  MOD_RES (113)..(113): Selenocysteine
  MOD_RES (136)..(136): Selenocysteine
  MOD_RES (144)..(144): Selenocysteine
  MOD_RES (162)..(162): Selenocysteine
  MOD_RES (219)..(219): Selenocysteine
  MOD_RES (230)..(230): Selenocysteine
  MOD_RES (236)..(236): Selenocysteine
MGSASPGLSSVSPSHLLLPPDXVSRXGLEKAAAGAVGLERRDWSPSPPAXPEQGLSAFYLSYFDMLYPEDSSWAAKAPGASSREEPPEEPEQCPVIDSQAPAGSLDLVPGGLXLEEHSLEQVQSMVVGEVLKDIEXACKLLNIXADPMDWSPSNVQKWLLWXEHQYRLPPMGKAFQELAGKELCAMSEEQFRQRSPLGGDVLHAHLDIWKSAAWMKERXSPGAIHYCASXSEESWXDSEVDSSCSGQPIHLWQFLKELLLKPHSYGRFIRWLNKEKGIFKIEDSAQVARLWGIRKNRPAMNYDKLSRSIRQYYKKGIIRKPDISQRLVYQFVHPI

SEQ ID NO: 26171 - protein, 319 aa, Homo sapiens
  MOD_RES (22)..(22): Selenocysteine
  MOD_RES (26)..(26): Selenocysteine
  MOD_RES (50)..(50): Selenocysteine
  MOD_RES (113)..(113): Selenocysteine
  MOD_RES (136)..(136): Selenocysteine
  MOD_RES (144)..(144): Selenocysteine
  MOD_RES (162)..(162): Selenocysteine
  MOD_RES (214)..(214): Selenocysteine
  MOD_RES (220)..(220): Selenocysteine
MGSASPGLSSVSPSHLLLPPDXVSRXGLEKAAAGAVGLERRDWSPSPPAXPEQGLSAFYLSYFDMLYPEDSSWAAKAPGASSREEPPEEPEQCPVIDSQAPAGSLDLVPGGLXLEEHSLEQVQSMVVGEVLKDIEXACKLLNIXADPMDWSPSNVQKWLLWXEHQYRLPPMGKAFQELAGKELCAMSEEQFRQRSPLGGDVLHAHLDIWKSASXSEESWXDSEVDSSCSGQPIHLWQFLKELLLKPHSYGRFIRWLNKEKGIFKIEDSAQVARLWGIRKNRPAMNYDKLSRSIRQYYKKGIIRKPDISQRLVYQFVHPI

SEQ ID NO: 26172 - protein, 373 aa, Homo sapiens
  MOD_RES (27)..(28): Selenocysteine
  MOD_RES (53)..(53): Selenocysteine
  MOD_RES (91)..(91): Selenocysteine
  MOD_RES (115)..(115): Selenocysteine
  MOD_RES (121)..(121): Selenocysteine
  MOD_RES (136)..(136): Selenocysteine
  MOD_RES (169)..(169): Selenocysteine
  MOD_RES (184)..(184): Selenocysteine
  MOD_RES (225)..(225): Selenocysteine
  MOD_RES (249)..(249): Selenocysteine
  MOD_RES (278)..(278): Selenocysteine
  MOD_RES (306)..(306): Selenocysteine
  MOD_RES (308)..(308): Selenocysteine
  MOD_RES (325)..(325): Selenocysteine
  MOD_RES (332)..(332): Selenocysteine
  MOD_RES (353)..(353): Selenocysteine
  MOD_RES (368)..(368): Selenocysteine
MNVDKFLIVCYLKKEVWGFESYSLSGXXCFQWNYFVWSLRFFFSCGSSKYHLXPLPIKKVDYPHKRGQNWGSYVHNSLPRFNWDYRSCFHXWKRASDNRERAYEHSAYGHHERGXGGFDRXRHYDQDYYRDPRERXLQHGLYYASRSRSPNRFDAHDPRYEPRAREQFXLPSVVHRDIYRDDIXREVRGRRPERNYQHSRSRSPHSSQSRNQSPQRLASQASRPXRSPSGSGSRSRSSSSDSISSSSSXSSDSSDSSSSSSDDSPARSVQSAAVPAPXSQLLSSLEKDEPRKSFGIKVQNLPVRSXDXSLKDGLFHEFKKFGKVXSVQIHGXSEERYGLVFFRQQEDQEKALXASKGKLFFGMQIEVXAWIGP

SEQ ID NO: 26173 - protein, 3664 aa, Homo sapiens
  MOD_RES (5)..(5): Selenocysteine
  MOD_RES (76)..(76): Selenocysteine
  MOD_RES (83)..(83): Selenocysteine
  MOD_RES (94)..(94): Selenocysteine
  MOD_RES (156)..(156): Selenocysteine
  MOD_RES (162)..(162): Selenocysteine
  MOD_RES (177)..(177): Selenocysteine
  MOD_RES (210)..(210): Selenocysteine
  MOD_RES (225)..(225): Selenocysteine
  MOD_RES (266)..(266): Selenocysteine
  MOD_RES (290)..(290): Selenocysteine
  MOD_RES (319)..(319): Selenocysteine
  MOD_RES (347)..(347): Selenocysteine
  MOD_RES (349)..(349): Selenocysteine
  MOD_RES (366)..(366): Selenocysteine
  MOD_RES (373)..(373): Selenocysteine
  MOD_RES (394)..(394): Selenocysteine
  MOD_RES (409)..(409): Selenocysteine
  MOD_RES (416)..(416): Selenocysteine
  MOD_RES (437)..(437): Selenocysteine
  MOD_RES (439)..(439): Selenocysteine
  MOD_RES (448)..(450): Selenocysteine
  MOD_RES (516)..(516): Selenocysteine
  MOD_RES (534)..(534): Selenocysteine
  MOD_RES (572)..(572): Selenocysteine
  MOD_RES (631)..(631): Selenocysteine
  MOD_RES (638)..(638): Selenocysteine
  MOD_RES (641)..(641): Selenocysteine
  MOD_RES (663)..(663): Selenocysteine
  MOD_RES (786)..(786): Selenocysteine
  MOD_RES (791)..(791): Selenocysteine
  MOD_RES (796)..(796): Selenocysteine
  MOD_RES (819)..(819): Selenocysteine
  MOD_RES (838)..(838): Selenocysteine
  MOD_RES (881)..(881): Selenocysteine
  MOD_RES (894)..(894): Selenocysteine
  MOD_RES (907)..(907): Selenocysteine
  MOD_RES (922)..(922): Selenocysteine
  MOD_RES (1059)..(1059): Selenocysteine
  MOD_RES (1140)..(1140): Selenocysteine
  MOD_RES (1155)..(1155): Selenocysteine
  MOD_RES (1166)..(1166): Selenocysteine
  MOD_RES (1219)..(1219): Selenocysteine
  MOD_RES (1239)..(1239): Selenocysteine
  MOD_RES (1258)..(1258): Selenocysteine
  MOD_RES (1301)..(1301): Selenocysteine
  MOD_RES (1439)..(1439): Selenocysteine
  MOD_RES (1441)..(1441): Selenocysteine
  MOD_RES (1444)..(1444): Selenocysteine
  MOD_RES (1502)..(1502): Selenocysteine
  MOD_RES (1565)..(1565): Selenocysteine
  MOD_RES (1572)..(1573): Selenocysteine
  MOD_RES (1591)..(1591): Selenocysteine
  MOD_RES (1613)..(1613): Selenocysteine
  MOD_RES (1619)..(1619): Selenocysteine
  MOD_RES (1633)..(1633): Selenocysteine
  MOD_RES (1643)..(1643): Selenocysteine
  MOD_RES (1646)..(1646): Selenocysteine
  MOD_RES (1657)..(1658): Selenocysteine
  MOD_RES (1662)..(1662): Selenocysteine
  MOD_RES (1669)..(1669): Selenocysteine
  MOD_RES (1673)..(1673): Selenocysteine
  MOD_RES (1678)..(1678): Selenocysteine
  MOD_RES (1737)..(1737): Selenocysteine
  MOD_RES (1756)..(1756): Selenocysteine
  MOD_RES (1780)..(1780): Selenocysteine
  MOD_RES (1826)..(1826): Selenocysteine
  MOD_RES (1841)..(1841): Selenocysteine
  MOD_RES (1876)..(1876): Selenocysteine
  MOD_RES (1878)..(1878): Selenocysteine
  MOD_RES (1899)..(1899): Selenocysteine
  MOD_RES (1910)..(1910): Selenocysteine
  MOD_RES (1930)..(1930): Selenocysteine
  MOD_RES (1946)..(1947): Selenocysteine
  MOD_RES (1956)..(1956): Selenocysteine
  MOD_RES (1974)..(1974): Selenocysteine
  MOD_RES (1989)..(1989): Selenocysteine
  MOD_RES (2009)..(2009): Selenocysteine
  MOD_RES (2014)..(2015): Selenocysteine
  MOD_RES (2050)..(2050): Selenocysteine
  MOD_RES (2057)..(2057): Selenocysteine
  MOD_RES (2163)..(2163): Selenocysteine
  MOD_RES (2213)..(2213): Selenocysteine
  MOD_RES (2245)..(2245): Selenocysteine
  MOD_RES (2265)..(2265): Selenocysteine
  MOD_RES (2275)..(2275): Selenocysteine
  MOD_RES (2279)..(2279): Selenocysteine
  MOD_RES (2296)..(2296): Selenocysteine
  MOD_RES (2298)..(2298): Selenocysteine
  MOD_RES (2308)..(2308): Selenocysteine
  MOD_RES (2324)..(2324): Selenocysteine
  MOD_RES (2335)..(2336): Selenocysteine
  MOD_RES (2344)..(2344): Selenocysteine
  MOD_RES (2373)..(2374): Selenocysteine
  MOD_RES (2393)..(2393): Selenocysteine
  MOD_RES (2399)..(2399): Selenocysteine
  MOD_RES (2408)..(2408): Selenocysteine
  MOD_RES (2421)..(2421): Selenocysteine
  MOD_RES (2423)..(2423): Selenocysteine
  MOD_RES (2460)..(2460): Selenocysteine
  MOD_RES (2471)..(2471): Selenocysteine
  MOD_RES (2476)..(2476): Selenocysteine
  MOD_RES (2496)..(2496): Selenocysteine
  MOD_RES (2499)..(2499): Selenocysteine
  MOD_RES (2503)..(2503): Selenocysteine
  MOD_RES (2513)..(2513): Selenocysteine
  MOD_RES (2522)..(2522): Selenocysteine
  MOD_RES (2529)..(2529): Selenocysteine
  MOD_RES (2533)..(2533): Selenocysteine
  MOD_RES (2547)..(2547): Selenocysteine
  MOD_RES (2550)..(2550): Selenocysteine
  MOD_RES (2552)..(2552): Selenocysteine
  MOD_RES (2555)..(2556): Selenocysteine
  MOD_RES (2586)..(2586): Selenocysteine
  MOD_RES (2591)..(2591): Selenocysteine
  MOD_RES (2619)..(2619): Selenocysteine
  MOD_RES (2638)..(2638): Selenocysteine
  MOD_RES (2646)..(2646): Selenocysteine
  MOD_RES (2648)..(2648): Selenocysteine
  MOD_RES (2655)..(2655): Selenocysteine
  MOD_RES (2677)..(2678): Selenocysteine
  MOD_RES (2685)..(2685): Selenocysteine
  MOD_RES (2701)..(2701): Selenocysteine
  MOD_RES (2708)..(2709): Selenocysteine
  MOD_RES (2714)..(2714): Selenocysteine
  MOD_RES (2717)..(2717): Selenocysteine
  MOD_RES (2724)..(2724): Selenocysteine
  MOD_RES (2735)..(2735): Selenocysteine
  MOD_RES (2740)..(2740): Selenocysteine
  MOD_RES (2742)..(2742): Selenocysteine
  MOD_RES (2747)..(2747): Selenocysteine
  MOD_RES (2754)..(2754): Selenocysteine
  MOD_RES (2756)..(2757): Selenocysteine
  MOD_RES (2759)..(2759): Selenocysteine
  MOD_RES (2761)..(2761): Selenocysteine
  MOD_RES (2771)..(2771): Selenocysteine
  MOD_RES (2810)..(2810): Selenocysteine
  MOD_RES (2824)..(2824): Selenocysteine
  MOD_RES (2862)..(2862): Selenocysteine
  MOD_RES (2882)..(2882): Selenocysteine
  MOD_RES (2885)..(2885): Selenocysteine
  MOD_RES (2889)..(2889): Selenocysteine
  MOD_RES (2892)..(2892): Selenocysteine
  MOD_RES (2921)..(2921): Selenocysteine
  MOD_RES (2924)..(2924): Selenocysteine
  MOD_RES (2928)..(2928): Selenocysteine
  MOD_RES (2933)..(2933): Selenocysteine
  MOD_RES (2938)..(2938): Selenocysteine
  MOD_RES (2950)..(2950): Selenocysteine
  MOD_RES (2955)..(2956): Selenocysteine
  MOD_RES (2965)..(2965): Selenocysteine
  MOD_RES (2970)..(2970): Selenocysteine
  MOD_RES (2981)..(2981): Selenocysteine
  MOD_RES (2983)..(2983): Selenocysteine
  MOD_RES (2996)..(2996): Selenocysteine
  MOD_RES (3012)..(3012): Selenocysteine
  MOD_RES (3045)..(3045): Selenocysteine
  MOD_RES (3048)..(3048): Selenocysteine
  MOD_RES (3052)..(3052): Selenocysteine
  MOD_RES (3055)..(3055): Selenocysteine
  MOD_RES (3085)..(3085): Selenocysteine
  MOD_RES (3087)..(3087): Selenocysteine
  MOD_RES (3102)..(3102): Selenocysteine
  MOD_RES (3104)..(3104): Selenocysteine
  MOD_RES (3109)..(3109): Selenocysteine
  MOD_RES (3139)..(3139): Selenocysteine
  MOD_RES (3170)..(3170): Selenocysteine
  MOD_RES (3190)..(3190): Selenocysteine
  MOD_RES (3204)..(3204): Selenocysteine
  MOD_RES (3236)..(3236): Selenocysteine
  MOD_RES (3244)..(3244): Selenocysteine
  MOD_RES (3246)..(3246): Selenocysteine
  MOD_RES (3271)..(3271): Selenocysteine
  MOD_RES (3273)..(3273): Selenocysteine
  MOD_RES (3284)..(3284): Selenocysteine
  MOD_RES (3290)..(3290): Selenocysteine
  MOD_RES (3313)..(3313): Selenocysteine
  MOD_RES (3321)..(3321): Selenocysteine
  MOD_RES (3323)..(3323): Selenocysteine
  MOD_RES (3337)..(3337): Selenocysteine
  MOD_RES (3339)..(3339): Selenocysteine
  MOD_RES (3360)..(3360): Selenocysteine
  MOD_RES (3395)..(3395): Selenocysteine
  MOD_RES (3397)..(3397): Selenocysteine
  MOD_RES (3417)..(3417): Selenocysteine
  MOD_RES (3426)..(3426): Selenocysteine
  MOD_RES (3429)..(3429): Selenocysteine
  MOD_RES (3449)..(3449): Selenocysteine
  MOD_RES (3451)..(3451): Selenocysteine
  MOD_RES (3461)..(3462): Selenocysteine
  MOD_RES (3467)..(3467): Selenocysteine
  MOD_RES (3476)..(3476): Selenocysteine
  MOD_RES (3491)..(3491): Selenocysteine
  MOD_RES (3519)..(3519): Selenocysteine
  MOD_RES (3558)..(3558): Selenocysteine
  MOD_RES (3568)..(3568): Selenocysteine
  MOD_RES (3571)..(3571): Selenocysteine
  MOD_RES (3592)..(3592): Selenocysteine
  MOD_RES (3601)..(3601): Selenocysteine
MVREXRHLWVGNLPENVREEKIIEHFKRYGRVESVKILPKRGSEGGVAAFVDFVDIKSAQKAHNSVNKMGDRDLRXDYNEPGXIPSAARGLDDXVSIASRSREVSGFRGGGGGPAYGPPPSLHAREGRYERRLDGASDNRERAYEHSAYGHHERGXGGFDRXRHYDQDYYRDPRERXLQHGLYYASRSRSPNRFDAHDPRYEPRAREQFXLPSVVHRDIYRDDIXREVRGRRPERNYQHSRSRSPHSSQSRNQSPQRLASQASRPXRSPSGSGSRSRSSSSDSISSSSSXSSDSSDSSSSSSDDSPARSVQSAAVPAPXSQLLSSLEKDEPRKSFGIKVQNLPVRSXDXSLKDGLFHEFKKFGKVXSVQIHGXSEERYGLVFFRQQEDQEKALXASKGKLFFGMQIEVXAWIGPEXESENEFRPLDERIDEFHPKAXRXLFIGNLEKXXXYHDLRNIFQRFGEIVDIDIKKVNGVPQYAFLQYCDIASVCKAIKKMDGEYLGNNRLKLGFGKSMPXNCVWLDGLSSNVSDQYLXRHFCRYGPVVKVVFDRLKGMALVLYNEIEYAQAAVKEXKGRKIGGNKIKVDFANRESQLAFYHCMEKSGQDIRDFYEMLAERREERRASYDYNQDRXYYESVRXPGXYPEDSRRDYPARGREFYSEWEXYQGDYYESRYYDDPREYRDYRNDPYEQDIREYSYRQRERERERERFESDRDRDHERRPIERSQSPVHLRRPQSPGASPSQAERLPSDSERRLYSRSSDRSGSCSSLSPPRYEKLDKSRLERYXKNEKXDKERXFDPERVERERRLIRKEKVEKDKXDKQKRKGKVHSPSSQSSEXDQENEREQSPEKPRSCNKLSREKADKEGIAKNRLELMPCVVLXRVKEKEGKVIDHXPVEKLKAKLDNDXVKSSALDQKLQVSQXEPAKSDLSKLESVRMKVPKEKGLSSHVEVVEKEGRLKARKHLKPEQPADGVSAVDLEKLEARKRRFADSNLKAEKQKPEVKKSSPEMEDARVLSKKQPDVSSREVILLREGEAERKPVRKEILKRESKKIKLDRLNXVASPKDCQELASISVGSGSRPSSDLQARLGELAGESVENQEVQSKKPIPSKPQLKQLQVLDDQGPEREDVRKNYCSLRDEXPERKSGQEKSHSVNXEEKIGIDIDHXQSYRKQMEQSRRKQQMEMEIAKSEKFGSPKKDVDEYERRSLVHEVGKPPQDVXDDSPPSKKKRMDHVDFDICXKRERNYRSSRQISEDSERXGGSPSVRHGSFHEDEDPIGSPRLLSVKGSPKVDEKVLPYSNIXVREESLKFNPYDSSRREQMADMAKIKLSVLNSEDELNRWDSQMKQDAGRFDVSFPNSIIKRDSLRKRSVRDLEPGEVPSDSDEDGEHKSHSPRASALYESSRLSFLLRDREDKLRERDERLSSSLERNKFYSFALDKXIXPDXKALLERAKSLSSSREENWSFLDWDSRFANFRNNKDKEKVDSAPRPIPSWYMKKKKIRXDSEGKMDDKKEDHKEEEQERQELFASRFLHSSIFEQDSKRLQHLERKEEDSDFISGRIYGKQXSEGANSXXDSIQEPVVLFHSRFMELXRMQQKEKEKDQKPKEVEKQEDXENHPKXPESAPENKDSELKXPPSVGPPSVXVVXLESAPSALEKXXGDKXVEAPLVXEEKXVEPAXVSEEAKPASEPAPAPVEQLEQVDLPPGADPDKEAAMMPAGVEEGSSGDQPPYLDAKPPXPGASFSQAESNVDPEPDSXQPLSKPAQKSEEANEPKAEKPDAXADAEPDANQKAEAAPESQPPASEDLEVDPPVAAKDKKPNKSKRSKXPVQAAAVSIVEKPVXRKSERIDREKLKRSNSPRGEAQKLLELKMEAEKIXRXASKNSAADLEHPEPSLPLSRXRRRNVRSVYAXMGDHENRSPVKEPVEQPRVXRKRLERELQEAAAVPXXPRRGRPPKXRRRADEEEENEAKEPAEXLKPPEGWRSPRSQKXAAGGGPQGKKGKNEPKVDAXRPEAXXEVGPQIGVKESSMEPKAAEEEAGSEQKRDRKDAGXDKNPPEXAPVEVVEKKPAPEKNSKSKRGRSRNSRLAVDKSASLKNVDAAVSPRGAAAQAGERESGVVAVSPEKSESPQKEDGLSSQLKSDPVDPDKEPEKEDVSASGPSPEAXQLAKQMELEQAVEHIAKLAEASASAAYKADAPEGLAPEDRDKPAHQASEXELAAAIGSIINDISGEPENFPAPPPYPGESQXDLQPPAGAQALQPSEEGMEXDEAVSGILEXEAAXESSRPPVNAPDPSAGPXDXKEARGNSSEXSHSVPEAKGSKEVEVXLVRKDKGRQKXXRSRRKRNXNKKVVAPVESHVPESNQAQGESPAANEGXXVQHPEAPQEEKQSEKPHSXPPQSCXSDLSKIPSXENSSQEISVEERXPXKASVPPDLPPPPQPAPVDEEPQARFRVHSIIESDPVXPPSDPSIPIPXLPSVXAAKLSPPVASGGIPHQSPPXKVXEWIXRQEEPRAQSXPSPALPPDXKASDVDXSSSXLRKILMDPKYVSAXSVXSXSVXXAIAEPVSAAPCLHEAPPPPVDSKKPLEEKXAPPVXNNSEIQASEVLVAADKEKVAPVIAPKIXSVISRMPVSIDLENSQKIXLAKPAPQXLXGLVSALXGLVNVSLVPVNALKGPVKGSVXXLKSLVSXPAGPVNVLKGPVNVLXGPVNVLXXPVNAXVGXVNAAPGXVNAAASAVNAXASAVXVXAGAVXAASGGVXAXXGXVXMAGAVIAPSXKCKQRASANENSRFHPGSMPVIDDRPADAGSGAGLRVNXSEGVVLLSYSGQKXEGPQRISAKISQIPPASAMDIEFQQSVSKSQVKPDSVXASQPPSKGPQAPAGYANVAXHSXLVLXAQXYNASPVISSVKADRPSLEKPEPIHLSVSXPVXQGGXVKVLXQGINXPPVLVHNQLVLXPSIVXXNKKLADPVXLKIEXKVLQPANLGSXLXPHHPPALPSKLPXEVNHVPSGPSIPADRXVSHLAAAKLDAHSPRPSGPGPSSFPRASHPSSXASXALSXNAXVMLAAGIPVPQFISSIHPEQSVIMPPHSIXQXVSLSHLSQGEVRMNXPXLPSIXYSIRPEALHSPRAPLQPQQIEVRAPQRASXPQPAPAGVPALASQHPPEEEVHYHLPVARAXAPVQSEVLVMQSEYRLHPYXVPRDVRIMVHPHVXAVSEQPRAADGVVKVPPASKAPQQPGKEAAKXPDAKAAPXPXPAPVPVPVPLPAPAPAPHGEARILXVXPSNQLQGLPLXPPVVVXHGVQIVHSSGELFQEYRYGDIRXYHPPAQLXHXQFPAASSVGLPSRXKXAAQGPPPEGEPLQPPQPVQSXQPAQPAPPCPPSQLGQPGQPPSSKMPQVSQEAKGXQXGVEQPRLPAGPANRPPEPHXQVQRAQAEXGPXSFPSPVSVSMKPDLPVSLPXQXAPKQPLFVPXXSGPSXPPGLVLPHXEFQPAPKQDSSPHLXSQRPVDMVQLLKKYPIVWQGLLALKNDXAAVQLHFVSGNNVLAHRSLPLSEGGPPLRIAQRMRLEAXQLEGVARRMXVEXDYCLLLALPCGRDQEDVVSQXESLKAAFIXYLQAKQAAGIINVPNPGSNQPAYVLQIFPPCEFSESHLSRLAPDLLASISNISPHLMIVIASV

SEQ ID NO: 26174 - protein, 297 aa, Homo sapiens
  MOD_RES (1)..(1): Any amino acid
  MOD_RES (7)..(7): Selenocysteine
  MOD_RES (31)..(31): Selenocysteine
  MOD_RES (59)..(59): Selenocysteine
  MOD_RES (87)..(87): Selenocysteine
  MOD_RES (89)..(89): Selenocysteine
  MOD_RES (106)..(106): Selenocysteine
  MOD_RES (113)..(113): Selenocysteine
  MOD_RES (134)..(134): Selenocysteine
  MOD_RES (149)..(149): Selenocysteine
  MOD_RES (156)..(156): Selenocysteine
  MOD_RES (177)..(177): Selenocysteine
  MOD_RES (179)..(179): Selenocysteine
  MOD_RES (188)..(190): Selenocysteine
  MOD_RES (256)..(256): Selenocysteine
  MOD_RES (274)..(274): Selenocysteine
XQASRPXRSPSGSGSRSRSSSSDSISSSSSXSSDSDSSSSSSDDSPARSVQSAAVPAPXSQLLSSLEKDEPRKSFGIKVQNLPVRSXDXSLKDGLFHEFKKFGKVXSVQIHGXSEERYGLVFFRQQEDQEKALXASKGKLFFGMQIEVXAWIGPEXESENEFRPLDERIDEFHPKAXRXLFIGNLEKXXXYHDLRNIFQRFGEIVDIDIKKVNGVPQYAFLQYCDIASVCKAIKKMDGEYLGNNRLKLGFGKSMPXNCVWLDGLSSNVSDQYLXRHFCRYGPVVKVVFDRLKGMALV

SEQ ID NO: 26175 - protein, 666 aa, Homo sapiens
  MOD_RES (33)..(33): Selenocysteine
  MOD_RES (67)..(67): Selenocysteine
  MOD_RES (84)..(84): Selenocysteine
  MOD_RES (90)..(90): Selenocysteine
  MOD_RES (101)..(101): Selenocysteine
  MOD_RES (145)..(145): Selenocysteine
  MOD_RES (147)..(147): Selenocysteine
  MOD_RES (175)..(175): Selenocysteine
  MOD_RES (184)..(184): Selenocysteine
  MOD_RES (189)..(189): Selenocysteine
  MOD_RES (213)..(213): Selenocysteine
  MOD_RES (260)..(260): Selenocysteine
  MOD_RES (289)..(289): Selenocysteine
  MOD_RES (298)..(298): Selenocysteine
  MOD_RES (354)..(354): Selenocysteine
  MOD_RES (367)..(367): Selenocysteine
  MOD_RES (392)..(392): Selenocysteine
  MOD_RES (445)..(445): Selenocysteine
  MOD_RES (474)..(474): Selenocysteine
  MOD_RES (484)..(484): Selenocysteine
  MOD_RES (500)..(500): Selenocysteine
  MOD_RES (551)..(551): Selenocysteine
  MOD_RES (571)..(571): Selenocysteine
  MOD_RES (574)..(574): Selenocysteine
  MOD_RES (587)..(587): Selenocysteine
  MOD_RES (600)..(600): Selenocysteine
  MOD_RES (616)..(616): Selenocysteine
  MOD_RES (618)..(618): Selenocysteine
  MOD_RES (620)..(620): Selenocysteine
  MOD_RES (623)..(623): Selenocysteine
  MOD_RES (655)..(655): Selenocysteine
MEQEPQNGEPAEIKIIREAYKKAFLFVNKGLNXDELGQKEEAKNYYKQGIGHLLRGISISSKESEHXGPGWESARQMQQKMKEXLQNVRXRLEILEKGLAXSLQNDLQEVPKLYPEFPPKDMCEKLPEPQSFSSAPQHAEVNGNXSXPSAGAVAAPASLSLPSQSCPAEAPPAYXPQAAEGHYXVSYGXDSGEFSSVGEEFYRNHSQPPPLEXLGLDADELILIPNGVQIFFVNPAGEVSAPSYPGYLRIVRFLDNSLDXVLNRPPGFLQVCDWLYPLVPDRSPVLKCXAGAYMFPDXMLQAAGCFVGVVLSSELPEDDRELFEDLLRQMSDLRLQANWNRAEEENEFQIPGRXRPSSDQLKEASGXDVKQLDQGNKDVRHKGKRGKRAKDXSSEEVNLSHIVPCEPVPEEKPKELPEWSEKVAHNILSGASWVSWGLVKGAEIXGKAIQKGASKLRERIQPEEKPVEVSPAVXKGLYIAKQAXGGAAKVSQFLVDGVCXVANCVGKELAPHVKKHGSKLVPESLKKDKDGKSPLDGAMVVAASSVQGFSXVWQGLECAAKCIVNNVSAEXVQXVRYKYGYNAGEAXHHAVDSAVNVGVXAYNINNIGIKAMVKKXAXQXGHXLLEDYQIVDNSQRENQEGAANVNVRGEKDEQXKEVKEAKKKDK

SEQ ID NO: 26176 - protein, 40 aa, Homo sapiens
  MOD_RES (16)..(16): Selenocysteine
MGEIKVSPDYNWFRGXVPLKKIIVDDDDSKIWSLYDAGPR

SEQ ID NO: 26177 - protein, 53 aa, Homo sapiens
  MOD_RES (16)..(16): Selenocysteine
MGEIKVSPDYNWFRGXVPLKKIIVDDDDSKIWSLYDAGPRSIRCPLIFLPPVS

SEQ ID NO: 26178 - protein, 72 aa, Homo sapiens
  MOD_RES (16)..(16): Selenocysteine
  MOD_RES (55)..(55): Selenocysteine
  MOD_RES (67)..(67): Selenocysteine
MGEIKVSPDYNWFRGXVPLKKIIVDDDDSKIWSLYDAGPRSIRCPLIFLPPVSGXADVFFRQILALXGWGYR

SEQ ID NO: 26179 - protein, 129 aa, Homo sapiens
  MOD_RES (16)..(16): Selenocysteine
  MOD_RES (55)..(55): Selenocysteine
  MOD_RES (67)..(67): Selenocysteine
MGEIKVSPDYNWFRGXVPLKKIIVDDDDSKIWSLYDAGPRSIRCPLIFLPPVSGXADVFFRQILALXGWGYRVIALQYPVYWDHLEFCDGFRKLLDHLQLDKLLADACIYAQKNSSWKFFIWPGGPYDG

SEQ ID NO: 26180 - protein, 103 aa, Homo sapiens
  MOD_RES (16)..(16): Selenocysteine
  MOD_RES (55)..(55): Selenocysteine
  MOD_RES (67)..(67): Selenocysteine
MGEIKVSPDYNWFRGXVPLKKIIVDDDDSKIWSLYDAGPRSIRCPLIFLPPVSGXADVFFRQILALXGWGYRVIALQYPVYWDHLEFCDGFRKLLDHLQLDKV

SEQ ID NO: 26181 - protein, 141 aa, Homo sapiens
  MOD_RES (16)..(16): Selenocysteine
  MOD_RES (55)..(55): Selenocysteine
  MOD_RES (67)..(67): Selenocysteine
  MOD_RES (122)..(122): Selenocysteine
  MOD_RES (140)..(140): Selenocysteine
MGEIKVSPDYNWFRGXVPLKKIIVDDDDSKIWSLYDAGPRSIRCPLIFLPPVSGXADVFFRQILALXGWGYRVIALQYPVYWDHLEFCDGFRKLLDHLQLDKVHLFGASLGGFLAQKFAEYXHKSPRVHSLILCNSFSDXS

SEQ ID NO: 26182 - protein, 150 aa, Homo sapiens
  MOD_RES (16)..(16): Selenocysteine
  MOD_RES (55)..(55): Selenocysteine
  MOD_RES (67)..(67): Selenocysteine
  MOD_RES (122)..(122): Selenocysteine
  MOD_RES (140)..(140): Selenocysteine
  MOD_RES (146)..(146): Selenocysteine
  MOD_RES (148)..(148): Selenocysteine
MGEIKVSPDYNWFRGXVPLKKIIVDDDDSKIWSLYDAGPRSIRCPLIFLPPVSGXADVFFRQILALXGWGYRVIALQYPVYWDHLEFCDGFRKLLDHLQLDKVHLFGASLGGFLAQKFAEYXHKSPRVHSLILCNSFSDXSIFNQXWXAN

SEQ ID NO: 26183 - protein, 308 aa, Homo sapiens
  MOD_RES (16)..(16): Selenocysteine
  MOD_RES (55)..(55): Selenocysteine
  MOD_RES (67)..(67): Selenocysteine
  MOD_RES (122)..(122): Selenocysteine
  MOD_RES (140)..(140): Selenocysteine
  MOD_RES (146)..(146): Selenocysteine
  MOD_RES (148)..(148): Selenocysteine
  MOD_RES (201)..(201): Selenocysteine
  MOD_RES (220)..(220): Selenocysteine
  MOD_RES (232)..(232): Selenocysteine
  MOD_RES (252)..(252): Selenocysteine
  MOD_RES (279)..(279): Selenocysteine
MGEIKVSPDYNWFRGXVPLKKIIVDDDDSKIWSLYDAGPRSIRCPLIFLPPVSGXADVFFRQILALXGWGYRVIALQYPVYWDHLEFCDGFRKLLDHLQLDKVHLFGASLGGFLAQKFAEYXHKSPRVHSLILCNSFSDXSIFNQXWXANSFWLMPAFMLKKIVLGNFSSGPVDPMMADAIDFMVDRLESLGQSELASRLXLNCQNSYVEPHKIRDIPVXIMDVFDQSALSXEAKEEMYKLYPNARRAHLKXGGNFPYLCRSAEVNLYVQIHLLQFHGXKYAAIDPSMVSAEELEVQKGSLGISQEEQ

SEQ ID NO: 26184 - protein, 281 aa, Homo sapiens
  MOD_RES (16)..(16): Selenocysteine
  MOD_RES (55)..(55): Selenocysteine
  MOD_RES (67)..(67): Selenocysteine
  MOD_RES (95)..(95): Selenocysteine
  MOD_RES (113)..(113): Selenocysteine
  MOD_RES (119)..(119): Selenocysteine
  MOD_RES (121)..(121): Selenocysteine
  MOD_RES (174)..(174): Selenocysteine
  MOD_RES (193)..(193): Selenocysteine
  MOD_RES (205)..(205): Selenocysteine
  MOD_RES (225)..(225): Selenocysteine
  MOD_RES (252)..(252): Selenocysteine
MGEIKVSPDYNWFRGXVPLKKIIVDDDDSKIWSLYDAGPRSIRCPLIFLPPVSGXADVFFRQILALXGWGYRVIAVHLFGASLGGFLAQKFAEYXHKSPRVHSLILCNSFSDXSIFNQXWXANSFWLMPAFMLKKIVLGNFSSGPVDPMMADAIDFMVDRLESLGQSELASRLXLNCQNSYVEPHKIRDIPVXIMDVFDQSALSXEAKEEMYKLYPNARRAHLKXGGNFPYLCRSAEVNLYVQIHLLQFHGXKYAAIDPSMVSAEELEVQKGSLGISQEEQ

SEQ ID NO: 26185 - protein, 154 aa, Homo sapiens
  MOD_RES (47)..(47): Selenocysteine
  MOD_RES (66)..(66): Selenocysteine
  MOD_RES (78)..(78): Selenocysteine
  MOD_RES (98)..(98): Selenocysteine
  MOD_RES (125)..(125): Selenocysteine
MPAFMLKKIVLGNFSSGPVDPMMADAIDFMVDRLESLGQSELASRLXLNCQNSYVEPHKIRDIPVXIMDVFDQSALSXEAKEEMYKLYPNARRAHLKXGGNFPYLCRSAEVNLYVQIHLLQFHGXKYAAIDPSMVSAEELEVQKGSLGISQEEQ

SEQ ID NO: 26186 - protein, 6 aa, Homo sapiens
MDPAGG

SEQ ID NO: 26187 - protein, 112 aa, Homo sapiens
  MOD_RES (50)..(50): Selenocysteine
  MOD_RES (54)..(54): Selenocysteine
  MOD_RES (99)..(99): Selenocysteine
MDPAGGPRGVLPRPCRVLVLLNPRGGKGKALQLFRSHVQPLLAEAEISFXLMLXERRNHARELVRSEELGRWDALVVMSGDGLMHEVVNGLMERPDWEXAIQKPLCSLPAGS

SEQ ID NO: 26188 - protein, 152 aa, Homo sapiens
  MOD_RES (50)..(50): Selenocysteine
  MOD_RES (54)..(54): Selenocysteine
  MOD_RES (99)..(99): Selenocysteine
  MOD_RES (130)..(130): Selenocysteine
  MOD_RES (136)..(136): Selenocysteine
  MOD_RES (139)..(139): Selenocysteine
MDPAGGPRGVLPRPCRVLVLLNPRGGKGKALQLFRSHVQPLLAEAEISFXLMLXERRNHARELVRSEELGRWDALVVMSGDGLMHEVVNGLMERPDWEXAIQKPLCSLPAGSGNALAASLNHYAGYEQVXNEDLLXNCXLLLCRRLLSPMNL

SEQ ID NO: 26189 - protein, 384 aa, Homo sapiens
  MOD_RES (50)..(50): Selenocysteine
  MOD_RES (54)..(54): Selenocysteine
  MOD_RES (99)..(99): Selenocysteine
  MOD_RES (130)..(130): Selenocysteine
  MOD_RES (136)..(136): Selenocysteine
  MOD_RES (139)..(139): Selenocysteine
  MOD_RES (157)..(157): Selenocysteine
  MOD_RES (193)..(193): Selenocysteine
  MOD_RES (196)..(196): Selenocysteine
  MOD_RES (205)..(205): Selenocysteine
  MOD_RES (222)..(222): Selenocysteine
  MOD_RES (250)..(250): Selenocysteine
MDPAGGPRGVLPRPCRVLVLLNPRGGKGKALQLFRSHVQPLLAEAEISFXLMLXERRNHARELVRSEELGRWDALVVMSGDGLMHEVVNGLMERPDWEXAIQKPLCSLPAGSGNALAASLNHYAGYEQVXNEDLLXNCXLLLCRRLLSPMNLLSLHXASGLRLFSVLSLAWGFIADVDLESEKYRRLGEMRFXLGXFLRLAALRXYRGRLAYLPVGRVGSKXPASPVVVQQGPVDAHLVPLEEPVPSHWXVVPDEDFVLVLALLHSHLGSEMFAAPMGRCAAGVMHLFYVRAGVSRAMLLRLFLAMEKGRHMEYECPYLVYVPVVAFRLEPKDGKGVFAVDGELMVSEAVQGQVHPNYFWMVSGCVEPPPSWKPQQMPPPEEPL

SEQ ID NO: 26190 - protein, 398 aa, Homo sapiens
  MOD_RES (64)..(64): Selenocysteine
  MOD_RES (68)..(68): Selenocysteine
  MOD_RES (113)..(113): Selenocysteine
  MOD_RES (144)..(144): Selenocysteine
  MOD_RES (150)..(150): Selenocysteine
  MOD_RES (153)..(153): Selenocysteine
  MOD_RES (171)..(171): Selenocysteine
  MOD_RES (207)..(207): Selenocysteine
  MOD_RES (210)..(210): Selenocysteine
  MOD_RES (219)..(219): Selenocysteine
  MOD_RES (236)..(236): Selenocysteine
  MOD_RES (264)..(264): Selenocysteine
MDPVVGCGRGLFGFVFSAGGPRGVLPRPCRVLVLLNPRGGKGKALQLFRSHVQPLLAEAEISFXLMLXERRNHARELVRSEELGRWDALVVMSGDGLMHEVVNGLMERPDWEXAIQKPLCSLPAGSGNALAASLNHYAGYEQVXNEDLLXNCXLLLCRRLLSPMNLLSLHXASGLRLFSVLSLAWGFIADVDLESEKYRRLGEMRFXLGXFLRLAALRXYRGRLAYLPVGRVGSKXPASPVVVQQGPVDAHLVPLEEPVPSHWXVVPDEDFVLVLALLHSHLGSEMFAAPMGRCAAGVMHLFYVRAGVSRAMLLRLFLAMEKGRHMEYECPYLVYVPVVAFRLEPKDGKGVFAVDGELMVSEAVQGQVHPNYFWMVSGCVEPPPSWKPQQMPPPEEPL

SEQ ID NO: 26191 - protein, 470 aa, Homo sapiens
  MOD_RES (13)..(13): Selenocysteine
  MOD_RES (36)..(36): Selenocysteine
  MOD_RES (56)..(56): Selenocysteine
  MOD_RES (67)..(67): Selenocysteine
  MOD_RES (72)..(72): Selenocysteine
  MOD_RES (76)..(76): Selenocysteine
  MOD_RES (136)..(136): Selenocysteine
  MOD_RES (140)..(140): Selenocysteine
  MOD_RES (185)..(185): Selenocysteine
  MOD_RES (216)..(216): Selenocysteine
  MOD_RES (222)..(222): Selenocysteine
  MOD_RES (225)..(225): Selenocysteine
  MOD_RES (243)..(243): Selenocysteine
  MOD_RES (279)..(279): Selenocysteine
  MOD_RES (282)..(282): Selenocysteine
  MOD_RES (291)..(291): Selenocysteine
  MOD_RES (308)..(308): Selenocysteine
  MOD_RES (336)..(336): Selenocysteine
MSAQVLGFLRSWXPLPLAAPRGPAAAGNDAGAPAAXAPGGEGEPHSRPCDARLGSXDKELKAGAAAXGSAPXAPGXPWQREPRVEVMDPAGGPRGVLPRPCRVLVLLNPRGGKGKALQLFRSHVQPLLAEAEISFXLMLXERRNHARELVRSEELGRWDALVVMSGDGLMHEVVNGLMERPDWEXAIQKPLCSLPAGSGNALAASLNHYAGYEQVXNEDLLXNCXLLLCRRLLSPMNLLSLHXASGLRLFSVLSLAWGFIADVDLESEKYRRLGEMRFXLGXFLRLAALRXYRGRLAYLPVGRVGSKXPASPVVVQQGPVDAHLVPLEEPVPSHWXVVPDEDFVLVLALLHSHLGSEMFAAPMGRCAAGVMHLFYVRAGVSRAMLLRLFLAMEKGRHMEYECPYLVYVPVVAFRLEPKDGKGVFAVDGELMVSEAVQGQVHPNYFWMVSGCVEPPPSWKPQQMPPPEEPL

SEQ ID NO: 26192 - protein, 72 aa, Homo sapiens
  MOD_RES (12)..(12): Selenocysteine
  MOD_RES (32)..(32): Selenocysteine
  MOD_RES (34)..(34): Selenocysteine
  MOD_RES (66)..(66): Selenocysteine
MAPPPPPLAASXPLLHGEFGSYPARGPRFALXLXSQALHIQRLRPKPEARPRGGLVPLAEVSGCCXLRSRSP

SEQ ID NO: 26193 - protein, 133 aa, Homo sapiens
  MOD_RES (12)..(12): Selenocysteine
  MOD_RES (32)..(32): Selenocysteine
  MOD_RES (34)..(34): Selenocysteine
  MOD_RES (66)..(66): Selenocysteine
  MOD_RES (83)..(83): Selenocysteine
  MOD_RES (96)..(96): Selenocysteine
  MOD_RES (98)..(98): Selenocysteine
  MOD_RES (106)..(106): Selenocysteine
  MOD_RES (119)..(119): Selenocysteine
  MOD_RES (122)..(122): Selenocysteine
MAPPPPPLAASXPLLHGEFGSYPARGPRFALXLXSQALHIQRLRPKPEARPRGGLVPLAEVSGCCXLRSRSPSDSAAYFCIYXYPRGRRGARRRAXRXFRADGAAXYEENRAEAQRWAXALXCLLRGLPLPGD

SEQ ID NO: 26194 - protein, 255 aa, Homo sapiens
  MOD_RES (12)..(12): Selenocysteine
  MOD_RES (32)..(32): Selenocysteine
  MOD_RES (34)..(34): Selenocysteine
  MOD_RES (66)..(66): Selenocysteine
  MOD_RES (83)..(83): Selenocysteine
  MOD_RES (96)..(96): Selenocysteine
  MOD_RES (98)..(98): Selenocysteine
  MOD_RES (106)..(106): Selenocysteine
  MOD_RES (119)..(119): Selenocysteine
  MOD_RES (122)..(122): Selenocysteine
  MOD_RES (137)..(137): Selenocysteine
  MOD_RES (184)..(184): Selenocysteine
  MOD_RES (207)..(207): Selenocysteine
MAPPPPPLAASXPLLHGEFGSYPARGPRFALXLXSQALHIQRLRPKPEARPRGGLVPLAEVSGCCXLRSRSPSDSAAYFCIYXYPRGRRGARRRAXRXFRADGAAXYEENRAEAQRWAXALXCLLRGLPLPGDGEIXPDLLPRPPRLLLLVNPFGGRGLAWQWCKNHVLPMISEAGLSFNLIQXERQNHARELVQGLSLSEWDGIVXVSGDGLLHEVLNGLLDRPDWEEAVKMPVGILPCGSGNALAGAVNQHGG

SEQ ID NO: 26195 - protein, 349 aa, Homo sapiens
  MOD_RES (12)..(12): Selenocysteine
  MOD_RES (32)..(32): Selenocysteine
  MOD_RES (34)..(34): Selenocysteine
  MOD_RES (66)..(66): Selenocysteine
  MOD_RES (83)..(83): Selenocysteine
  MOD_RES (96)..(96): Selenocysteine
  MOD_RES (98)..(98): Selenocysteine
  MOD_RES (106)..(106): Selenocysteine
  MOD_RES (119)..(119): Selenocysteine
  MOD_RES (122)..(122): Selenocysteine
  MOD_RES (137)..(137): Selenocysteine
  MOD_RES (184)..(184): Selenocysteine
  MOD_RES (207)..(207): Selenocysteine
  MOD_RES (264)..(264): Selenocysteine
  MOD_RES (273)..(274): Selenocysteine
  MOD_RES (319)..(319): Selenocysteine
  MOD_RES (324)..(324): Selenocysteine
  MOD_RES (327)..(327): Selenocysteine
MAPPPPPLAASXPLLHGEFGSYPARGPRFALXLXSQALHIQRLRPKPEARPRGGLVPLAEVSGCCXLRSRSPSDSAAYFCIYXYPRGRRGARRRAXRXFRADGAAXYEENRAEAQRWAXALXCLLRGLPLPGDGEIXPDLLPRPPRLLLLVNPFGGRGLAWQWCKNHVLPMISEAGLSFNLIQXERQNHARELVQGLSLSEWDGIVXVSGDGLLHEVLNGLLDRPDWEEAVKMPVGILPCGSGNALAGAVNQHGGPREDSDSSXSSSACPLWXXARSCPRAAASMPGSCPLLPQQLALGFSRFIQDRVNGGGGRIGSLXCRGHXQRXLPAPAREGGGSLFLKNINVFIC

SEQ ID NO: 26196 - protein, 618 aa, Homo sapiens
  MOD_RES (12)..(12): Selenocysteine
  MOD_RES (32)..(32): Selenocysteine
  MOD_RES (34)..(34): Selenocysteine
  MOD_RES (66)..(66): Selenocysteine
  MOD_RES (83)..(83): Selenocysteine
  MOD_RES (96)..(96): Selenocysteine
  MOD_RES (98)..(98): Selenocysteine
  MOD_RES (106)..(106): Selenocysteine
  MOD_RES (119)..(119): Selenocysteine
  MOD_RES (122)..(122): Selenocysteine
  MOD_RES (137)..(137): Selenocysteine
  MOD_RES (184)..(184): Selenocysteine
  MOD_RES (207)..(207): Selenocysteine
  MOD_RES (286)..(286): Selenocysteine
  MOD_RES (323)..(323): Selenocysteine
  MOD_RES (326)..(326): Selenocysteine
  MOD_RES (332)..(332): Selenocysteine
  MOD_RES (335)..(335): Selenocysteine
  MOD_RES (346)..(346): Selenocysteine
  MOD_RES (353)..(353): Selenocysteine
  MOD_RES (366)..(366): Selenocysteine
  MOD_RES (368)..(368): Selenocysteine
  MOD_RES (467)..(467): Selenocysteine
  MOD_RES (476)..(476): Selenocysteine
  MOD_RES (489)..(489): Selenocysteine
  MOD_RES (497)..(497): Selenocysteine
  MOD_RES (578)..(578): Selenocysteine
  MOD_RES (584)..(584): Selenocysteine
  MOD_RES (605)..(605): Selenocysteine
  MOD_RES (608)..(608): Selenocysteine
MAPPPPPLAASXPLLHGEFGSYPARGPRFALXLXSQALHIQRLRPKPEARPRGGLVPLAEVSGCCXLRSRSPSDSAAYFCIYXYPRGRRGARRRAXRXFRADGAAXYEENRAEAQRWAXALXCLLRGLPLPGDGEIXPDLLPRPPRLLLLVNPFGGRGLAWQWCKNHVLPMISEAGLSFNLIQXERQNHARELVQGLSLSEWDGIVXVSGDGLLHEVLNGLLDRPDWEEAVKMPVGILPCGSGNALAGAVNQHGGFEPALGLDLLLNCSLLLCRGGGHPLDLLSVXLASGSRCFSFLSVAWGFVSDVDIQSERFRALGSARFXLGXVLGLAXLHXYRGRLSYLPAXVEPASPXPAHSLPRAKSELXLXPDPAPPMAHSPLHRSVSDLPLPLPQPALASPGSPEPLPILSLNGGGPELAGDWGGAGDAPLSPDPLLSSPPGSPKAALHSPVSEGAPVIPPSSGLPLPXPDARVGASXCGPPDHLLPPLGXPLPPDWVXLEGDFVLMLAISPSHLGADLVAAPHARFDDGLVHLCWVRSGISRAALLRLFLAMERGSHFSLGCPQLGYAAARAFRLEPLXPRGVLXVDGEQVEYGPLQAQMHPGIGXLLXGPPGCPGREP

SEQ ID NO: 26197 - protein, 663 aa, Homo sapiens
  MOD_RES (12)..(12): Selenocysteine
  MOD_RES (32)..(32): Selenocysteine
  MOD_RES (34)..(34): Selenocysteine
  MOD_RES (66)..(66): Selenocysteine
  MOD_RES (83)..(83): Selenocysteine
  MOD_RES (96)..(96): Selenocysteine
  MOD_RES (98)..(98): Selenocysteine
  MOD_RES (106)..(106): Selenocysteine
  MOD_RES (119)..(119): Selenocysteine
  MOD_RES (122)..(122): Selenocysteine
  MOD_RES (137)..(137): Selenocysteine
  MOD_RES (184)..(184): Selenocysteine
  MOD_RES (207)..(207): Selenocysteine
  MOD_RES (286)..(286): Selenocysteine
  MOD_RES (323)..(323): Selenocysteine
  MOD_RES (326)..(326): Selenocysteine
  MOD_RES (332)..(332): Selenocysteine
  MOD_RES (335)..(335): Selenocysteine
  MOD_RES (346)..(346): Selenocysteine
  MOD_RES (353)..(353): Selenocysteine
  MOD_RES (366)..(366): Selenocysteine
  MOD_RES (368)..(368): Selenocysteine
  MOD_RES (467)..(467): Selenocysteine
  MOD_RES (476)..(476): Selenocysteine
  MOD_RES (489)..(489): Selenocysteine
  MOD_RES (497)..(497): Selenocysteine
  MOD_RES (578)..(578): Selenocysteine
  MOD_RES (584)..(584): Selenocysteine
  MOD_RES (608)..(608): Selenocysteine
  MOD_RES (610)..(610): Selenocysteine
  MOD_RES (658)..(658): Selenocysteine
MAPPPPPLAASXPLLHGEFGSYPARGPRFALXLXSQALHIQRLRPKPEARPRGGLVPLAEVSGCCXLRSRSPSDSAAYFCIYXYPRGRRGARRRAXRXFRADGAAXYEENRAEAQRWAXALXCLLRGLPLPGDGEIXPDLLPRPPRLLLLVNPFGGRGLAWQWCKNHVLPMISEAGLSFNLIQXERQNHARELVQGLSLSEWDGIVXVSGDGLLHEVLNGLLDRPDWEEAVKMPVGILPCGSGNALAGAVNQHGGFEPALGLDLLLNCSLLLCRGGGHPLDLLSVXLASGSRCFSFLSVAWGFVSDVDIQSERFRALGSARFXLGXVLGLAXLHXYRGRLSYLPAXVEPASPXPAHSLPRAKSELXLXPDPAPPMAHSPLHRSVSDLPLPLPQPALASPGSPEPLPILSLNGGGPELAGDWGGAGDAPLSPDPLLSSPPGSPKAALHSPVSEGAPVIPPSSGLPLPXPDARVGASXCGPPDHLLPPLGXPLPPDWVXLEGDFVLMLAISPSHLGADLVAAPHARFDDGLVHLCWVRSGISRAALLRLFLAMERGSHFSLGCPQLGYAAARAFRLEPLXPRGVLXVDGEQVEYGPLQAQMHPGIARGRXQXPALPAAPALYGRQPGAAHGLQPVCQGAALFFHNSWLWGSQDLFRIVLXEAVGG

SEQ ID NO: 26198 - protein, 448 aa, Homo sapiens
  MOD_RES (14)..(14): Selenocysteine
  MOD_RES (37)..(37): Selenocysteine
  MOD_RES (116)..(116): Selenocysteine
  MOD_RES (153)..(153): Selenocysteine
  MOD_RES (156)..(156): Selenocysteine
  MOD_RES (162)..(162): Selenocysteine
  MOD_RES (165)..(165): Selenocysteine
  MOD_RES (176)..(176): Selenocysteine
  MOD_RES (183)..(183): Selenocysteine
  MOD_RES (196)..(196): Selenocysteine
  MOD_RES (198)..(198): Selenocysteine
  MOD_RES (297)..(297): Selenocysteine
  MOD_RES (306)..(306): Selenocysteine
  MOD_RES (319)..(319): Selenocysteine
  MOD_RES (327)..(327): Selenocysteine
  MOD_RES (408)..(408): Selenocysteine
  MOD_RES (414)..(414): Selenocysteine
  MOD_RES (435)..(435): Selenocysteine
  MOD_RES (438)..(438): Selenocysteine
MISEAGLSFNLIQXERQNHARELVQGLSLSEWDGIVXVSGDGLLHEVLNGLLDRPDWEEAVKMPVGILPCGSGNALAGAVNQHGGFEPALGLDLLLNCSLLLCRGGGHPLDLLSVXLASGSRCFSFLSVAWGFVSDVDIQSERFRALGSARFXLGXVLGLAXLHXYRGRLSYLPAXVEPASPXPAHSLPRAKSELXLXPDPAPPMAHSPLHRSVSDLPLPLPQPALASPGSPEPLPILSLNGGGPELAGDWGGAGDAPLSPDPLLSSPPGSPKAALHSPVSEGAPVIPPSSGLPLPXPDARVGASXCGPPDHLLPPLGXPLPPDWVXLEGDFVLMLAISPSHLGADLVAAPHARFDDGLVHLCWVRSGISRAALLRLFLAMERGSHFSLGCPQLGYAAARAFRLEPLXPRGVLXVDGEQVEYGPLQAQMHPGIGXLLXGPPGCPGREP

SEQ ID NO: 26199 - protein, 595 aa, Homo sapiens
  MOD_RES (43)..(43): Selenocysteine
  MOD_RES (60)..(60): Selenocysteine
  MOD_RES (73)..(73): Selenocysteine
  MOD_RES (75)..(75): Selenocysteine
  MOD_RES (83)..(83): Selenocysteine
  MOD_RES (96)..(96): Selenocysteine
  MOD_RES (99)..(99): Selenocysteine
  MOD_RES (114)..(114): Selenocysteine
  MOD_RES (161)..(161): Selenocysteine
  MOD_RES (184)..(184): Selenocysteine
  MOD_RES (263)..(263): Selenocysteine
  MOD_RES (300)..(300): Selenocysteine
  MOD_RES (303)..(303): Selenocysteine
  MOD_RES (309)..(309): Selenocysteine
  MOD_RES (312)..(312): Selenocysteine
  MOD_RES (323)..(323): Selenocysteine
  MOD_RES (330)..(330): Selenocysteine
  MOD_RES (343)..(343): Selenocysteine
  MOD_RES (345)..(345): Selenocysteine
  MOD_RES (444)..(444): Selenocysteine
  MOD_RES (453)..(453): Selenocysteine
  MOD_RES (466)..(466): Selenocysteine
  MOD_RES (474)..(474): Selenocysteine
  MOD_RES (555)..(555): Selenocysteine
  MOD_RES (561)..(561): Selenocysteine
  MOD_RES (582)..(582): Selenocysteine
  MOD_RES (585)..(585): Selenocysteine
MNGHLEAEEQQDQALHIQRLRPKPEARPRGGLVPLAEVSGCCXLRSRSPSDSAAYFCIYXYPRGRRGARRRAXRXFRADGAAXYEENRAEAQRWAXALXCLLRGLPLPGDGEIXPDLLPRPPRLLLLVNPFGGRGLAWQWCKNHVLPMISEAGLSFNLIQXERQNHARELVQGLSLSEWDGIVXVSGDGLLHEVLNGLLDRPDWEEAVKMPVGILPCGSGNALAGAVNQHGGFEPALGLDLLLNCSLLLCRGGGHPLDLLSVXLASGSRCFSFLSVAWGFVSDVDIQSERFRALGSARFXLGXVLGLAXLHXYRGRLSYLPAXVEPASPXPAHSLPRAKSELXLXPDPAPPMAHSPLHRSVSDLPLPLPQPALASPGSPEPLPILSLNGGGPELAGDWGGAGDAPLSPDPLLSSPPGSPKAALHSPVSEGAPVIPPSSGLPLPXPDARVGASXCGPPDHLLPPLGXPLPPDWVXLEGDFVLMLAISPSHLGADLVAAPHARFDDGLVHLCWVRSGISRAALLRLFLAMERGSHFSLGCPQLGYAAARAFRLEPLXPRGVLXVDGEQVEYGPLQAQMHPGIGXLLXGPPGCPGREP

SEQ ID NO: 26200 - protein, 654 aa, Homo sapiens
  MOD_RES (20)..(20): Selenocysteine
  MOD_RES (30)..(30): Selenocysteine
  MOD_RES (48)..(48): Selenocysteine
  MOD_RES (68)..(68): Selenocysteine
  MOD_RES (70)..(70): Selenocysteine
  MOD_RES (102)..(102): Selenocysteine
  MOD_RES (119)..(119): Selenocysteine
  MOD_RES (132)..(132): Selenocysteine
  MOD_RES (134)..(134): Selenocysteine
  MOD_RES (142)..(142): Selenocysteine
  MOD_RES (155)..(155): Selenocysteine
  MOD_RES (158)..(158): Selenocysteine
  MOD_RES (173)..(173): Selenocysteine
  MOD_RES (220)..(220): Selenocysteine
  MOD_RES (243)..(243): Selenocysteine
  MOD_RES (322)..(322): Selenocysteine
  MOD_RES (359)..(359): Selenocysteine
  MOD_RES (362)..(362): Selenocysteine
  MOD_RES (368)..(368): Selenocysteine
  MOD_RES (371)..(371): Selenocysteine
  MOD_RES (382)..(382): Selenocysteine
  MOD_RES (389)..(389): Selenocysteine
  MOD_RES (402)..(402): Selenocysteine
  MOD_RES (404)..(404): Selenocysteine
  MOD_RES (503)..(503): Selenocysteine
  MOD_RES (512)..(512): Selenocysteine
  MOD_RES (525)..(525): Selenocysteine
  MOD_RES (533)..(533): Selenocysteine
  MOD_RES (614)..(614): Selenocysteine
  MOD_RES (620)..(620): Selenocysteine
  MOD_RES (641)..(641): Selenocysteine
  MOD_RES (644)..(644): Selenocysteine
MNGHLEAEEQQDQRPDQELXGSWGHGPRSXLVRAKAMAPPPPPLAASXPLLHGEFGSYPARGPRFALXLXSQALHIQRLRPKPEARPRGGLVPLAEVSGCCXLRSRSPSDSAAYFCIYXYPRGRRGARRRAXRXFRADGAAXYEENRAEAQRWAXALXCLLRGLPLPGDGEIXPDLLPRPPRLLLLVNPFGGRGLAWQWCKNHVLPMISEAGLSFNLIQXERQNHARELVQGLSLSEWDGIVXVSGDGLLHEVLNGLLDRPDWEEAVKMPVGILPCGSGNALAGAVNQHGGFEPALGLDLLLNCSLLLCRGGGHPLDLLSVXLASGSRCFSFLSVAWGFVSDVDIQSERFRALGSARFXLGXVLGLAXLHXYRGRLSYLPAXVEPASPXPAHSLPRAKSELXLXPDPAPPMAHSPLHRSVSDLPLPLPQPALASPGSPEPLPILSLNGGGPELAGDWGGAGDAPLSPDPLLSSPPGSPKAALHSPVSEGAPVIPPSSGLPLPXPDARVGASXCGPPDHLLPPLGXPLPPDWVXLEGDFVLMLAISPSHLGADLVAAPHARFDDGLVHLCWVRSGISRAALLRLFLAMERGSHFSLGCPQLGYAAARAFRLEPLXPRGVLXVDGEQVEYGPLQAQMHPGIGXLLXGPPGCPGREP

SEQ ID NO: 26201 - protein, 49 aa, Homo sapiens
  MOD_RES (18)..(18): Selenocysteine
  MOD_RES (45)..(46): Selenocysteine
MNGHLEAEEQQDQRSPLXCYLGRPGCFYWSIPLGVGAWPGSGVRXXCFP

SEQ ID NO: 26202 - protein, 1671 aa, Homo sapiens
  MOD_RES (42)..(42): Selenocysteine
  MOD_RES (57)..(57): Selenocysteine
  MOD_RES (97)..(97): Selenocysteine
  MOD_RES (168)..(168): Selenocysteine
  MOD_RES (194)..(194): Selenocysteine
  MOD_RES (203)..(203): Selenocysteine
  MOD_RES (216)..(216): Selenocysteine
  MOD_RES (253)..(253): Selenocysteine
  MOD_RES (278)..(278): Selenocysteine
  MOD_RES (283)..(283): Selenocysteine
  MOD_RES (291)..(291): Selenocysteine
  MOD_RES (294)..(294): Selenocysteine
  MOD_RES (320)..(320): Selenocysteine
  MOD_RES (374)..(374): Selenocysteine
  MOD_RES (387)..(388): Selenocysteine
  MOD_RES (393)..(393): Selenocysteine
  MOD_RES (413)..(413): Selenocysteine
  MOD_RES (435)..(435): Selenocysteine
  MOD_RES (438)..(438): Selenocysteine
  MOD_RES (479)..(479): Selenocysteine
  MOD_RES (505)..(505): Selenocysteine
  MOD_RES (509)..(509): Selenocysteine
  MOD_RES (516)..(516): Selenocysteine
  MOD_RES (538)..(538): Selenocysteine
  MOD_RES (562)..(562): Selenocysteine
  MOD_RES (580)..(580): Selenocysteine
  MOD_RES (628)..(628): Selenocysteine
  MOD_RES (632)..(632): Selenocysteine
  MOD_RES (650)..(650): Selenocysteine
  MOD_RES (656)..(656): Selenocysteine
  MOD_RES (670)..(670): Selenocysteine
  MOD_RES (704)..(704): Selenocysteine
  MOD_RES (709)..(709): Selenocysteine
  MOD_RES (720)..(720): Selenocysteine
  MOD_RES (741)..(741): Selenocysteine
  MOD_RES (747)..(747): Selenocysteine
  MOD_RES (763)..(763): Selenocysteine
  MOD_RES (766)..(766): Selenocysteine
  MOD_RES (780)..(780): Selenocysteine
  MOD_RES (809)..(809): Selenocysteine
  MOD_RES (825)..(825): Selenocysteine
  MOD_RES (827)..(828): Selenocysteine
  MOD_RES (843)..(843): Selenocysteine
  MOD_RES (864)..(864): Selenocysteine
  MOD_RES (883)..(883): Selenocysteine
  MOD_RES (891)..(891): Selenocysteine
  MOD_RES (915)..(915): Selenocysteine
  MOD_RES (918)..(918): Selenocysteine
  MOD_RES (927)..(927): Selenocysteine
  MOD_RES (936)..(936): Selenocysteine
  MOD_RES (942)..(942): Selenocysteine
  MOD_RES (971)..(971): Selenocysteine
  MOD_RES (990)..(990): Selenocysteine
  MOD_RES (1007)..(1007): Selenocysteine
  MOD_RES (1050)..(1050): Selenocysteine
  MOD_RES (1105)..(1105): Selenocysteine
  MOD_RES (1126)..(1126): Selenocysteine
  MOD_RES (1187)..(1187): Selenocysteine
  MOD_RES (1191)..(1191): Selenocysteine
  MOD_RES (1220)..(1220): Selenocysteine
  MOD_RES (1250)..(1250): Selenocysteine
  MOD_RES (1298)..(1298): Selenocysteine
  MOD_RES (1302)..(1302): Selenocysteine
  MOD_RES (1309)..(1309): Selenocysteine
  MOD_RES (1333)..(1333): Selenocysteine
  MOD_RES (1361)..(1361): Selenocysteine
  MOD_RES (1377)..(1377): Selenocysteine
  MOD_RES (1390)..(1390): Selenocysteine
  MOD_RES (1394)..(1394): Selenocysteine
  MOD_RES (1405)..(1405): Selenocysteine
  MOD_RES (1433)..(1433): Selenocysteine
  MOD_RES (1474)..(1474): Selenocysteine
  MOD_RES (1488)..(1488): Selenocysteine
  MOD_RES (1498)..(1498): Selenocysteine
  MOD_RES (1517)..(1517): Selenocysteine
  MOD_RES (1521)..(1521): Selenocysteine
  MOD_RES (1533)..(1533): Selenocysteine
  MOD_RES (1561)..(1561): Selenocysteine
  MOD_RES (1570)..(1570): Selenocysteine
  MOD_RES (1572)..(1572): Selenocysteine
  MOD_RES (1598)..(1598): Selenocysteine
  MOD_RES (1611)..(1611): Selenocysteine
MDGNSLLSVPSNLESSRMYDVLEPQQGRGCGSSGSGPGNSIXACKKVLRSNSLLESXDYWLQNQRMPCQIGFVEDKSENCASVCFVNLDVNKDECSXEHLQQKLVNVSPDLPKLISSMNVQQPKENEIVVLSGLASGNLQADFEVSQCPWLPDICLVQCARGNRPNSXNCIIFEINKFLIGLELVQERQLHLEXNILKLEDDXNCSLSSIEEDFLXASEHLEEESEVDESRNDYENINVSANVLESKQLKGAXQVEWNCNKEKWLYALEDKYINKYPXPLIKXERSPENLXKNXALQSLDPSAKPSQWKREAVGNGRQAXHYYHSEAFKGQMEKSQALYIPKDAYFSMMDKDVPSACAVAEQRSNLNPGDHEDXRNALPPRQDGEVXXGKYAXNLAESVLQDAFIRLSQSQSXLPQESAVSVSVGSSLLPSCYSXKDXVVSRSWNELPKIVVVQSPDGSDAAPQPGISSWPEMEVSVEXSSILSGENSSRQPQSALEVALACAAXVIGXISSPQAXERLKMEQVVSNFPPGSSGALQXQAPQGLKEPSINEYSFPSALCGMXQVASAVAVCGLGEREEVXCSVAPSGSLPPAAEASEAMPPLCGLASMELGKEAIAKGLLKEAALVLXRPNXYSSIGDFLDSMNRRIMEXASKSQXLCSENVVRNELAHXLSNVILRHSIDEVHHKNMIIDPNDNRHSSEILDXLMESXNQLLLDVICFXFKKMSHIVRLGECPAVLSKEXIRRREXEPSCQPSDPGASQAWXKAXESSSSSPLSNSHNXSLVINNLVDGMYSKQDKGGVRPGLFKNPXLQSQLSRSHRVPDSSXAXXSSKEIYLKGIAGEDXKSPHHSENECRASSEGQRSPXVSQSRSGSQEAEESIHPNXQEKYNCAXSRINEVQVNLSLLGDDLLLPAQSXLQXKHPDIYCIXDFAEELADXVVSMAXEIAAICLDNSSGKQPWFCAWKRGSEFLMXPNVPCRSLKRKKESQGSGXAVRKHKPPRLSEIKRKXDEHPELKEKLMNRVVDESMNLEDVPDSVNLFANEVAAKIMNLXEFSMVDGMWQAQGYPRNRLLSGDRWSRLKASSCESIPEEDSEARAYVNSLGLMSXLSQPVSRASSVSKQSSCESIXDEFSRFMVNQMENEGRGFELLLDYYAGKNASSILNSAMQQACRKSDHLSVRPSCPSKQSSXESIXEEFYRYMLRDIERDSRESASSRRSSQDWXAGLLSPSLRSPVCHRQSSMPDSRSPCSRLXVNVPIKANSLDGFAQNCPQDFLSVQPVSSASSSGLCKSDSCLYRRGGXDHIXNMLIHEXWASSIEALMRKNKIIVDDAEEADXEPVSGGSPSQAEKCANRLAASRMCSGPXLLVQESLDCPRKDSVXECKQPPVSSLSKXASLXNHSPLDSKKEXSSCQDPVPINHKRRSLCSREVPLIQIEXDQREACAGEPEPFLSKSSLLEEAEGHSNDKNIPDVVRGGDXAVSACQIHSDSLDXRDVPEAEASXEARAPDEAPNPPSSSEESXGSWXQLANEEDNPDDXSSFLQLSERSMSELVEEKKILKGQSESXEAPASGPPXGXASPQRSLLVINFDLEPECPDAELRAXLQWIAASELGIPXIYFKKSQENRIEKFLDVVQLVHRKSWKVGDIFHAVVQYCKMHEEQKDGRLSLFDWLLELG

SEQ ID NO: 26203 - protein, 1700 aa, Homo sapiens
  MOD_RES (42)..(42): Selenocysteine
  MOD_RES (57)..(57): Selenocysteine
  MOD_RES (97)..(97): Selenocysteine
  MOD_RES (168)..(168): Selenocysteine
  MOD_RES (194)..(194): Selenocysteine
  MOD_RES (203)..(203): Selenocysteine
  MOD_RES (216)..(216): Selenocysteine
  MOD_RES (253)..(253): Selenocysteine
  MOD_RES (278)..(278): Selenocysteine
  MOD_RES (283)..(283): Selenocysteine
  MOD_RES (291)..(291): Selenocysteine
  MOD_RES (294)..(294): Selenocysteine
  MOD_RES (320)..(320): Selenocysteine
  MOD_RES (374)..(374): Selenocysteine
  MOD_RES (387)..(388): Selenocysteine
  MOD_RES (393)..(393): Selenocysteine
  MOD_RES (413)..(413): Selenocysteine
  MOD_RES (435)..(435): Selenocysteine
  MOD_RES (438)..(438): Selenocysteine
  MOD_RES (479)..(479): Selenocysteine
  MOD_RES (505)..(505): Selenocysteine
  MOD_RES (509)..(509): Selenocysteine
  MOD_RES (516)..(516): Selenocysteine
  MOD_RES (538)..(538): Selenocysteine
  MOD_RES (562)..(562): Selenocysteine
  MOD_RES (580)..(580): Selenocysteine
  MOD_RES (628)..(628): Selenocysteine
  MOD_RES (632)..(632): Selenocysteine
  MOD_RES (650)..(650): Selenocysteine
  MOD_RES (656)..(656): Selenocysteine
  MOD_RES (670)..(670): Selenocysteine
  MOD_RES (704)..(704): Selenocysteine
  MOD_RES (709)..(709): Selenocysteine
  MOD_RES (720)..(720): Selenocysteine
  MOD_RES (741)..(741): Selenocysteine
  MOD_RES (747)..(747): Selenocysteine
  MOD_RES (763)..(763): Selenocysteine
  MOD_RES (766)..(766): Selenocysteine
  MOD_RES (780)..(780): Selenocysteine
  MOD_RES (809)..(809): Selenocysteine
  MOD_RES (825)..(825): Selenocysteine
  MOD_RES (827)..(828): Selenocysteine
  MOD_RES (843)..(843): Selenocysteine
  MOD_RES (864)..(864): Selenocysteine
  MOD_RES (883)..(883): Selenocysteine
  MOD_RES (891)..(891): Selenocysteine
  MOD_RES (915)..(915): Selenocysteine
  MOD_RES (918)..(918): Selenocysteine
  MOD_RES (927)..(927): Selenocysteine
  MOD_RES (936)..(936): Selenocysteine
  MOD_RES (942)..(942): Selenocysteine
  MOD_RES (971)..(971): Selenocysteine
  MOD_RES (990)..(990): Selenocysteine
  MOD_RES (1007)..(1007): Selenocysteine
  MOD_RES (1050)..(1050): Selenocysteine
  MOD_RES (1105)..(1105): Selenocysteine
  MOD_RES (1126)..(1126): Selenocysteine
  MOD_RES (1187)..(1187): Selenocysteine
  MOD_RES (1191)..(1191): Selenocysteine
  MOD_RES (1220)..(1220): Selenocysteine
  MOD_RES (1250)..(1250): Selenocysteine
  MOD_RES (1298)..(1298): Selenocysteine
  MOD_RES (1302)..(1302): Selenocysteine
  MOD_RES (1309)..(1309): Selenocysteine
  MOD_RES (1333)..(1333): Selenocysteine
  MOD_RES (1361)..(1361): Selenocysteine
  MOD_RES (1377)..(1377): Selenocysteine
  MOD_RES (1390)..(1390): Selenocysteine
  MOD_RES (1394)..(1394): Selenocysteine
  MOD_RES (1405)..(1405): Selenocysteine
  MOD_RES (1433)..(1433): Selenocysteine
  MOD_RES (1474)..(1474): Selenocysteine
  MOD_RES (1488)..(1488): Selenocysteine
  MOD_RES (1498)..(1498): Selenocysteine
  MOD_RES (1517)..(1517): Selenocysteine
  MOD_RES (1521)..(1521): Selenocysteine
  MOD_RES (1533)..(1533): Selenocysteine
  MOD_RES (1552)..(1552): Selenocysteine
  MOD_RES (1590)..(1590): Selenocysteine
  MOD_RES (1599)..(1599): Selenocysteine
  MOD_RES (1601)..(1601): Selenocysteine
  MOD_RES (1627)..(1627): Selenocysteine
  MOD_RES (1640)..(1640): Selenocysteine
MDGNSLLSVPSNLESSRMYDVLEPQQGRGCGSSGSGPGNSIXACKKVLRSNSLLESXDYWLQNQRMPCQIGFVEDKSENCASVCFVNLDVNKDECSXEHLQQKLVNVSPDLPKLISSMNVQQPKENEIVVLSGLASGNLQADFEVSQCPWLPDICLVQCARGNRPNSXNCIIFEINKFLIGLELVQERQLHLEXNILKLEDDXNCSLSSIEEDFLXASEHLEEESEVDESRNDYENINVSANVLESKQLKGAXQVEWNCNKEKWLYALEDKYINKYPXPLIKXERSPENLXKNXALQSLDPSAKPSQWKREAVGNGRQAXHYYHSEAFKGQMEKSQALYIPKDAYFSMMDKDVPSACAVAEQRSNLNPGDHEDXRNALPPRQDGEVXXGKYAXNLAESVLQDAFIRLSQSQSXLPQESAVSVSVGSSLLPSCYSXKDXVVSRSWNELPKIVVVQSPDGSDAAPQPGISSWPEMEVSVEXSSILSGENSSRQPQSALEVALACAAXVIGXISSPQAXERLKMEQVVSNFPPGSSGALQXQAPQGLKEPSINEYSFPSALCGMXQVASAVAVCGLGEREEVXCSVAPSGSLPPAAEASEAMPPLCGLASMELGKEAIAKGLLKEAALVLXRPNXYSSIGDFLDSMNRRIMEXASKSQXLCSENVVRNELAHXLSNVILRHSIDEVHHKNMIIDPNDNRHSSEILDXLMESXNQLLLDVICFXFKKMSHIVRLGECPAVLSKEXIRRREXEPSCQPSDPGASQAWXKAXESSSSSPLSNSHNXSLVINNLVDGMYSKQDKGGVRPGLFKNPXLQSQLSRSHRVPDSSXAXXSSKEIYLKGIAGEDXKSPHHSENECRASSEGQRSPXVSQSRSGSQEAEESIHPNXQEKYNCAXSRINEVQVNLSLLGDDLLLPAQSXLQXKHPDIYCIXDFAEELADXVVSMAXEIAAICLDNSSGKQPWFCAWKRGSEFLMXPNVPCRSLKRKKESQGSGXAVRKHKPPRLSEIKRKXDEHPELKEKLMNRVVDESMNLEDVPDSVNLFANEVAAKIMNLXEFSMVDGMWQAQGYPRNRLLSGDRWSRLKASSCESIPEEDSEARAYVNSLGLMSXLSQPVSRASSVSKQSSCESIXDEFSRFMVNQMENEGRGFELLLDYYAGKNASSILNSAMQQACRKSDHLSVRPSCPSKQSSXESIXEEFYRYMLRDIERDSRESASSRRSSQDWXAGLLSPSLRSPVCHRQSSMPDSRSPCSRLXVNVPIKANSLDGFAQNCPQDFLSVQPVSSASSSGLCKSDSCLYRRGGXDHIXNMLIHEXWASSIEALMRKNKIIVDDAEEADXEPVSGGSPSQAEKCANRLAASRMCSGPXLLVQESLDCPRKDSVXECKQPPVSSLSKXASLXNHSPLDSKKEXSSCQDPVPINHKRRSLCSREVPLIQIEXDQREACAGEPEPFLSKSSLLEEAEGHSNDKNIPDVVRGGDXAVSACQIHSDSLDXRDVPEAEASXEARAPDEAPNPPSSSEESXGSWXQLANEEDNPDDXSSFLQLSERSMSNGNSSAXSSLGIMDLDIYQESMPSSPMINELVEEKKILKGQSESXEAPASGPPXGXASPQRSLLVINFDLEPECPDAELRAXLQWIAASELGIPXIYFKKSQENRIEKFLDVVQLVHRKSWKVGDIFHAVVQYCKMHEEQKDGRLSLFDWLLELG

SEQ ID NO: 26204 - protein, 35 aa, Homo sapiens
  MOD_RES (24)..(24): Selenocysteine
  MOD_RES (29)..(29): Selenocysteine
  MOD_RES (35)..(35): Selenocysteine
MLQACKMEGFPLVPPAARRRSACXSSCWXCSAAAX

SEQ ID NO: 26205 - protein, 245 aa, Homo sapiens
  MOD_RES (25)..(25): Selenocysteine
  MOD_RES (32)..(32): Selenocysteine
  MOD_RES (71)..(71): Selenocysteine
  MOD_RES (98)..(98): Selenocysteine
  MOD_RES (164)..(164): Selenocysteine
  MOD_RES (185)..(185): Selenocysteine
  MOD_RES (191)..(191): Selenocysteine
  MOD_RES (230)..(230): Selenocysteine
MLQACKMEGFPLVPPPSEDLVPYDXDLYQRQXHEYYPYLSSDGESHSDHYWDFHPHHVHSEFESFAENNFXELQSVQPPQLQQLYRHMELEQMHVLDXPMVPPHPSLGHQVSYLPRMCLQYPSLSPAQPSSDEEEGERQSPPLEVSDGEADGLEPGPGLLPGEXGGAPGPPPWPRPWPCLCPAPXQPGQLXQQPRHRVACVCVCMFASVCVLWGCLWLSLCVCICCVVHXGISMKCARCVCLSVP

SEQ ID NO: 26206 - protein, 270 aa, Homo sapiens
  MOD_RES (25)..(25): Selenocysteine
  MOD_RES (32)..(32): Selenocysteine
  MOD_RES (71)..(71): Selenocysteine
  MOD_RES (98)..(98): Selenocysteine
  MOD_RES (164)..(164): Selenocysteine
  MOD_RES (198)..(198): Selenocysteine
  MOD_RES (224)..(224): Selenocysteine
  MOD_RES (238)..(238): Selenocysteine
  MOD_RES (249)..(249): Selenocysteine
MLQACKMEGFPLVPPPSEDLVPYDXDLYQRQXHEYYPYLSSDGESHSDHYWDFHPHHVHSEFESFAENNFXELQSVQPPQLQQLYRHMELEQMHVLDXPMVPPHPSLGHQVSYLPRMCLQYPSLSPAQPSSDEEEGERQSPPLEVSDGEADGLEPGPGLLPGEXGSKKKIRLYQFLLDLLRSGDMKDSIWWVDKDKGXFQFSSKHKEALAHRWGIQKGNRKKMXYQKMARALRNYGKXGEVKKVKKKLXYQFSGEVLGRGGLAERRHPPH

SEQ ID NO: 26207 - protein, 271 aa, Homo sapiens
  MOD_RES (26)..(26): Selenocysteine
  MOD_RES (33)..(33): Selenocysteine
  MOD_RES (72)..(72): Selenocysteine
  MOD_RES (99)..(99): Selenocysteine
  MOD_RES (165)..(165): Selenocysteine
  MOD_RES (199)..(199): Selenocysteine
  MOD_RES (225)..(225): Selenocysteine
  MOD_RES (239)..(239): Selenocysteine
  MOD_RES (250)..(250): Selenocysteine
MLQACKMEGFPLVPPQPSEDLVPYDXDLYQRQXHEYYPYLSSDGESHSDHYWDFHPHHVHSEFESFAENNFXELQSVQPPQLQQLYRHMELEQMHVLDXPMVPPHPSLGHQVSYLPRMCLQYPSLSPAQPSSDEEEGERQSPPLEVSDGEADGLEPGPGLLPGEXGSKKKIRLYQFLLDLLRSGDMKDSIWWVDKDKGXFQFSSKHKEALAHRWGIQKGNRKKMXYQKMARALRNYGKXGEVKKVKKKLXYQFSGEVLGRGGLAERRHPPH

SEQ ID NO: 26208 - protein, 171 aa, Homo sapiens
  MOD_RES (6)..(6): Selenocysteine
  MOD_RES (8)..(8): Selenocysteine
  MOD_RES (15)..(15): Selenocysteine
  MOD_RES (23)..(23): Selenocysteine
  MOD_RES (74)..(74): Selenocysteine
  MOD_RES (89)..(89): Selenocysteine
  MOD_RES (132)..(132): Selenocysteine
  MOD_RES (146)..(146): Selenocysteine
  MOD_RES (157)..(157): Selenocysteine
MASSMXWXAASIPAXLIQRGLLXLVPPAYAPYPSPVLSEEEDLPLDSPALEVSDSESDEALVAGPEGKGSEAGXRKKLRLYQFLLGLLXRGDMRECVWWVEPGAGVFQFSSKHKELLARRWGQQKGNRKRMXYQKLARALRNYAKXGEIRKVKRKLXYQFDSALLPAVRRA

SEQ ID NO: 26209 - protein, 127 aa, Homo sapiens
  MOD_RES (28)..(28): Selenocysteine
  MOD_RES (31)..(31): Selenocysteine
  MOD_RES (36)..(36): Selenocysteine
  MOD_RES (43)..(43): Selenocysteine
  MOD_RES (45)..(45): Selenocysteine
  MOD_RES (52)..(52): Selenocysteine
  MOD_RES (60)..(60): Selenocysteine
  MOD_RES (64)..(64): Selenocysteine
  MOD_RES (80)..(80): Selenocysteine
  MOD_RES (88)..(88): Selenocysteine
  MOD_RES (96)..(96): Selenocysteine
  MOD_RES (101)..(101): Selenocysteine
  MOD_RES (106)..(106): Selenocysteine
  MOD_RES (123)..(123): Selenocysteine
  MOD_RES (127)..(127): Selenocysteine
MLALEAAQFRWLEAASACPCVSPPPGSXGHXSAVCXQMASSMXWXAASIPAXLIQRGLLXPCGXGLWPHLSQPPPMKPSXRQQPLLAXPRLPSSAXNPPPXALQGXSNWPPAWRPRGLASLHXPRRX

SEQ ID NO: 26210 - protein, 77 aa, Homo sapiens
  MOD_RES (63)..(63): Selenocysteine
MLALEAAQLDGPHFSCLYPDGVFYDLDSCKHSSYPDSEGAPDPGSPGICPVPQPCAIRGGRLXVGQPCPGGLGQRVG

SEQ ID NO: 26211 - protein, 137 aa, Homo sapiens
  MOD_RES (48)..(48): Selenocysteine
  MOD_RES (56)..(56): Selenocysteine
  MOD_RES (82)..(82): Selenocysteine
  MOD_RES (107)..(107): Selenocysteine
  MOD_RES (123)..(123): Selenocysteine
MLALEAAQLDGPHFSCLYPDGVFYDLDSCKHSSYPDSEGAPDSLWDWXVAPPVPAXPYEAFDPAAAAFSHPQAAQLCYEPPXYSPAGNLELAPSLEAPGPGLPAYPXENFASQPCAIRGGRLXVGQPCPGGLGQRVG

SEQ ID NO: 26212 - protein, 262 aa, Homo sapiens
  MOD_RES (48)..(48): Selenocysteine
  MOD_RES (56)..(56): Selenocysteine
  MOD_RES (82)..(82): Selenocysteine
  MOD_RES (107)..(107): Selenocysteine
  MOD_RES (114)..(114): Selenocysteine
  MOD_RES (165)..(165): Selenocysteine
  MOD_RES (180)..(180): Selenocysteine
  MOD_RES (223)..(223): Selenocysteine
  MOD_RES (237)..(237): Selenocysteine
  MOD_RES (248)..(248): Selenocysteine
MLALEAAQLDGPHFSCLYPDGVFYDLDSCKHSSYPDSEGAPDSLWDWXVAPPVPAXPYEAFDPAAAAFSHPQAAQLCYEPPXYSPAGNLELAPSLEAPGPGLPAYPXENFASQXLVPPAYAPYPSPVLSEEEDLPLDSPALEVSDSESDEALVAGPEGKGSEAGXRKKLRLYQFLLGLLXRGDMRECVWWVEPGAGVFQFSSKHKELLARRWGQQKGNRKRMXYQKLARALRNYAKXGEIRKVKRKLXYQFDSALLPAVRRA

SEQ ID NO: 26213 - protein, 177 aa, Homo sapiens
  MOD_RES (48)..(48): Selenocysteine
  MOD_RES (56)..(56): Selenocysteine
  MOD_RES (82)..(82): Selenocysteine
  MOD_RES (107)..(107): Selenocysteine
  MOD_RES (114)..(114): Selenocysteine
  MOD_RES (171)..(171): Selenocysteine
MLALEAAQLDGPHFSCLYPDGVFYDLDSCKHSSYPDSEGAPDSLWDWXVAPPVPAXPYEAFDPAAAAFSHPQAAQLCYEPPXYSPAGNLELAPSLEAPGPGLPAYPXENFASQXLVPPAYAPYPSPVLSEEEDLPLDSPALEVSDSESDEALVAGPEGKGSEGLARSCACXSSCWGY

SEQ ID NO: 26214 - protein, 248 aa, Homo sapiens
  MOD_RES (2)..(2): Selenocysteine
  MOD_RES (25)..(25): Selenocysteine
  MOD_RES (59)..(59): Selenocysteine
  MOD_RES (68)..(68): Selenocysteine
  MOD_RES (90)..(90): Selenocysteine
  MOD_RES (98)..(98): Selenocysteine
  MOD_RES (136)..(136): Selenocysteine
  MOD_RES (163)..(163): Selenocysteine
  MOD_RES (165)..(165): Selenocysteine
  MOD_RES (183)..(183): Selenocysteine
  MOD_RES (190)..(190): Selenocysteine
  MOD_RES (236)..(236): Selenocysteine
MXCVEQDKLGQAFEDAFEVLRQHSXGDLQYSPDYRNYLALINHRPHVKGNSSCYGVLPXEEPVYNWRXVINSAADFYFEGNIHQSLQNIXENQLVQPXLLQQKGGKGRKKLRLFEYLHESLYNPEMASCIQWVDKXKGIFQFVSKNKEKLAELWGKRKGNRKXMXYQKMARALRNYGRSGEIXKIRRKLXYQFSEAILQRLSPSYFLGKEIFYSQCVQPDQEYLSLNNWNANYNYXYANYHELNHHDC

SEQ ID NO: 26215 - protein, 262 aa, Homo sapiens
  MOD_RES (3)..(3): Selenocysteine
  MOD_RES (8)..(8): Selenocysteine
  MOD_RES (31)..(31): Selenocysteine
  MOD_RES (70)..(70): Selenocysteine
  MOD_RES (75)..(75): Selenocysteine
  MOD_RES (120)..(120): Selenocysteine
  MOD_RES (131)..(131): Selenocysteine
  MOD_RES (143)..(143): Selenocysteine
  MOD_RES (164)..(164): Selenocysteine
  MOD_RES (169)..(169): Selenocysteine
  MOD_RES (229)..(229): Selenocysteine
  MOD_RES (261)..(261): Selenocysteine
MKXPFGKXPGQRSRADAGHAGVSANMMKKRXSHKKHRSSVGPSKPVSQPRRNIVGCRIQHGWKEGNGPVXQWKGXVLDQVPVNPSLYLIKYDGFDCVYGLELNKDERVSALEVLPDRVAXSRISDAHLADXMIGKAVEHMFEXEDGSKDEWRGMVLARAPVMNXWFYIXYEKDPVLYMYQLLDDYKEGDLRIMPDSNDSPPAEREPGEVVDSLVGKQVEYAKEDGSKRXGMVIHQVEAKPSVYFIKFDDDFHIYVYDLVKXS

SEQ ID NO: 26216 - protein, 65 aa, Homo sapiens
  MOD_RES (4)..(4): Selenocysteine
  MOD_RES (21)..(21): Selenocysteine
  MOD_RES (40)..(40): Selenocysteine
  MOD_RES (49)..(49): Selenocysteine
  MOD_RES (53)..(53): Selenocysteine
MKVXGIFLLSALALLSLSGNXGADSLGREAKCYNELNGCXKIYDPVCGXDGNXYPNECVLCFENR

SEQ ID NO: 26217 - protein, 79 aa, Homo sapiens
  MOD_RES (4)..(4): Selenocysteine
  MOD_RES (21)..(21): Selenocysteine
  MOD_RES (40)..(40): Selenocysteine
  MOD_RES (49)..(49): Selenocysteine
  MOD_RES (53)..(53): Selenocysteine
  MOD_RES (69)..(69): Selenocysteine
MKVXGIFLLSALALLSLSGNXGADSLGREAKCYNELNGCXKIYDPVCGXDGNXYPNECVLCFENRKRQXSILIQKSGPC

SEQ ID NO: 26218 - protein, 355 aa, Homo sapiens
  MOD_RES (3)..(3): Selenocysteine
  MOD_RES (21)..(22): Selenocysteine
  MOD_RES (26)..(26): Selenocysteine
  MOD_RES (28)..(28): Selenocysteine
  MOD_RES (36)..(36): Selenocysteine
  MOD_RES (46)..(47): Selenocysteine
  MOD_RES (50)..(50): Selenocysteine
  MOD_RES (58)..(58): Selenocysteine
  MOD_RES (62)..(62): Selenocysteine
  MOD_RES (69)..(69): Selenocysteine
  MOD_RES (79)..(79): Selenocysteine
  MOD_RES (85)..(85): Selenocysteine
  MOD_RES (93)..(94): Selenocysteine
  MOD_RES (109)..(109): Selenocysteine
  MOD_RES (113)..(113): Selenocysteine
  MOD_RES (121)..(121): Selenocysteine
  MOD_RES (129)..(129): Selenocysteine
  MOD_RES (131)..(131): Selenocysteine
  MOD_RES (134)..(134): Selenocysteine
  MOD_RES (136)..(137): Selenocysteine
  MOD_RES (142)..(142): Selenocysteine
  MOD_RES (146)..(146): Selenocysteine
  MOD_RES (152)..(153): Selenocysteine
  MOD_RES (160)..(160): Selenocysteine
  MOD_RES (164)..(164): Selenocysteine
  MOD_RES (170)..(170): Selenocysteine
  MOD_RES (173)..(173): Selenocysteine
  MOD_RES (178)..(178): Selenocysteine
  MOD_RES (182)..(182): Selenocysteine
  MOD_RES (188)..(188): Selenocysteine
  MOD_RES (191)..(191): Selenocysteine
  MOD_RES (196)..(196): Selenocysteine
  MOD_RES (198)..(198): Selenocysteine
  MOD_RES (200)..(201): Selenocysteine
  MOD_RES (206)..(206): Selenocysteine
  MOD_RES (208)..(209): Selenocysteine
  MOD_RES (230)..(230): Selenocysteine
  MOD_RES (235)..(236): Selenocysteine
  MOD_RES (238)..(238): Selenocysteine
  MOD_RES (242)..(242): Selenocysteine
  MOD_RES (285)..(285): Selenocysteine
  MOD_RES (316)..(316): Selenocysteine
  MOD_RES (318)..(318): Selenocysteine
  MOD_RES (341)..(341): Selenocysteine
  MOD_RES (343)..(344): Selenocysteine
MAXLLLLLGVLVVSPDALGSXXAVQXPXSGEPLVSXSEPLSSKMYXXSIXSDPKADSXGDQXSALPPSXSINEGSPLWXSIGASXGSPLPEPXXYQEVSIKMSSVPQEXPHAXSHPAVPIXANSLGSHXVXGGXIXXNSPEXSSRXSGAPVXXAASSLEXSRGXSGPPLXMAXVSLEXSKGXSGPPVXMAXDSLEXSXGXXGPPVXMXXGSLEPSSGASGPQVSSVKLSXMMSPXXSXNASXVPFRNPDENSRGMLPVAVLVALLAVIVLVALLLLWRRRQKRRXGALVLSRGGKRNGVVDAWAGPAQVPEEGAVXVXVGGSGGDKGSGFPDGEGSSRRPXLXXFFGRRKSRQGS

SEQ ID NO: 26219 - protein, 400 aa, Homo sapiens
  MOD_RES (3)..(3): Selenocysteine
  MOD_RES (21)..(22): Selenocysteine
  MOD_RES (26)..(26): Selenocysteine
  MOD_RES (28)..(28): Selenocysteine
  MOD_RES (36)..(36): Selenocysteine
  MOD_RES (46)..(47): Selenocysteine
  MOD_RES (50)..(50): Selenocysteine
  MOD_RES (58)..(58): Selenocysteine
  MOD_RES (62)..(62): Selenocysteine
  MOD_RES (69)..(69): Selenocysteine
  MOD_RES (79)..(79): Selenocysteine
  MOD_RES (85)..(85): Selenocysteine
  MOD_RES (93)..(94): Selenocysteine
  MOD_RES (109)..(109): Selenocysteine
  MOD_RES (113)..(113): Selenocysteine
  MOD_RES (121)..(121): Selenocysteine
  MOD_RES (129)..(129): Selenocysteine
  MOD_RES (131)..(131): Selenocysteine
  MOD_RES (134)..(134): Selenocysteine
  MOD_RES (136)..(137): Selenocysteine
  MOD_RES (142)..(142): Selenocysteine
  MOD_RES (146)..(146): Selenocysteine
  MOD_RES (152)..(153): Selenocysteine
  MOD_RES (160)..(160): Selenocysteine
  MOD_RES (164)..(164): Selenocysteine
  MOD_RES (170)..(170): Selenocysteine
  MOD_RES (173)..(173): Selenocysteine
  MOD_RES (178)..(178): Selenocysteine
  MOD_RES (182)..(182): Selenocysteine
  MOD_RES (188)..(188): Selenocysteine
  MOD_RES (191)..(191): Selenocysteine
  MOD_RES (196)..(196): Selenocysteine
  MOD_RES (198)..(198): Selenocysteine
  MOD_RES (200)..(201): Selenocysteine
  MOD_RES (206)..(206): Selenocysteine
  MOD_RES (208)..(209): Selenocysteine
  MOD_RES (230)..(230): Selenocysteine
  MOD_RES (235)..(236): Selenocysteine
  MOD_RES (238)..(238): Selenocysteine
  MOD_RES (242)..(242): Selenocysteine
  MOD_RES (285)..(285): Selenocysteine
  MOD_RES (316)..(316): Selenocysteine
  MOD_RES (318)..(318): Selenocysteine
  MOD_RES (341)..(341): Selenocysteine
  MOD_RES (343)..(344): Selenocysteine
MAXLLLLLGVLVVSPDALGSXXAVQXPXSGEPLVSXSEPLSSKMYXXSIXSDPKADSXGDQXSALPPSXSINEGSPLWXSIGASXGSPLPEPXXYQEVSIKMSSVPQEXPHAXSHPAVPIXANSLGSHXVXGGXIXXNSPEXSSRXSGAPVXXAASSLEXSRGXSGPPLXMAXVSLEXSKGXSGPPVXMAXDSLEXSXGXXGPPVXMXXGSLEPSSGASGPQVSSVKLSXMMSPXXSXNASXVPFRNPDENSRGMLPVAVLVALLAVIVLVALLLLWRRRQKRRXGALVLSRGGKRNGVVDAWAGPAQVPEEGAVXVXVGGSGGDKGSGFPDGEGSSRRPXLXXFFGRRKSRQGSLAMEELKSGSGPSLKGEEEPLVASEDGAVDAPAPDEPEGGDGAAP

SEQ ID NO: 26220 - protein, 178 aa, Homo sapiens
  MOD_RES (6)..(6): Selenocysteine
  MOD_RES (24)..(24): Selenocysteine
  MOD_RES (31)..(31): Selenocysteine
  MOD_RES (51)..(51): Selenocysteine
  MOD_RES (78)..(78): Selenocysteine
  MOD_RES (102)..(102): Selenocysteine
  MOD_RES (139)..(139): Selenocysteine
  MOD_RES (156)..(156): Selenocysteine
  MOD_RES (169)..(169): Selenocysteine
  MOD_RES (173)..(173): Selenocysteine
MAGSDXAPFLSQADDPDDGPVPGXPGLPGSXGNPKSEEPEVPDQEGLQRIXGLSPGRSALIVAVLCYINLLNYMDRFXVAGVLPDIEQFFNIGDSSSGLIQXVFISSYMVLAPVFGYLGDRYNRKYLMCGGIAFWSLVXLGSSFIPGEHFWLLLLXRGLVGVGEASYSXIAPXLIADL

SEQ ID NO: 26221 - protein, 476 aa, Homo sapiens
  MOD_RES (6)..(6): Selenocysteine
  MOD_RES (24)..(24): Selenocysteine
  MOD_RES (31)..(31): Selenocysteine
  MOD_RES (51)..(51): Selenocysteine
  MOD_RES (78)..(78): Selenocysteine
  MOD_RES (102)..(102): Selenocysteine
  MOD_RES (139)..(139): Selenocysteine
  MOD_RES (156)..(156): Selenocysteine
  MOD_RES (169)..(169): Selenocysteine
  MOD_RES (173)..(173): Selenocysteine
  MOD_RES (223)..(223): Selenocysteine
  MOD_RES (258)..(258): Selenocysteine
  MOD_RES (277)..(277): Selenocysteine
  MOD_RES (280)..(280): Selenocysteine
  MOD_RES (309)..(309): Selenocysteine
  MOD_RES (332)..(332): Selenocysteine
  MOD_RES (341)..(341): Selenocysteine
  MOD_RES (361)..(361): Selenocysteine
  MOD_RES (365)..(365): Selenocysteine
  MOD_RES (429)..(429): Selenocysteine
  MOD_RES (454)..(454): Selenocysteine
  MOD_RES (467)..(467): Selenocysteine
MAGSDXAPFLSQADDPDDGPVPGXPGLPGSXGNPKSEEPEVPDQEGLQRIXGLSPGRSALIVAVLCYINLLNYMDRFXVAGVLPDIEQFFNIGDSSSGLIQXVFISSYMVLAPVFGYLGDRYNRKYLMCGGIAFWSLVXLGSSFIPGEHFWLLLLXRGLVGVGEASYSXIAPXLIADLFVADQRSRMLSIFYFAIPVGSGLGYIAGSKVKDMAGDWHWALRVXPGLGVVAVLLLFLVVREPPRGAVERHSDLPPLNPXSWWADLRALARNLIFGLIXCLXGVLGVGLGVEISRRLRHSNPRADPLVCAXGLLGSAPFLFLSLACARGSIVAXYIFIFIGEXLLSMNWAIVADILLYVVIPXRRSXAEAFQIVLSHLLGDAGSPYLIGLISDRLRRNWPPSFLSEFRALQFSLMLCAFVGALGGAAFLGXAIFIEADRRRAQLHVQGLLHEAGSXDDRIVVPQRGRSXRVPVASVLI

SEQ ID NO: 26222 - protein, 528 aa, Homo sapiens
  MOD_RES (6)..(6): Selenocysteine
  MOD_RES (24)..(24): Selenocysteine
  MOD_RES (31)..(31): Selenocysteine
  MOD_RES (51)..(51): Selenocysteine
  MOD_RES (78)..(78): Selenocysteine
  MOD_RES (102)..(102): Selenocysteine
  MOD_RES (139)..(139): Selenocysteine
  MOD_RES (156)..(156): Selenocysteine
  MOD_RES (169)..(169): Selenocysteine
  MOD_RES (173)..(173): Selenocysteine
  MOD_RES (223)..(223): Selenocysteine
  MOD_RES (258)..(258): Selenocysteine
  MOD_RES (281)..(281): Selenocysteine
  MOD_RES (287)..(287): Selenocysteine
  MOD_RES (308)..(308): Selenocysteine
  MOD_RES (329)..(329): Selenocysteine
  MOD_RES (332)..(332): Selenocysteine
  MOD_RES (361)..(361): Selenocysteine
  MOD_RES (384)..(384): Selenocysteine
  MOD_RES (393)..(393): Selenocysteine
  MOD_RES (413)..(413): Selenocysteine
  MOD_RES (417)..(417): Selenocysteine
  MOD_RES (481)..(481): Selenocysteine
  MOD_RES (506)..(506): Selenocysteine
  MOD_RES (519)..(519): Selenocysteine
MAGSDXAPFLSQADDPDDGPVPGXPGLPGSXGNPKSEEPEVPDQEGLQRIXGLSPGRSALIVAVLCYINLLNYMDRFXVAGVLPDIEQFFNIGDSSSGLIQXVFISSYMVLAPVFGYLGDRYNRKYLMCGGIAFWSLVXLGSSFIPGEHFWLLLLXRGLVGVGEASYSXIAPXLIADLFVADQRSRMLSIFYFAIPVGSGLGYIAGSKVKDMAGDWHWALRVXPGLGVVAVLLLFLVVREPPRGAVERHSDLPPLNPXSWWADLRALARNPSFVLSSLGFXAVAFVXGSLALWAPAFLLRSRVVLGEXPPCLPGDSCSSSDSLIFGLIXCLXGVLGVGLGVEISRRLRHSNPRADPLVCAXGLLGSAPFLFLSLACARGSIVAXYIFIFIGEXLLSMNWAIVADILLYVVIPXRRSXAEAFQIVLSHLLGDAGSPYLIGLISDRLRRNWPPSFLSEFRALQFSLMLCAFVGALGGAAFLGXAIFIEADRRRAQLHVQGLLHEAGSXDDRIVVPQRGRSXRVPVASVLI

SEQ ID NO: 26223 - protein, 454 aa, Homo sapiens
  MOD_RES (6)..(6): Selenocysteine
  MOD_RES (24)..(24): Selenocysteine
  MOD_RES (31)..(31): Selenocysteine
  MOD_RES (51)..(51): Selenocysteine
  MOD_RES (78)..(78): Selenocysteine
  MOD_RES (117)..(117): Selenocysteine
  MOD_RES (134)..(134): Selenocysteine
  MOD_RES (147)..(147): Selenocysteine
  MOD_RES (151)..(151): Selenocysteine
  MOD_RES (201)..(201): Selenocysteine
  MOD_RES (236)..(236): Selenocysteine
  MOD_RES (255)..(255): Selenocysteine
  MOD_RES (258)..(258): Selenocysteine
  MOD_RES (287)..(287): Selenocysteine
  MOD_RES (310)..(310): Selenocysteine
  MOD_RES (319)..(319): Selenocysteine
  MOD_RES (339)..(339): Selenocysteine
  MOD_RES (343)..(343): Selenocysteine
  MOD_RES (407)..(407): Selenocysteine
  MOD_RES (432)..(432): Selenocysteine
  MOD_RES (445)..(445): Selenocysteine
MAGSDXAPFLSQADDPDDGPVPGXPGLPGSXGNPKSEEPEVPDQEGLQRIXGLSPGRSALIVAVLCYINLLNYMDRFXVAVFISSYMVLAPVFGYLGDRYNRKYLMCGGIAFWSLVXLGSSFIPGEHFWLLLLXRGLVGVGEASYSXIAPXLIADLFVADQRSRMLSIFYFAIPVGSGLGYIAGSKVKDMAGDWHWALRVXPGLGVVAVLLLFLVVREPPRGAVERHSDLPPLNPXSWWADLRALARNLIFGLIXCLXGVLGVGLGVEISRRLRHSNPRADPLVCAXGLLGSAPFLFLSLACARGSIVAXYIFIFIGEXLLSMNWAIVADILLYVVIPXRRSXAEAFQIVLSHLLGDAGSPYLIGLISDRLRRNWPPSFLSEFRALQFSLMLCAFVGALGGAAFLGXAIFIEADRRRAQLHVQGLLHEAGSXDDRIVVPQRGRSXRVPVASVLI

SEQ ID NO: 26224 - protein, 142 aa, Homo sapiens
  MOD_RES (5)..(5): Selenocysteine
  MOD_RES (29)..(29): Selenocysteine
  MOD_RES (66)..(66): Selenocysteine
  MOD_RES (83)..(83): Selenocysteine
  MOD_RES (96)..(96): Selenocysteine
  MOD_RES (100)..(100): Selenocysteine
MDRFXVAGVLPDIEQFFNIGDSSSGLIQXVFISSYMVLAPVFGYLGDRYNRKYLMCGGIAFWSLVXLGSSFIPGEHFWLLLLXRGLVGVGEASYSXIAPXLIADLFVADQRSRMLSIFYFAIPVGSGLGYIAGSKVKDMAGD

SEQ ID NO: 26225 - protein, 455 aa, Homo sapiens
  MOD_RES (5)..(5): Selenocysteine
  MOD_RES (29)..(29): Selenocysteine
  MOD_RES (66)..(66): Selenocysteine
  MOD_RES (83)..(83): Selenocysteine
  MOD_RES (96)..(96): Selenocysteine
  MOD_RES (100)..(100): Selenocysteine
  MOD_RES (150)..(150): Selenocysteine
  MOD_RES (185)..(185): Selenocysteine
  MOD_RES (208)..(208): Selenocysteine
  MOD_RES (214)..(214): Selenocysteine
  MOD_RES (235)..(235): Selenocysteine
  MOD_RES (256)..(256): Selenocysteine
  MOD_RES (259)..(259): Selenocysteine
  MOD_RES (288)..(288): Selenocysteine
  MOD_RES (311)..(311): Selenocysteine
  MOD_RES (320)..(320): Selenocysteine
  MOD_RES (340)..(340): Selenocysteine
  MOD_RES (344)..(344): Selenocysteine
  MOD_RES (408)..(408): Selenocysteine
  MOD_RES (433)..(433): Selenocysteine
  MOD_RES (446)..(446): Selenocysteine
MDRFXVAGVLPDIEQFFNIGDSSSGLIQXVFISSYMVLAPVFGYLGDRYNRKYLMCGGIAFWSLVXLGSSFIPGEHFWLLLLXRGLVGVGEASYSXIAPXLIADLFVADQRSRMLSIFYFAIPVGSGLGYIAGSKVKDMAGDWHWALRVXPGLGVVAVLLLFLVVREPPRGAVERHSDLPPLNPXSWWADLRALARNPSFVLSSLGFXAVAFVXGSLALWAPAFLLRSRVVLGEXPPCLPGDSCSSSDSLIFGLIXCLXGVLGVGLGVEISRRLRHSNPRADPLVCAXGLLGSAPFLFLSLACARGSIVAXYIFIFIGEXLLSMNWAIVADILLYVVIPXRRSXAEAFQIVLSHLLGDAGSPYLIGLISDRLRRNWPPSFLSEFRALQFSLMLCAFVGALGGAAFLGXAIFIEADRRRAQLHVQGLLHEAGSXDDRIVVPQRGRSXRVPVASVLI

SEQ ID NO: 26226 - protein, 573 aa, Homo sapiens
  MOD_RES (2)..(2): Selenocysteine
  MOD_RES (45)..(45): Selenocysteine
  MOD_RES (51)..(51): Selenocysteine
  MOD_RES (69)..(69): Selenocysteine
  MOD_RES (76)..(76): Selenocysteine
  MOD_RES (96)..(96): Selenocysteine
  MOD_RES (123)..(123): Selenocysteine
  MOD_RES (147)..(147): Selenocysteine
  MOD_RES (184)..(184): Selenocysteine
  MOD_RES (201)..(201): Selenocysteine
  MOD_RES (214)..(214): Selenocysteine
  MOD_RES (218)..(218): Selenocysteine
  MOD_RES (268)..(268): Selenocysteine
  MOD_RES (303)..(303): Selenocysteine
  MOD_RES (326)..(326): Selenocysteine
  MOD_RES (332)..(332): Selenocysteine
  MOD_RES (353)..(353): Selenocysteine
  MOD_RES (374)..(374): Selenocysteine
  MOD_RES (377)..(377): Selenocysteine
  MOD_RES (406)..(406): Selenocysteine
  MOD_RES (429)..(429): Selenocysteine
  MOD_RES (438)..(438): Selenocysteine
  MOD_RES (458)..(458): Selenocysteine
  MOD_RES (462)..(462): Selenocysteine
  MOD_RES (526)..(526): Selenocysteine
  MOD_RES (551)..(551): Selenocysteine
  MOD_RES (564)..(564): Selenocysteine
MXGFKQHGGCRGAAPGLSDSKCSGLLPRVGSSVGPERGRARPPGXMAGSDXAPFLSQADDPDDGPVPGXPGLPGSXGNPKSEEPEVPDQEGLQRIXGLSPGRSALIVAVLCYINLLNYMDRFXVAGVLPDIEQFFNIGDSSSGLIQXVFISSYMVLAPVFGYLGDRYNRKYLMCGGIAFWSLVXLGSSFIPGEHFWLLLLXRGLVGVGEASYSXIAPXLIADLFVADQRSRMLSIFYFAIPVGSGLGYIAGSKVKDMAGDWHWALRVXPGLGVVAVLLLFLVVREPPRGAVERHSDLPPLNPXSWWADLRALARNPSFVLSSLGFXAVAFVXGSLALWAPAFLLRSRVVLGEXPPCLPGDSCSSSDSLIFGLIXCLXGVLGVGLGVEISRRLRHSNPRADPLVCAXGLLGSAPFLFLSLACARGSIVAXYIFIFIGEXLLSMNWAIVADILLYVVIPXRRSXAEAFQIVLSHLLGDAGSPYLIGLISDRLRRNWPPSFLSEFRALQFSLMLCAFVGALGGAAFLGXAIFIEADRRRAQLHVQGLLHEAGSXDDRIVVPQRGRSXRVPVASVLI

SEQ ID NO: 26227 - protein, 538 aa, Homo sapiens
  MOD_RES (13)..(13): Selenocysteine
  MOD_RES (20)..(20): Selenocysteine
  MOD_RES (40)..(40): Selenocysteine
  MOD_RES (67)..(67): Selenocysteine
  MOD_RES (91)..(91): Selenocysteine
  MOD_RES (128)..(128): Selenocysteine
  MOD_RES (145)..(145): Selenocysteine
  MOD_RES (158)..(158): Selenocysteine
  MOD_RES (162)..(162): Selenocysteine
  MOD_RES (217)..(217): Selenocysteine
  MOD_RES (252)..(252): Selenocysteine
  MOD_RES (275)..(275): Selenocysteine
  MOD_RES (281)..(281): Selenocysteine
  MOD_RES (302)..(302): Selenocysteine
  MOD_RES (323)..(323): Selenocysteine
  MOD_RES (326)..(326): Selenocysteine
  MOD_RES (355)..(355): Selenocysteine
  MOD_RES (378)..(378): Selenocysteine
  MOD_RES (387)..(387): Selenocysteine
  MOD_RES (407)..(407): Selenocysteine
  MOD_RES (411)..(411): Selenocysteine
  MOD_RES (438)..(438): Selenocysteine
  MOD_RES (444)..(445): Selenocysteine
  MOD_RES (471)..(471): Selenocysteine
  MOD_RES (485)..(485): Selenocysteine
  MOD_RES (491)..(491): Selenocysteine
  MOD_RES (501)..(501): Selenocysteine
QADDPDDGPVPGXPGLPGSXGNPKSEEPEVPDQEGLQRIXGLSPGRSALIVAVLCYINLLNYMDRFXVAGVLPDIEQFFNIGDSSSGLIQXVFISSYMVLAPVFGYLGDRYNRKYLMCGGIAFWSLVXLGSSFIPGEHFWLLLLXRGLVGVGEASYSXIAPXLIADLFVADQRSRMLSIFYFAIPVGSGLGYIAGSKVKDMAGDWHWALRPSVSQVXPGLGVVAVLLLFLVVREPPRGAVERHSDLPPLNPXSWWADLRALARNPSFVLSSLGFXAVAFVXGSLALWAPAFLLRSRVVLGEXPPCLPGDSCSSSDSLIFGLIXCLXGVLGVGLGVEISRRLRHSNPRADPLVCAXGLLGSAPFLFLSLACARGSIVAXYIFIFIGEXLLSMNWAIVADILLYVVIPXRRSXAEAFQIVLSHLLGDAGSPYLIGLACCXKQGPQXXGLWCPSGAAPPACPWPVCSSERLPLXYLHICHSWPWAHPXKGLGLXPWPGPASRGXLGRVPAPRHYLGSSGEEVGVQEGDPSPQGQPQGLGAI

SEQ ID NO: 26228 - protein, 274 aa, Homo sapiens
  MOD_RES (1)..(1): Any amino acid
  MOD_RES (9)..(9): Selenocysteine
  MOD_RES (16)..(16): Selenocysteine
  MOD_RES (36)..(36): Selenocysteine
  MOD_RES (63)..(63): Selenocysteine
  MOD_RES (87)..(87): Selenocysteine
  MOD_RES (124)..(124): Selenocysteine
  MOD_RES (141)..(141): Selenocysteine
  MOD_RES (154)..(154): Selenocysteine
  MOD_RES (158)..(158): Selenocysteine
  MOD_RES (247)..(247): Selenocysteine
XDDGPVPGXPGLPGSXGNPKSEEPEVPDQEGLQRIXGLSPGRSALIVAVLCYINLLNYMDRFXVAGVLPDIEQFFNIGDSSSGLIQXVFISSYMVLAPVFGYLGDRYNRKYLMCGGIAFWSLVXLGSSFIPGEHFWLLLLXRGLVGVGEASYSXIAPXLIADLFVADQRSRMLSIFYFAIPVGSGLGYIAGSKVKDMAGDWHWALRISDRLRRNWPPSFLSEFRALQFSLMLCAFVGALGGAAFLGXAIFIEADRRRAQLHVQGQLGAVPGPAS

SEQ ID NO: 26229 - protein, 179 aa, Homo sapiens
  MOD_RES (1)..(1): Any amino acid
  MOD_RES (27)..(27): Selenocysteine
  MOD_RES (44)..(44): Selenocysteine
  MOD_RES (64)..(64): Selenocysteine
  MOD_RES (68)..(68): Selenocysteine
  MOD_RES (132)..(132): Selenocysteine
  MOD_RES (157)..(157): Selenocysteine
  MOD_RES (170)..(170): Selenocysteine
XVFGYLGDRYNRKYLMCGGIAFWSLVXLGSSFIPGEIFIFIGEXLLSMNWAIVADILLYVVIPXRRSXAEAFQIVLSHLLGDAGSPYLIGLISDRLRRNWPPSFLSEFRALQFSLMLCAFVGALGGAAFLGXAIFIEADRRRAQLHVQGLLHEAGSXDDRIVVPQRGRSXRVPVASVLI

SEQ ID NO: 26230 - protein, 282 aa, Homo sapiens
  MOD_RES (19)..(19): Selenocysteine
  MOD_RES (22)..(22): Selenocysteine
  MOD_RES (40)..(40): Selenocysteine
  MOD_RES (43)..(43): Selenocysteine
  MOD_RES (50)..(50): Selenocysteine
  MOD_RES (55)..(55): Selenocysteine
  MOD_RES (62)..(62): Selenocysteine
  MOD_RES (104)..(104): Selenocysteine
  MOD_RES (113)..(113): Selenocysteine
  MOD_RES (124)..(124): Selenocysteine
  MOD_RES (128)..(128): Selenocysteine
  MOD_RES (136)..(136): Selenocysteine
  MOD_RES (176)..(176): Selenocysteine
  MOD_RES (205)..(205): Selenocysteine
  MOD_RES (227)..(227): Selenocysteine
  MOD_RES (237)..(237): Selenocysteine
ALGMWIPLYLHRAQVVQKXAEXCNSPPCGAKDSLIFGAIXCFXGFLGVVXGAGAXRWCRLKXQRADPLVCAVGMLGSAIFICLIFVAAKSSIVGAYICIFVGEXLLFSNWAIXADILMYVVIPXRRAXAVALQSFXSHLLGDAGSPYLIGFGEPAGDAARICESLRWCHWDNEEPXLPPRLGGVLQRPGPAGLPQSFLCDPRLGXHPLWPRPAEWPWHQEEAVSSVXLEGCVCWSHXVGQVPSPRFGPQGPWGQGRRQPQVGVRGEPGLPPAYVILGKSLPS

SEQ ID NO: 26231 - protein, 549 aa, Homo sapiens
  MOD_RES (59)..(59): Selenocysteine
  MOD_RES (69)..(69): Selenocysteine
  MOD_RES (74)..(74): Selenocysteine
  MOD_RES (77)..(77): Selenocysteine
  MOD_RES (83)..(83): Selenocysteine
  MOD_RES (121)..(121): Selenocysteine
  MOD_RES (182)..(182): Selenocysteine
  MOD_RES (212)..(212): Selenocysteine
  MOD_RES (216)..(216): Selenocysteine
  MOD_RES (223)..(223): Selenocysteine
  MOD_RES (226)..(226): Selenocysteine
  MOD_RES (228)..(228): Selenocysteine
  MOD_RES (248)..(248): Selenocysteine
  MOD_RES (273)..(273): Selenocysteine
  MOD_RES (275)..(275): Selenocysteine
  MOD_RES (284)..(284): Selenocysteine
  MOD_RES (300)..(300): Selenocysteine
  MOD_RES (322)..(322): Selenocysteine
  MOD_RES (329)..(329): Selenocysteine
  MOD_RES (349)..(349): Selenocysteine
  MOD_RES (352)..(352): Selenocysteine
  MOD_RES (370)..(370): Selenocysteine
  MOD_RES (373)..(373): Selenocysteine
  MOD_RES (380)..(380): Selenocysteine
  MOD_RES (385)..(385): Selenocysteine
  MOD_RES (392)..(392): Selenocysteine
  MOD_RES (434)..(434): Selenocysteine
  MOD_RES (443)..(443): Selenocysteine
  MOD_RES (454)..(454): Selenocysteine
  MOD_RES (458)..(458): Selenocysteine
  MOD_RES (466)..(466): Selenocysteine
  MOD_RES (490)..(490): Selenocysteine
  MOD_RES (522)..(522): Selenocysteine
MMCLECASAAAGGAEEEEADAERRRRRRGAQRGAGGSGCCGARGAGGAGVSAAGDEVQXLSGSVRRAPXGPPGXPGXPGCAAXAKGPGAQQPKPASLGRGRGAAAAILSLGNVLNYLDRYXVAGVLLDIQQHFGVKDRGAGLLQSVFICSFMVAAPIFGYLGDRFNRKVILSCGIFFWSAVXFSSSFIPQQYFWLLVLSRGLVGIGEASYSXIAPXIIGDLFXKNXRXLMLSVFYFAIPLGSGLGYIXGSSVKQAAGDWHWALRVSPVLGMIXGXLILILVPAXKRGHADQLGDQLKARXSWLRDMKALIRNRSYVFSSLAXSAVSFAXGALGMWIPLYLHRAQVVQKXAEXCNSPPCGAKDSLIFGAIXCFXGFLGVVXGAGAXRWCRLKXQRADPLVCAVGMLGSAIFICLIFVAAKSSIVGAYICIFVGEXLLFSNWAIXADILMYVVIPXRRAXAVALQSFXSHLLGDAGSPYLIGFISDLIRQSXKDSPLWEFLSLGYALMLCPFVVVLGGMFFLAXALFFVSDRARAEQQVNQLAMPPASVKV

SEQ ID NO: 26232 - protein, 202 aa, Homo sapiens
  MOD_RES (33)..(33): Selenocysteine
  MOD_RES (35)..(35): Selenocysteine
  MOD_RES (88)..(88): Selenocysteine
  MOD_RES (182)..(182): Selenocysteine
  MOD_RES (189)..(189): Selenocysteine
MAGGMSAECPEPGPGGLQGQSPGPGRQCPPPIXPXSWSLPPWRAYVAAAVLCYINLLNYMNWFIIAGVLLDIQEVFQISDNHAGLLQXVFLALLPVPGHRGHWLGQLLHHRAHRPGRPLREGPAHPRAGCLLHLYPRWKWSGLRAGVGCDDADWELALGPPSHALPGGRGLDPAYPAGSRPXPGSCRDXGGGGRGRLQEQLV

SEQ ID NO: 26233 - protein, 512 aa, Homo sapiens
  MOD_RES (33)..(33): Selenocysteine
  MOD_RES (35)..(35): Selenocysteine
  MOD_RES (88)..(88): Selenocysteine
  MOD_RES (113)..(113): Selenocysteine
  MOD_RES (148)..(148): Selenocysteine
  MOD_RES (155)..(155): Selenocysteine
  MOD_RES (159)..(159): Selenocysteine
  MOD_RES (171)..(171): Selenocysteine
  MOD_RES (196)..(196): Selenocysteine
  MOD_RES (199)..(199): Selenocysteine
  MOD_RES (234)..(234): Selenocysteine
  MOD_RES (264)..(264): Selenocysteine
  MOD_RES (268)..(268): Selenocysteine
  MOD_RES (274)..(274): Selenocysteine
  MOD_RES (315)..(315): Selenocysteine
  MOD_RES (318)..(318): Selenocysteine
  MOD_RES (352)..(352): Selenocysteine
  MOD_RES (365)..(366): Selenocysteine
  MOD_RES (403)..(403): Selenocysteine
  MOD_RES (410)..(410): Selenocysteine
  MOD_RES (424)..(424): Selenocysteine
  MOD_RES (467)..(467): Selenocysteine
  MOD_RES (476)..(476): Selenocysteine
  MOD_RES (483)..(483): Selenocysteine
  MOD_RES (485)..(485): Selenocysteine
  MOD_RES (509)..(509): Selenocysteine
MAGGMSAECPEPGPGGLQGQSPGPGRQCPPPIXPXSWSLPPWRAYVAAAVLCYINLLNYMNWFIIAGVLLDIQEVFQISDNHAGLLQXVFVSCLLLSAPVFGYLGDRHSRKAXMSFGILLWSGAGLSSSFISPRYSWLFFLSRGIVGXGSASYSXIAPXVLGDLFVRDQRXRVLAVFYIFIPVGSGLGYVLGSAVXMLXGNWRWALRVMPCLEAVALILLILLVPDPPRGAAEXQGEGAVGGFRSSWCEDVRYLGKNWSFVWSXLGVXAMAFVXGALGFWAPKFLLEARVVHGLQPPCFQEPCSNPDSLIFGALXIMXGVIGVILGAEAARRYKKVIPGAEPLICASSLLAXAPCLYLALVLAPXXLLASYVFLGLGELLLSCNWAVVADILLSVVVPRCRGXAEALQIXVGHILGDAGSPYLXGLISSVLRARRPDSYLQRFRSLQQSFLCCAFVIALGGGCFLLXALYLERDEXRAWQPVXGXPDSNDVDSNDLERQGLLSGAGASXEEP

SEQ ID NO: 26234 - protein, 377 aa, Homo sapiens
  MOD_RES (37)..(37): Selenocysteine
  MOD_RES (42)..(42): Selenocysteine
  MOD_RES (94)..(94): Selenocysteine
  MOD_RES (106)..(106): Selenocysteine
  MOD_RES (112)..(112): Selenocysteine
  MOD_RES (137)..(137): Selenocysteine
  MOD_RES (166)..(166): Selenocysteine
  MOD_RES (170)..(170): Selenocysteine
  MOD_RES (177)..(177): Selenocysteine
  MOD_RES (284)..(284): Selenocysteine
  MOD_RES (290)..(290): Selenocysteine
  MOD_RES (320)..(320): Selenocysteine
  MOD_RES (355)..(355): Selenocysteine
  MOD_RES (359)..(359): Selenocysteine
DDYFRNWNPNKPFDQALDPSKDPCLKVKCSPHKVCVXQDYQXALCVSRKHLLPRQKKGNVAQKHWVGPSNLVKCKPCPVAQSAMVCGSDGHSYXSKCKLEFHACSXGKSLAXLCDGPCPCLPEPEPPKHKAERSACXDKELRNLASRLKDWFGALHEDANRVIKPXSSNXAQGRFDXSILPICKDSLGWMFNKLDMNYDLLLDPSEINAIYLDKYEPCIKPLFNSCDSFKDGKLSNNEWCYCFQKPGGLPCQNEMNRIQKLSKGKSLLGAFIPRCNEEGYYKAXQCHGSXGQCWCVDKYGNELAGSRKQGAVSCEEEQEXSGDFGSGGSVVLLDDLEYERELGPKDKEGKLRVHXRAVXEDDEDEDDDKEDEVGYIW

SEQ ID NO: 26235 - protein, 139 aa, Homo sapiens
  MOD_RES (47)..(47): Selenocysteine
  MOD_RES (99)..(99): Selenocysteine
  MOD_RES (104)..(104): Selenocysteine
MPAIAVLAAAAAAWCFLQVESRHLDALAGGAGPNHGNFLDNDQWLSXVSQYDRDKYWNRFRDDDYFRNWNPNKPFDQALDPSKDPCLKVKCSPHKVCVXQDYQXALCVSRKHLLPRQKKGNVAQKHWVGPSNLVKCKPC

SEQ ID NO: 26236 - protein, 439 aa, Homo sapiens
  MOD_RES (47)..(47): Selenocysteine
  MOD_RES (99)..(99): Selenocysteine
  MOD_RES (104)..(104): Selenocysteine
  MOD_RES (156)..(156): Selenocysteine
  MOD_RES (168)..(168): Selenocysteine
  MOD_RES (174)..(174): Selenocysteine
  MOD_RES (199)..(199): Selenocysteine
  MOD_RES (228)..(228): Selenocysteine
  MOD_RES (232)..(232): Selenocysteine
  MOD_RES (239)..(239): Selenocysteine
  MOD_RES (346)..(346): Selenocysteine
  MOD_RES (352)..(352): Selenocysteine
  MOD_RES (382)..(382): Selenocysteine
  MOD_RES (417)..(417): Selenocysteine
  MOD_RES (421)..(421): Selenocysteine
MPAIAVLAAAAAAWCFLQVESRHLDALAGGAGPNHGNFLDNDQWLSXVSQYDRDKYWNRFRDDDYFRNWNPNKPFDQALDPSKDPCLKVKCSPHKVCVXQDYQXALCVSRKHLLPRQKKGNVAQKHWVGPSNLVKCKPCPVAQSAMVCGSDGHSYXSKCKLEFHACSXGKSLAXLCDGPCPCLPEPEPPKHKAERSACXDKELRNLASRLKDWFGALHEDANRVIKPXSSNXAQGRFDXSILPICKDSLGWMFNKLDMNYDLLLDPSEINAIYLDKYEPCIKPLFNSCDSFKDGKLSNNEWCYCFQKPGGLPCQNEMNRIQKLSKGKSLLGAFIPRCNEEGYYKAXQCHGSXGQCWCVDKYGNELAGSRKQGAVSCEEEQEXSGDFGSGGSVVLLDDLEYERELGPKDKEGKLRVHXRAVXEDDEDEDDDKEDEVGYIW

SEQ ID NO: 26237 - protein, 67 aa, Homo sapiens
  MOD_RES (11)..(11): Selenocysteine
  MOD_RES (23)..(23): Selenocysteine
  MOD_RES (29)..(29): Selenocysteine
  MOD_RES (54)..(54): Selenocysteine
MVCGSDGHSYXSKCKLEFHACSXGKSLAXLCDGPCPCLPEPEPPKHKAERSACXDKELRNLASRLKD

SEQ ID NO: 26238 - protein, 424 aa, Homo sapiens
  MOD_RES (34)..(34): Selenocysteine
  MOD_RES (85)..(86): Selenocysteine
  MOD_RES (125)..(125): Selenocysteine
  MOD_RES (154)..(154): Selenocysteine
  MOD_RES (184)..(184): Selenocysteine
  MOD_RES (189)..(189): Selenocysteine
  MOD_RES (191)..(191): Selenocysteine
  MOD_RES (198)..(198): Selenocysteine
  MOD_RES (200)..(200): Selenocysteine
  MOD_RES (259)..(259): Selenocysteine
  MOD_RES (268)..(268): Selenocysteine
  MOD_RES (291)..(291): Selenocysteine
  MOD_RES (299)..(299): Selenocysteine
  MOD_RES (366)..(366): Selenocysteine
  MOD_RES (368)..(368): Selenocysteine
  MOD_RES (370)..(370): Selenocysteine
  MOD_RES (400)..(400): Selenocysteine
MRAPGCGRLVLPLLLLAAAALAEGDAKGLKEGEXPGNFMEDEQWLSSISQYSGKIKHWNRFRDEVEDDYIKSWEDNQQGDEALDXXKDPCQKVKCSRHKVCIAQGYQRAMCISRKKLEHRIKQPXVKLHGNKDSICKPCHMAQLASVCGSDGHXYSSVCKLEQQACLSSKQLAVRCEGPCPCPXEQAAXSXADGKPEXCXGQDLADLGDRLRDWFQLLHENSKQNGSASSVAGPASGLDKSLGASCKDSIGWMFSKLDXSADLFLDQXELAAINLDKYEVCIRPFFNSCDXYKDGRVSXAEWCFCFWREKPPCLAELERIQIQEAAKKKPGIFIPSCDEDGYYRKMQCDQSSGDCWCVDQLGLELXGXRXHGSPDCDDIVGFSGDFGSGVGWEDEEEKEXEEAGEEAEEEEGEAGEADDGGYIW

SEQ ID NO: 26239 - protein, 423 aa, Homo sapiens
  MOD_RES (34)..(34): Selenocysteine
  MOD_RES (84)..(85): Selenocysteine
  MOD_RES (124)..(124): Selenocysteine
  MOD_RES (153)..(153): Selenocysteine
  MOD_RES (183)..(183): Selenocysteine
  MOD_RES (188)..(188): Selenocysteine
  MOD_RES (190)..(190): Selenocysteine
  MOD_RES (197)..(197): Selenocysteine
  MOD_RES (199)..(199): Selenocysteine
  MOD_RES (258)..(258): Selenocysteine
  MOD_RES (267)..(267): Selenocysteine
  MOD_RES (290)..(290): Selenocysteine
  MOD_RES (298)..(298): Selenocysteine
  MOD_RES (365)..(365): Selenocysteine
  MOD_RES (367)..(367): Selenocysteine
  MOD_RES (369)..(369): Selenocysteine
  MOD_RES (399)..(399): Selenocysteine
MRAPGCGRLVLPLLLLAAAALAEGDAKGLKEGEXPGNFMEDEQWLSSISQYSGKIKHWNRFRDVKDDYIKSWEDNQQGDEALDXXKDPCQKVKCSRHKVCIAQGYQRAMCISRKKLEHRIKQPXVKLHGNKDSICKPCHMAQLASVCGSDGHXYSSVCKLEQQACLSSKQLAVRCEGPCPCPXEQAAXSXADGKPEXCXGQDLADLGDRLRDWFQLLHENSKQNGSASSVAGPASGLDKSLGASCKDSIGWMFSKLDXSADLFLDQXELAAINLDKYEVCIRPFFNSCDXYKDGRVSXAEWCFCFWREKPPCLAELERIQIQEAAKKKPGIFIPSCDEDGYYRKMQCDQSSGDCWCVDQLGLELXGXRXHGSPDCDDIVGFSGDFGSGVGWEDEEEKEXEEAGEEAEEEEGEAGEADDGGYIW

SEQ ID NO: 26240 - protein, 77 aa, Homo sapiens
  MOD_RES (34)..(34): Selenocysteine
  MOD_RES (72)..(73): Selenocysteine
  MOD_RES (76)..(76): Selenocysteine
MRAPGCGRLVLPLLLLAAAALAEGDAKGLKEGEXPGNFMEDEQWLSSISQYSGKIKHWNRFRDVPSSDPPSXXQAXP

SEQ ID NO: 26241 - protein, 385 aa, Homo sapiens
  MOD_RES (3)..(3): Selenocysteine
  MOD_RES (21)..(21): Selenocysteine
  MOD_RES (57)..(57): Selenocysteine
  MOD_RES (67)..(67): Selenocysteine
  MOD_RES (87)..(87): Selenocysteine
  MOD_RES (106)..(106): Selenocysteine
  MOD_RES (140)..(140): Selenocysteine
  MOD_RES (142)..(142): Selenocysteine
  MOD_RES (179)..(179): Selenocysteine
  MOD_RES (181)..(181): Selenocysteine
  MOD_RES (192)..(192): Selenocysteine
  MOD_RES (211)..(211): Selenocysteine
  MOD_RES (234)..(234): Selenocysteine
  MOD_RES (243)..(243): Selenocysteine
  MOD_RES (268)..(268): Selenocysteine
  MOD_RES (299)..(299): Selenocysteine
  MOD_RES (348)..(348): Selenocysteine
MIXQDHIHMSSGLSQDDYFRXWSPGKPFDQALDPAKDPCLKMKCSRHKVCIAQDSQXAVCISHRRLXHRMKEAGVDHRQWRGPILSXCKQCPVVYPSPVCGSDGHXYSFQCKLEYQACVLGKQISVKCEGHCPCPSDKPXSXSRNVKRACSDLEFREVANRLRDWFKALHESGSQNKKXKXLLRPERSRFDXSILPICKDSLGWMFNRLDXNYDLLLDQSELRSIYLDKNEQCXKAFFNSCDXYKDSLISNNEWCYCFQRQQDPPCQXELSNIQKRQGVKKLLGQYIPLCDEDGYYKPXQCHGSVGQCWCVDRYGNEVMGSRINGVADCAIDFEISGDFASGDFHEWXDDEDDEDDIMNDEDEIEDDDEDEGDDDDGGDDHDVYI

SEQ ID NO: 26242 - protein, 344 aa, Homo sapiens
  MOD_RES (16)..(16): Selenocysteine
  MOD_RES (26)..(26): Selenocysteine
  MOD_RES (46)..(46): Selenocysteine
  MOD_RES (65)..(65): Selenocysteine
  MOD_RES (99)..(99): Selenocysteine
  MOD_RES (101)..(101): Selenocysteine
  MOD_RES (138)..(138): Selenocysteine
  MOD_RES (140)..(140): Selenocysteine
  MOD_RES (151)..(151): Selenocysteine
  MOD_RES (170)..(170): Selenocysteine
  MOD_RES (193)..(193): Selenocysteine
  MOD_RES (202)..(202): Selenocysteine
  MOD_RES (227)..(227): Selenocysteine
  MOD_RES (258)..(258): Selenocysteine
  MOD_RES (307)..(307): Selenocysteine
MKCSRHKVCIAQDSQXAVCISHRRLXHRMKEAGVDHRQWRGPILSXCKQCPVVYPSPVCGSDGHXYSFQCKLEYQACVLGKQISVKCEGHCPCPSDKPXSXSRNVKRACSDLEFREVANRLRDWFKALHESGSQNKKXKXLLRPERSRFDXSILPICKDSLGWMFNRLDXNYDLLLDQSELRSIYLDKNEQCXKAFFNSCDXYKDSLISNNEWCYCFQRQQDPPCQXELSNIQKRQGVKKLLGQYIPLCDEDGYYKPXQCHGSVGQCWCVDRYGNEVMGSRINGVADCAIDFEISGDFASGDFHEWXDDEDDEDDIMNDEDEIEDDDEDEGDDDDGGDDHDVYI

SEQ ID NO: 26243 - protein, 316 aa, Homo sapiens
  MOD_RES (18)..(18): Selenocysteine
  MOD_RES (37)..(37): Selenocysteine
  MOD_RES (71)..(71): Selenocysteine
  MOD_RES (73)..(73): Selenocysteine
  MOD_RES (110)..(110): Selenocysteine
  MOD_RES (112)..(112): Selenocysteine
  MOD_RES (123)..(123): Selenocysteine
  MOD_RES (142)..(142): Selenocysteine
  MOD_RES (165)..(165): Selenocysteine
  MOD_RES (174)..(174): Selenocysteine
  MOD_RES (199)..(199): Selenocysteine
  MOD_RES (230)..(230): Selenocysteine
  MOD_RES (279)..(279): Selenocysteine
MKEAGVDHRQWRGPILSXCKQCPVVYPSPVCGSDGHXYSFQCKLEYQACVLGKQISVKCEGHCPCPSDKPXSXSRNVKRACSDLEFREVANRLRDWFKALHESGSQNKKXKXLLRPERSRFDXSILPICKDSLGWMFNRLDXNYDLLLDQSELRSIYLDKNEQCXKAFFNSCDXYKDSLISNNEWCYCFQRQQDPPCQXELSNIQKRQGVKKLLGQYIPLCDEDGYYKPXQCHGSVGQCWCVDRYGNEVMGSRINGVADCAIDFEISGDFASGDFHEWXDDEDDEDDIMNDEDEIEDDDEDEGDDDDGGDDHDVYI

SEQ ID NO: 26244 - protein, 63 aa, Homo sapiens
  MOD_RES (46)..(47): Selenocysteine
MLKVSAVLCVCAAAWCSQSLAAAAAVAAAGGRSDGGNFLDDKQWLXXISQYDKEVGQWNKFRD

SEQ ID NO: 26245 - protein, 338 aa, Homo sapiens
  MOD_RES (46)..(47): Selenocysteine
  MOD_RES (93)..(93): Selenocysteine
  MOD_RES (95)..(95): Selenocysteine
  MOD_RES (132)..(132): Selenocysteine
  MOD_RES (134)..(134): Selenocysteine
  MOD_RES (145)..(145): Selenocysteine
  MOD_RES (164)..(164): Selenocysteine
  MOD_RES (187)..(187): Selenocysteine
  MOD_RES (196)..(196): Selenocysteine
  MOD_RES (221)..(221): Selenocysteine
  MOD_RES (252)..(252): Selenocysteine
  MOD_RES (301)..(301): Selenocysteine
MLKVSAVLCVCAAAWCSQSLAAAAAVAAAGGRSDGGNFLDDKQWLXXISQYDKEVGQWNKFRDCKLEYQACVLGKQISVKCEGHCPCPSDKPXSXSRNVKRACSDLEFREVANRLRDWFKALHESGSQNKKXKXLLRPERSRFDXSILPICKDSLGWMFNRLDXNYDLLLDQSELRSIYLDKNEQCXKAFFNSCDXYKDSLISNNEWCYCFQRQQDPPCQXELSNIQKRQGVKKLLGQYIPLCDEDGYYKPXQCHGSVGQCWCVDRYGNEVMGSRINGVADCAIDFEISGDFASGDFHEWXDDEDDEDDIMNDEDEIEDDDEDEGDDDDGGDDHDVYI

SEQ ID NO: 26246 - protein, 173 aa, Homo sapiens
  MOD_RES (46)..(47): Selenocysteine
  MOD_RES (69)..(69): Selenocysteine
  MOD_RES (109)..(109): Selenocysteine
  MOD_RES (111)..(111): Selenocysteine
  MOD_RES (122)..(122): Selenocysteine
  MOD_RES (141)..(141): Selenocysteine
  MOD_RES (164)..(164): Selenocysteine
  MOD_RES (173)..(173): Selenocysteine
MLKVSAVLCVCAAAWCSQSLAAAAAVAAAGGRSDGGNFLDDKQWLXXISQYDKEVGQWNKFRDDDYFRXWSPGKPFDQACSDLEFREVANRLRDWFKALHESGSQNKKXKXLLRPERSRFDXSILPICKDSLGWMFNRLDXNYDLLLDQSELRSIYLDKNEQCXKAFFNSCDX

SEQ ID NO: 26247 - protein, 161 aa, Homo sapiens
  MOD_RES (46)..(47): Selenocysteine
  MOD_RES (69)..(69): Selenocysteine
  MOD_RES (105)..(105): Selenocysteine
  MOD_RES (115)..(115): Selenocysteine
  MOD_RES (135)..(135): Selenocysteine
  MOD_RES (154)..(154): Selenocysteine
MLKVSAVLCVCAAAWCSQSLAAAAAVAAAGGRSDGGNFLDDKQWLXXISQYDKEVGQWNKFRDDDYFRXWSPGKPFDQALDPAKDPCLKMKCSRHKVCIAQDSQXAVCISHRRLXHRMKEAGVDHRQWRGPILSXCKQCPVVYPSPVCGSDGHXYSFQCKL

SEQ ID NO: 26248 - protein, 313 aa, Homo sapiens
  MOD_RES (46)..(47): Selenocysteine
  MOD_RES (69)..(69): Selenocysteine
  MOD_RES (105)..(105): Selenocysteine
  MOD_RES (115)..(115): Selenocysteine
  MOD_RES (135)..(135): Selenocysteine
  MOD_RES (154)..(154): Selenocysteine
  MOD_RES (188)..(188): Selenocysteine
  MOD_RES (190)..(190): Selenocysteine
  MOD_RES (227)..(227): Selenocysteine
  MOD_RES (229)..(229): Selenocysteine
  MOD_RES (240)..(240): Selenocysteine
  MOD_RES (259)..(259): Selenocysteine
  MOD_RES (282)..(282): Selenocysteine
  MOD_RES (291)..(291): Selenocysteine
MLKVSAVLCVCAAAWCSQSLAAAAAVAAAGGRSDGGNFLDDKQWLXXISQYDKEVGQWNKFRDDDYFRXWSPGKPFDQALDPAKDPCLKMKCSRHKVCIAQDSQXAVCISHRRLXHRMKEAGVDHRQWRGPILSXCKQCPVVYPSPVCGSDGHXYSFQCKLEYQACVLGKQISVKCEGHCPCPSDKPXSXSRNVKRACSDLEFREVANRLRDWFKALHESGSQNKKXKXLLRPERSRFDXSILPICKDSLGWMFNRLDXNYDLLLDQSELRSIYLDKNEQCXKAFFNSCDXYKDSLISNNEWCYCFQRQQGKR

SEQ ID NO: 26249 - protein, 433 aa, Homo sapiens
  MOD_RES (46)..(47): Selenocysteine
  MOD_RES (69)..(69): Selenocysteine
  MOD_RES (105)..(105): Selenocysteine
  MOD_RES (115)..(115): Selenocysteine
  MOD_RES (135)..(135): Selenocysteine
  MOD_RES (154)..(154): Selenocysteine
  MOD_RES (188)..(188): Selenocysteine
  MOD_RES (190)..(190): Selenocysteine
  MOD_RES (227)..(227): Selenocysteine
  MOD_RES (229)..(229): Selenocysteine
  MOD_RES (240)..(240): Selenocysteine
  MOD_RES (259)..(259): Selenocysteine
  MOD_RES (282)..(282): Selenocysteine
  MOD_RES (291)..(291): Selenocysteine
  MOD_RES (316)..(316): Selenocysteine
  MOD_RES (347)..(347): Selenocysteine
  MOD_RES (396)..(396): Selenocysteine
MLKVSAVLCVCAAAWCSQSLAAAAAVAAAGGRSDGGNFLDDKQWLXXISQYDKEVGQWNKFRDDDYFRXWSPGKPFDQALDPAKDPCLKMKCSRHKVCIAQDSQXAVCISHRRLXHRMKEAGVDHRQWRGPILSXCKQCPVVYPSPVCGSDGHXYSFQCKLEYQACVLGKQISVKCEGHCPCPSDKPXSXSRNVKRACSDLEFREVANRLRDWFKALHESGSQNKKXKXLLRPERSRFDXSILPICKDSLGWMFNRLDXNYDLLLDQSELRSIYLDKNEQCXKAFFNSCDXYKDSLISNNEWCYCFQRQQDPPCQXELSNIQKRQGVKKLLGQYIPLCDEDGYYKPXQCHGSVGQCWCVDRYGNEVMGSRINGVADCAIDFEISGDFASGDFHEWXDDEDDEDDIMNDEDEIEDDDEDEGDDDDGGDDHDVYI

SEQ ID NO: 26250 - protein, 393 aa, Homo sapiens
  MOD_RES (46)..(47): Selenocysteine
  MOD_RES (69)..(69): Selenocysteine
  MOD_RES (105)..(105): Selenocysteine
  MOD_RES (115)..(115): Selenocysteine
  MOD_RES (135)..(135): Selenocysteine
  MOD_RES (154)..(154): Selenocysteine
  MOD_RES (188)..(188): Selenocysteine
  MOD_RES (190)..(190): Selenocysteine
  MOD_RES (200)..(200): Selenocysteine
  MOD_RES (219)..(219): Selenocysteine
  MOD_RES (242)..(242): Selenocysteine
  MOD_RES (251)..(251): Selenocysteine
  MOD_RES (276)..(276): Selenocysteine
  MOD_RES (307)..(307): Selenocysteine
  MOD_RES (356)..(356): Selenocysteine
MLKVSAVLCVCAAAWCSQSLAAAAAVAAAGGRSDGGNFLDDKQWLXXISQYDKEVGQWNKFRDDDYFRXWSPGKPFDQALDPAKDPCLKMKCSRHKVCIAQDSQXAVCISHRRLXHRMKEAGVDHRQWRGPILSXCKQCPVVYPSPVCGSDGHXYSFQCKLEYQACVLGKQISVKCEGHCPCPSDKPXSXSRNVKRGFDXSILPICKDSLGWMFNRLDXNYDLLLDQSELRSIYLDKNEQCXKAFFNSCDXYKDSLISNNEWCYCFQRQQDPPCQXELSNIQKRQGVKKLLGQYIPLCDEDGYYKPXQCHGSVGQCWCVDRYGNEVMGSRINGVADCAIDFEISGDFASGDFHEWXDDEDDEDDIMNDEDEIEDDDEDEGDDDDGGDDHDVYI

SEQ ID NO: 26251 - protein, 89 aa, Homo sapiens
  MOD_RES (46)..(47): Selenocysteine
  MOD_RES (69)..(69): Selenocysteine
MLKVSAVLCVCAAAWCSQSLAAAAAVAAAGGRSDGGNFLDDKQWLXXISQYDKEVGQWNKFRDDDYFRXWSPGKPFDQALSFHDLGIFV

SEQ ID NO: 26252 - protein, 79 aa, Homo sapiens
  MOD_RES (46)..(47): Selenocysteine
  MOD_RES (69)..(69): Selenocysteine
MLKVSAVLCVCAAAWCSQSLAAAAAVAAAGGRSDGGNFLDDKQWLXXISQYDKEVGQWNKFRDDDYFRXWSPGKPFDQG

SEQ ID NO: 26253 - protein, 71 aa, Homo sapiens
  MOD_RES (46)..(47): Selenocysteine
MLKVSAVLCVCAAAWCSQSLAAAAAVAAAGGRSDGGNFLDDKQWLXXISQYDKEVGQWNKFRDDERSRSRP

SEQ ID NO: 26254 - protein, 115 aa, Homo sapiens
  MOD_RES (46)..(47): Selenocysteine
  MOD_RES (72)..(72): Selenocysteine
  MOD_RES (108)..(108): Selenocysteine
MLKVSAVLCVCAAAWCSQSLAAAAAVAAAGGRSDGGNFLDDKQWLXXISQYDKEVGQWNKFRDEVEDDYFRXWSPGKPFDQALDPAKDPCLKMKCSRHKVCIAQDSQXAVCISHR

SEQ ID NO: 26255 - protein, 436 aa, Homo sapiens
  MOD_RES (46)..(47): Selenocysteine
  MOD_RES (72)..(72): Selenocysteine
  MOD_RES (108)..(108): Selenocysteine
  MOD_RES (118)..(118): Selenocysteine
  MOD_RES (138)..(138): Selenocysteine
  MOD_RES (157)..(157): Selenocysteine
  MOD_RES (191)..(191): Selenocysteine
  MOD_RES (193)..(193): Selenocysteine
  MOD_RES (230)..(230): Selenocysteine
  MOD_RES (232)..(232): Selenocysteine
  MOD_RES (243)..(243): Selenocysteine
  MOD_RES (262)..(262): Selenocysteine
  MOD_RES (285)..(285): Selenocysteine
  MOD_RES (294)..(294): Selenocysteine
  MOD_RES (319)..(319): Selenocysteine
  MOD_RES (350)..(350): Selenocysteine
  MOD_RES (399)..(399): Selenocysteine
MLKVSAVLCVCAAAWCSQSLAAAAAVAAAGGRSDGGNFLDDKQWLXXISQYDKEVGQWNKFRDEVEDDYFRXWSPGKPFDQALDPAKDPCLKMKCSRHKVCIAQDSQXAVCISHRRLXHRMKEAGVDHRQWRGPILSXCKQCPVVYPSPVCGSDGHXYSFQCKLEYQACVLGKQISVKCEGHCPCPSDKPXSXSRNVKRACSDLEFREVANRLRDWFKALHESGSQNKKXKXLLRPERSRFDXSILPICKDSLGWMFNRLDXNYDLLLDQSELRSIYLDKNEQCXKAFFNSCDXYKDSLISNNEWCYCFQRQQDPPCQXELSNIQKRQGVKKLLGQYIPLCDEDGYYKPXQCHGSVGQCWCVDRYGNEVMGSRINGVADCAIDFEISGDFASGDFHEWXDDEDDEDDIMNDEDEIEDDDEDEGDDDDGGDDHDVYI

SEQ ID NO: 26256 - protein, 122 aa, Homo sapiens
  MOD_RES (46)..(47): Selenocysteine
  MOD_RES (72)..(72): Selenocysteine
  MOD_RES (108)..(108): Selenocysteine
  MOD_RES (118)..(118): Selenocysteine
MLKVSAVLCVCAAAWCSQSLAAAAAVAAAGGRSDGGNFLDDKQWLXXISQYDKEVGQWNKFRDEVEDDYFRXWSPGKPFDQALDPAKDPCLKMKCSRHKVCIAQDSQXAVCISHRRLXHSAN

SEQ ID NO: 26257 - protein, 64 aa, Homo sapiens
  MOD_RES (46)..(47): Selenocysteine
MLKVSAVLCVCAAAWCSQSLAAAAAVAAAGGRSDGGNFLDDKQWLXXISQYDKEVGQWNKFRDL

SEQ ID NO: 26258 - protein, 83 aa, Homo sapiens
  MOD_RES (10)..(11): Selenocysteine
  MOD_RES (33)..(33): Selenocysteine
  MOD_RES (69)..(69): Selenocysteine
  MOD_RES (79)..(79): Selenocysteine
NFLDDKQWLXXISQYDKEVGQWNKFRDDDYFRXWSPGKPFDQALDPAKDPCLKMKCSRHKVCIAQDSQXAVCISHRRLXHSAN

SEQ ID NO: 26259 - protein, 520 aa, Homo sapiens
  MOD_RES (23)..(23): Selenocysteine
  MOD_RES (37)..(38): Selenocysteine
  MOD_RES (50)..(50): Selenocysteine
  MOD_RES (55)..(55): Selenocysteine
  MOD_RES (60)..(60): Selenocysteine
  MOD_RES (68)..(68): Selenocysteine
  MOD_RES (70)..(70): Selenocysteine
  MOD_RES (151)..(151): Selenocysteine
  MOD_RES (157)..(157): Selenocysteine
  MOD_RES (171)..(171): Selenocysteine
  MOD_RES (182)..(182): Selenocysteine
  MOD_RES (202)..(203): Selenocysteine
  MOD_RES (217)..(217): Selenocysteine
  MOD_RES (222)..(222): Selenocysteine
  MOD_RES (277)..(277): Selenocysteine
  MOD_RES (331)..(331): Selenocysteine
  MOD_RES (358)..(358): Selenocysteine
  MOD_RES (362)..(362): Selenocysteine
  MOD_RES (430)..(430): Selenocysteine
  MOD_RES (441)..(441): Selenocysteine
  MOD_RES (451)..(451): Selenocysteine
  MOD_RES (472)..(472): Selenocysteine
  MOD_RES (475)..(475): Selenocysteine
  MOD_RES (505)..(505): Selenocysteine
MGPQRRLSPAGAALLWGFLLQLXAAQEAILHASGNGXXKDYCMLYNPYWXALPSXLENAXSISLMNLXSXPLCNLSDIPPVGIKSKAVVVPWGSCHFLEKARIAQKGGAEAMLVVNNSVLFPPSGNRSEFPDVKILIAFISYKDFRDMNQXLGDNIXVKMYSPSWPNFDYXMVVIFVIAVFXVALGGYWSGLVELENLKAVXXEDREMRKKKEEYLXFSPLXVVIFVVICCVMMVLLYFFYKWLVYVMIAIFCIASAMSLYNCLAALIHKIPYGQCXIACRGKNMEVRLIFLSGLCIAVAVVWAVFRNEDRWAWILQDILGIAFCLNLIKXLKLPNFKSCVILLGLLLLYDVFFVFIXPFIXKNGESIMVELAAGPFGNNEKLPVVIRVPKLIYFSVMSVCLMPVSILGFGDIIVPGLLIAYCRRFDVQXGSSYIYYVSSXVAYAIGMILXFVVLVLMKKGQPALLYLVPCXLIXASVVAWRRKEMKKFWKGNSYQMMDHLDCAXNEENPVISGEQIVQQ

SEQ ID NO: 26260 - protein, 150 aa, Homo sapiens
  MOD_RES (8)..(8): Selenocysteine
  MOD_RES (13)..(13): Selenocysteine
  MOD_RES (18)..(18): Selenocysteine
  MOD_RES (26)..(26): Selenocysteine
  MOD_RES (28)..(28): Selenocysteine
  MOD_RES (109)..(109): Selenocysteine
  MOD_RES (115)..(115): Selenocysteine
  MOD_RES (129)..(129): Selenocysteine
  MOD_RES (140)..(140): Selenocysteine
MLYNPYWXALPSXLENAXSISLMNLXSXPLCNLSDIPPVGIKSKAVVVPWGSCHFLEKARIAQKGGAEAMLVVNNSVLFPPSGNRSEFPDVKILIAFISYKDFRDMNQXLGDNIXVKMYSPSWPNFDYXMVVIFVIAVFXVALGGYWSGL

SEQ ID NO: 26261 - protein, 356 aa, Homo sapiens
  MOD_RES (1)..(1): Any amino acid
  MOD_RES (20)..(21): Selenocysteine
  MOD_RES (35)..(35): Selenocysteine
  MOD_RES (40)..(40): Selenocysteine
  MOD_RES (95)..(95): Selenocysteine
  MOD_RES (149)..(149): Selenocysteine
  MOD_RES (176)..(176): Selenocysteine
  MOD_RES (180)..(180): Selenocysteine
  MOD_RES (209)..(209): Selenocysteine
  MOD_RES (266)..(266): Selenocysteine
  MOD_RES (277)..(277): Selenocysteine
  MOD_RES (287)..(287): Selenocysteine
  MOD_RES (308)..(308): Selenocysteine
  MOD_RES (311)..(311): Selenocysteine
  MOD_RES (341)..(341): Selenocysteine
XALGGYWSGLVELENLKAVXXEDREMRKKKEEYLXFSPLXVVIFVVICCVMMVLLYFFYKWLVYVMIAIFCIASAMSLYNCLAALIHKIPYGQCXIACRGKNMEVRLIFLSGLCIAVAVVWAVFRNEDRWAWILQDILGIAFCLNLIKXLKLPNFKSCVILLGLLLLYDVFFVFIXPFIXKNGESIMVELAAGPFGNNEKNDGNLVEAXGQPSAPHEKLPVVIRVPKLIYFSVMSVCLMPVSILGFGDIIVPGLLIAYCRRFDVQXGSSYIYYVSSXVAYAIGMILXFVVLVLMKKGQPALLYLVPCXLIXASVVAWRRKEMKKFWKGNSYQMMDHLDCAXNEENPVISGEQIVQQ

SEQ ID NO: 26262 - protein, 81 aa, Homo sapiens
  MOD_RES (73)..(73): Selenocysteine
MAAAVAAALARLLAAFLLLAAQVACEYGMVHVVSQAGGPEGKDYCILYNPQWAHLPHDLSKAMPGRGGAAVGXHLVLLSDL

SEQ ID NO: 26263 - protein, 139 aa, Homo sapiens
  MOD_RES (71)..(71): Selenocysteine
  MOD_RES (99)..(99): Selenocysteine
MAAAVAAALARLLAAFLLLAAQVACEYGMVHVVSQAGGPEGKDYCILYNPQWAHLPHDLSKASFLQLRNWXASLLCSAADLPARGFSNQIPLVARGNCXFYEKVRLAQGSGARGLLIVSRERLLQRHAGHLHGSVSAAR

SEQ ID NO: 26264 - protein, 319 aa, Homo sapiens
  MOD_RES (71)..(71): Selenocysteine
  MOD_RES (99)..(99): Selenocysteine
  MOD_RES (131)..(131): Selenocysteine
  MOD_RES (153)..(153): Selenocysteine
  MOD_RES (158)..(158): Selenocysteine
  MOD_RES (185)..(185): Selenocysteine
  MOD_RES (222)..(222): Selenocysteine
  MOD_RES (226)..(226): Selenocysteine
  MOD_RES (261)..(261): Selenocysteine
MAAAVAAALARLLAAFLLLAAQVACEYGMVHVVSQAGGPEGKDYCILYNPQWAHLPHDLSKASFLQLRNWXASLLCSAADLPARGFSNQIPLVARGNCXFYEKVRLAQGSGARGLLIVSRERLVPPGGNKXQYDEIGIPVALLSYKDMLDIFXRFGRXVRAALYAPKEPVLDYNMVIIFIMAVGXVAIGGYWAGSRDVKKRYMKHKRDDGPEKQEDEAVDVXPVMXCVFVVMCCSMLVLLYYFYDLLVYVVIGIFCLASAXGLYSCLAPCVRRLPFGKCRIPNNSLPYFHKRPQARMLLLALFCVAVSVVWGVFRNEDQ

SEQ ID NO: 26265 - protein, 511 aa, Homo sapiens
  MOD_RES (71)..(71): Selenocysteine
  MOD_RES (99)..(99): Selenocysteine
  MOD_RES (131)..(131): Selenocysteine
  MOD_RES (153)..(153): Selenocysteine
  MOD_RES (158)..(158): Selenocysteine
  MOD_RES (185)..(185): Selenocysteine
  MOD_RES (222)..(222): Selenocysteine
  MOD_RES (226)..(226): Selenocysteine
  MOD_RES (261)..(261): Selenocysteine
  MOD_RES (339)..(339): Selenocysteine
  MOD_RES (344)..(344): Selenocysteine
  MOD_RES (349)..(349): Selenocysteine
  MOD_RES (366)..(366): Selenocysteine
  MOD_RES (370)..(370): Selenocysteine
  MOD_RES (382)..(382): Selenocysteine
  MOD_RES (389)..(389): Selenocysteine
  MOD_RES (450)..(450): Selenocysteine
  MOD_RES (460)..(460): Selenocysteine
  MOD_RES (481)..(481): Selenocysteine
  MOD_RES (484)..(484): Selenocysteine
  MOD_RES (500)..(500): Selenocysteine
  MOD_RES (508)..(508): Selenocysteine
MAAAVAAALARLLAAFLLLAAQVACEYGMVHVVSQAGGPEGKDYCILYNPQWAHLPHDLSKASFLQLRNWXASLLCSAADLPARGFSNQIPLVARGNCXFYEKVRLAQGSGARGLLIVSRERLVPPGGNKXQYDEIGIPVALLSYKDMLDIFXRFGRXVRAALYAPKEPVLDYNMVIIFIMAVGXVAIGGYWAGSRDVKKRYMKHKRDDGPEKQEDEAVDVXPVMXCVFVVMCCSMLVLLYYFYDLLVYVVIGIFCLASAXGLYSCLAPCVRRLPFGKCRIPNNSLPYFHKRPQARMLLLALFCVAVSVVWGVFRNEDQWAWVLQDALGIAFCLYMLKXIRLPXFKACXLLLLVLFLYDIFFVFIXPFLXKSGSSIMVEVAXGPSDSAXREKLPMVLKVPRLNSSPLALCDRPFSLLGFGDILVPGLLVAYCHRFDIQVQSSRVYFVACXIAYGVGLLVXFVALALMQRGQPALLYLVPCXLVXSCAVALWRRELGVFWXGSGFAVNXSLL

SEQ ID NO: 26266 - protein, 592 aa, Homo sapiens
  MOD_RES (71)..(71): Selenocysteine
  MOD_RES (99)..(99): Selenocysteine
  MOD_RES (131)..(131): Selenocysteine
  MOD_RES (153)..(153): Selenocysteine
  MOD_RES (158)..(158): Selenocysteine
  MOD_RES (185)..(185): Selenocysteine
  MOD_RES (222)..(222): Selenocysteine
  MOD_RES (226)..(226): Selenocysteine
  MOD_RES (261)..(261): Selenocysteine
  MOD_RES (339)..(339): Selenocysteine
  MOD_RES (344)..(344): Selenocysteine
  MOD_RES (349)..(349): Selenocysteine
  MOD_RES (366)..(366): Selenocysteine
  MOD_RES (370)..(370): Selenocysteine
  MOD_RES (382)..(382): Selenocysteine
  MOD_RES (389)..(389): Selenocysteine
  MOD_RES (450)..(450): Selenocysteine
  MOD_RES (460)..(460): Selenocysteine
  MOD_RES (481)..(481): Selenocysteine
  MOD_RES (484)..(484): Selenocysteine
  MOD_RES (500)..(500): Selenocysteine
  MOD_RES (529)..(529): Selenocysteine
  MOD_RES (542)..(542): Selenocysteine
  MOD_RES (555)..(555): Selenocysteine
  MOD_RES (586)..(586): Selenocysteine
MAAAVAAALARLLAAFLLLAAQVACEYGMVHVVSQAGGPEGKDYCILYNPQWAHLPHDLSKASFLQLRNWXASLLCSAADLPARGFSNQIPLVARGNCXFYEKVRLAQGSGARGLLIVSRERLVPPGGNKXQYDEIGIPVALLSYKDMLDIFXRFGRXVRAALYAPKEPVLDYNMVIIFIMAVGXVAIGGYWAGSRDVKKRYMKHKRDDGPEKQEDEAVDVXPVMXCVFVVMCCSMLVLLYYFYDLLVYVVIGIFCLASAXGLYSCLAPCVRRLPFGKCRIPNNSLPYFHKRPQARMLLLALFCVAVSVVWGVFRNEDQWAWVLQDALGIAFCLYMLKXIRLPXFKACXLLLLVLFLYDIFFVFIXPFLXKSGSSIMVEVAXGPSDSAXREKLPMVLKVPRLNSSPLALCDRPFSLLGFGDILVPGLLVAYCHRFDIQVQSSRVYFVACXIAYGVGLLVXFVALALMQRGQPALLYLVPCXLVXSCAVALWRRELGVFWXGSGFAKVLPPSPWAPAPADGPQPPKDSAXPLSPQPPSEEPAXSPWPAEQSPKSRXSEEMGAGAPMREPGSPAESEGRDQAQPSPVXQPGASA

SEQ ID NO: 26267 - protein, 291 aa, Homo sapiens
  MOD_RES (43)..(43): Selenocysteine
  MOD_RES (71)..(71): Selenocysteine
  MOD_RES (103)..(103): Selenocysteine
  MOD_RES (125)..(125): Selenocysteine
  MOD_RES (130)..(130): Selenocysteine
  MOD_RES (157)..(157): Selenocysteine
  MOD_RES (194)..(194): Selenocysteine
  MOD_RES (198)..(198): Selenocysteine
  MOD_RES (233)..(233): Selenocysteine
MVHVVSQAGGPEGKDYCILYNPQWAHLPHDLSKASFLQLRNWXASLLCSAADLPARGFSNQIPLVARGNCXFYEKVRLAQGSGARGLLIVSRERLVPPGGNKXQYDEIGIPVALLSYKDMLDIFXRFGRXVRAALYAPKEPVLDYNMVIIFIMAVGXVAIGGYWAGSRDVKKRYMKHKRDDGPEKQEDEAVDVXPVMXCVFVVMCCSMLVLLYYFYDLLVYVVIGIFCLASAXGLYSCLAPCVRRLPFGKCRIPNNSLPYFHKRPQARMLLLALFCVAVSVVWGVFRNEDQ

SEQ ID NO: 26268 - protein, 166 aa, Homo sapiens
  MOD_RES (1)..(1): Any amino acid
  MOD_RES (3)..(3): Selenocysteine
  MOD_RES (39)..(39): Selenocysteine
  MOD_RES (43)..(43): Selenocysteine
  MOD_RES (78)..(78): Selenocysteine
  MOD_RES (156)..(156): Selenocysteine
  MOD_RES (161)..(161): Selenocysteine
  MOD_RES (166)..(166): Selenocysteine
XGXVAIGGYWAGSRDVKKYMKHKRDDGPEKQEDEAVDVXPVMXCVFVVMCCSMLVLLYYFYDLLVYVVIGIFCLASAXGLYSCLAPCVRRLPFGKCRIPNNSLPYFHKRPQARMLLLALFCVAVSVVWGVFRNEDQWAWVLQDALGIAFCLYMLKXIRLPXFKACX

SEQ ID NO: 26269 - protein, 684 aa, Homo sapiens
  MOD_RES (18)..(18): Selenocysteine
  MOD_RES (48)..(48): Selenocysteine
  MOD_RES (65)..(65): Selenocysteine
  MOD_RES (92)..(93): Selenocysteine
  MOD_RES (105)..(105): Selenocysteine
  MOD_RES (132)..(133): Selenocysteine
  MOD_RES (147)..(147): Selenocysteine
  MOD_RES (165)..(165): Selenocysteine
  MOD_RES (197)..(197): Selenocysteine
  MOD_RES (208)..(208): Selenocysteine
  MOD_RES (252)..(252): Selenocysteine
  MOD_RES (256)..(256): Selenocysteine
  MOD_RES (261)..(261): Selenocysteine
  MOD_RES (281)..(281): Selenocysteine
  MOD_RES (333)..(333): Selenocysteine
  MOD_RES (354)..(354): Selenocysteine
  MOD_RES (371)..(371): Selenocysteine
  MOD_RES (393)..(393): Selenocysteine
  MOD_RES (397)..(397): Selenocysteine
  MOD_RES (399)..(399): Selenocysteine
  MOD_RES (435)..(435): Selenocysteine
  MOD_RES (477)..(477): Selenocysteine
  MOD_RES (487)..(487): Selenocysteine
  MOD_RES (508)..(508): Selenocysteine
  MOD_RES (511)..(511): Selenocysteine
  MOD_RES (527)..(527): Selenocysteine
  MOD_RES (557)..(557): Selenocysteine
  MOD_RES (560)..(560): Selenocysteine
  MOD_RES (565)..(565): Selenocysteine
  MOD_RES (580)..(581): Selenocysteine
  MOD_RES (585)..(585): Selenocysteine
  MOD_RES (592)..(592): Selenocysteine
  MOD_RES (659)..(659): Selenocysteine
  MOD_RES (680)..(680): Selenocysteine
MACLGFLLPVGFLLLISXVAGGKYGVAHVVSENWSKDYCILFSSDYIXLPRDLHHAPLLPLYDGXKAPWCPGEDSPHQAQLRSPSQRPLRQXXAMVMRGNCSFHXKGWLAQGQGAHGLLIVSRVSDQQCSDXXLAPQDPRQPLADLXIPVAMLHYADMLDILSHXRGEAVVRVAMYAPPEPIIDYNMLVIFILAVGXVAAGGYWAGLXEANRLQRRRARRGGGSGGHHQLQEAAAAEGAQKEDNEDIPVDFXPAMXGVVVXLSCSLMLLLYFFYDHFVYVXIGIFGLGAGIGLYSCLSPLVCRLSLRQYQRPPHSLWASLPLPLLLLASLCAXVIIFWVAYRNEDRWAWLLQDXLGISYCLFVLHRVRLPXLKNCSSFLLALLAFDVFFVFVXPFFXKXGESIMAQVALGPAESSSHERLPMVLKVPRLRVSALXLCSQPFSILGFGDIVVPGFLVAYCCRFDVQVCSRQIYFVACXVAYAVGLLVXFMAMVLMQMGQPALLYLVSSXLLXSLAVAACRQELSLFWXGQGRAKMCGLGCAPSAGSRQKQEGAADAHXASXLERGXSRGAGDLDSNPGEDXXEIVXISENEAXNPEDRSDSSEGWSDAHLDPNELPFIPPGASEELMPLMPMAMLIPLMPLMPPPSELGHVHAQAQAHEXGLPWAGLHKRKGLKVRKSMSXQAPL

SEQ ID NO: 26270 - protein, 384 aa, Homo sapiens
  MOD_RES (5)..(5): Selenocysteine
  MOD_RES (20)..(20): Selenocysteine
  MOD_RES (61)..(61): Selenocysteine
  MOD_RES (67)..(67): Selenocysteine
  MOD_RES (71)..(71): Selenocysteine
  MOD_RES (99)..(99): Selenocysteine
  MOD_RES (102)..(102): Selenocysteine
  MOD_RES (107)..(107): Selenocysteine
  MOD_RES (122)..(122): Selenocysteine
  MOD_RES (140)..(140): Selenocysteine
  MOD_RES (160)..(160): Selenocysteine
  MOD_RES (221)..(221): Selenocysteine
  MOD_RES (260)..(260): Selenocysteine
  MOD_RES (318)..(318): Selenocysteine
  MOD_RES (328)..(328): Selenocysteine
  MOD_RES (330)..(330): Selenocysteine
  MOD_RES (350)..(350): Selenocysteine
  MOD_RES (356)..(356): Selenocysteine
MAEQXYSWAYSLVDSSQVSXFLISILLIVYGSFRSLNMDFENQDKEKDSNSSSGSFNGNSXNNSIQXIDSXQALFLPIGASVSLLVMFFFFDSVQVVFXICXAVLAXIAFAFLLLPMCQYLXRPCSPQNKISFGCCGRFXAAELLSFSLSVMLVLIWVLXGHWLLMDALAMGLCVAMIAFVRLPSLKVSCLLLSGLLIYDVFWVFFSAYIFNSNVMVKVAXQPADNPLDVLSRKLHLGPNVGRDVPRLSLPGKLVFPSSXGSHFSMLGIGDIVMPGLLLCFVLRYDNYKKQASGDSCGAPGPANISGRMQKVSYFHCXLIGYFVGLLXAXVASRIHRAAQPALLYLVPFXLLPLLXMAYLKGDLRRMWSEPFHSKSSSSRFLEV

SEQ ID NO: 26271 - protein, 66 aa, Homo sapiens
  MOD_RES (24)..(24): Selenocysteine
  MOD_RES (30)..(30): Selenocysteine
  MOD_RES (34)..(34): Selenocysteine
  MOD_RES (62)..(62): Selenocysteine
  MOD_RES (65)..(65): Selenocysteine
MDFENQDKEKDSNSSSGSFNGNSXNNSIQXIDSXQALFLPIGASVSLLVMFFFFDSVQVVFXICXA

SEQ ID NO: 26272 - protein, 118 aa, Homo sapiens
  MOD_RES (24)..(24): Selenocysteine
  MOD_RES (30)..(30): Selenocysteine
  MOD_RES (34)..(34): Selenocysteine
  MOD_RES (62)..(62): Selenocysteine
  MOD_RES (65)..(65): Selenocysteine
  MOD_RES (70)..(70): Selenocysteine
  MOD_RES (85)..(85): Selenocysteine
  MOD_RES (103)..(103): Selenocysteine
MDFENQDKEKDSNSSSGSFNGNSXNNSIQXIDSXQALFLPIGASVSLLVMFFFFDSVQVVFXICXAVLAXIAFAFLLLPMCQYLXRPCSPQNKISFGCCGRFXAAELLSFSLSVMLVL

SEQ ID NO: 26273 - protein, 164 aa, Homo sapiens
  MOD_RES (24)..(24): Selenocysteine
  MOD_RES (30)..(30): Selenocysteine
  MOD_RES (34)..(34): Selenocysteine
  MOD_RES (62)..(62): Selenocysteine
  MOD_RES (65)..(65): Selenocysteine
  MOD_RES (70)..(70): Selenocysteine
  MOD_RES (85)..(85): Selenocysteine
  MOD_RES (103)..(103): Selenocysteine
  MOD_RES (123)..(123): Selenocysteine
MDFENQDKEKDSNSSSGSFNGNSXNNSIQXIDSXQALFLPIGASVSLLVMFFFFDSVQVVFXICXAVLAXIAFAFLLLPMCQYLXRPCSPQNKISFGCCGRFXAAELLSFSLSVMLVLIWVLXGHWLLMDALAMGLCVAMIAFVRLPSLKVSCLLLSGLLIYDV

SEQ ID NO: 26274 - protein, 183 aa, Homo sapiens
  MOD_RES (24)..(24): Selenocysteine
  MOD_RES (30)..(30): Selenocysteine
  MOD_RES (34)..(34): Selenocysteine
  MOD_RES (62)..(62): Selenocysteine
  MOD_RES (65)..(65): Selenocysteine
  MOD_RES (70)..(70): Selenocysteine
  MOD_RES (85)..(85): Selenocysteine
  MOD_RES (103)..(103): Selenocysteine
  MOD_RES (123)..(123): Selenocysteine
MDFENQDKEKDSNSSSGSFNGNSXNNSIQXIDSXQALFLPIGASVSLLVMFFFFDSVQVVFXICXAVLAXIAFAFLLLPMCQYLXRPCSPQNKISFGCCGRFXAAELLSFSLSVMLVLIWVLXGHWLLMDALAMGLCVAMIAFVRLPSLKVSCLLLSGLLIYDVFWVFFSAYIFNSNVMVKVA

SEQ ID NO: 26275 - protein, 102 aa, Homo sapiens
  MOD_RES (13)..(13): Selenocysteine
  MOD_RES (16)..(16): Selenocysteine
  MOD_RES (21)..(21): Selenocysteine
  MOD_RES (36)..(36): Selenocysteine
  MOD_RES (54)..(54): Selenocysteine
  MOD_RES (74)..(74): Selenocysteine
MFFFFDSVQVVFXICXAVLAXIAFAFLLLPMCQYLXRPCSPQNKISFGCCGRFXAAELLSFSLSVMLVLIWVLXGHWLLMDALAMGLCVAMIAFVRLPSLKV

SEQ ID NO: 26276 - protein, 444 aa, Homo sapiens
  MOD_RES (5)..(5): Selenocysteine
  MOD_RES (7)..(7): Selenocysteine
  MOD_RES (23)..(23): Selenocysteine
  MOD_RES (43)..(43): Selenocysteine
  MOD_RES (86)..(86): Selenocysteine
  MOD_RES (88)..(88): Selenocysteine
  MOD_RES (102)..(102): Selenocysteine
  MOD_RES (161)..(161): Selenocysteine
  MOD_RES (164)..(164): Selenocysteine
  MOD_RES (196)..(196): Selenocysteine
  MOD_RES (300)..(300): Selenocysteine
  MOD_RES (313)..(313): Selenocysteine
  MOD_RES (395)..(395): Selenocysteine
MSEEXAXSDNDNSYARVRAVVMXRDDSSGGWLPLGGSGLSSVXVFKVPHQEENGCADFFIRGERLRDKMVVLECMLKKDLIYNKVXPXFHHWKIDDKKFGLXFQSPADARAFDRGIRRAIEDISQGCPESKNEAEGADDLQANEEDSSSSLVKDHLFQQEXVVXSEPYRSSNIRPSPFEDLNARRVYMQSQANQIXFGQPGLDIQSRSMEYVQRQISKECGSLKSQNRVPLKSIRHVSFQDEDEIVRINPRDILIRRYADYRHPDMWKNDLERDDADSSIQFSKPDSKKSDYLYSCGDEXKLSSPKDSVVFKXQPSSLKIKKSKRRKEDGERSRCVYCQERFNHEENVRGKCQDAPDPIKRCIYQVSCMLCAESMLYHCMSDSEGDFSDPCSCDXSDDKFCLRWLALVALSFIVPCMCCYVPLRMCHRCGEACGCCGGKHKAAG

SEQ ID NO: 26277 - protein, 131 aa, Homo sapiens
  MOD_RES (2)..(2): Selenocysteine
  MOD_RES (22)..(22): Selenocysteine
  MOD_RES (65)..(65): Selenocysteine
  MOD_RES (67)..(67): Selenocysteine
  MOD_RES (81)..(81): Selenocysteine
MXRDDSSGGWLPLGGSGLSSVXVFKVPHQEENGCADFFIRGERLRDKMVVLECMLKKDLIYNKVXPXFHHWKIDDKKFGLXFQSPADARAFDRGIRRAIEDISQGCPESKNEAEGADDLQANEEDSSSSLV

SEQ ID NO: 26278 - protein, 103 aa, Homo sapiens
  MOD_RES (41)..(41): Selenocysteine
  MOD_RES (46)..(46): Selenocysteine
  MOD_RES (60)..(60): Selenocysteine
  MOD_RES (100)..(100): Selenocysteine
GVCKVMHPEGNGRSGFLIHGERQKDKLVVLECYVRKDLVYXKANPXFHHWKVDNRKFGLXFQSPADARAFDRGVRKAIEDLIEEVENGFWRAQKAPGLPXVLL

SEQ ID NO: 26279 - protein, 433 aa, Homo sapiens
  MOD_RES (37)..(37): Selenocysteine
  MOD_RES (97)..(97): Selenocysteine
  MOD_RES (102)..(102): Selenocysteine
  MOD_RES (116)..(116): Selenocysteine
  MOD_RES (142)..(143): Selenocysteine
  MOD_RES (147)..(147): Selenocysteine
  MOD_RES (161)..(162): Selenocysteine
  MOD_RES (164)..(164): Selenocysteine
  MOD_RES (178)..(178): Selenocysteine
  MOD_RES (180)..(180): Selenocysteine
  MOD_RES (185)..(185): Selenocysteine
  MOD_RES (194)..(194): Selenocysteine
  MOD_RES (204)..(204): Selenocysteine
  MOD_RES (241)..(241): Selenocysteine
  MOD_RES (305)..(305): Selenocysteine
  MOD_RES (350)..(350): Selenocysteine
  MOD_RES (377)..(377): Selenocysteine
  MOD_RES (384)..(384): Selenocysteine
MALCSLISSWASGFRSDDDQERRGDSYIVRVKAVVMXRDDSSGGWFPQEGGGISRVGVCKVMHPEGNGRSGFLIHGERQKDKLVVLECYVRKDLVYXKANPXFHHWKVDNRKFGLXFQSPADARAFDRGVRKAIEDLIEGSXXSSSXIHNEAELGDDDVFXXAXDSSSNSSQKREQPXRXISSPXSCEHRRIYXLGHLHDSYPXDHYHLDQPMPRPYRQVSFPDDDEEIVRINPREKIWMXGYEDYRHAPVRGKYPDPSEDADSSYVRFAKGEVPKHDYNYPYVDSSDFGLGEDPKGRGGSVIKXQPSRGKSRRRKEDGERSRCVYCRDMFNHEENRRGHCQDAPDSVRXCIRRVSCMWCADSMLYHCMSDPEGDYXDPCSCDXSDEKFCLRWMALIALSFLAPCMCCYLPLRACYHCGVMCRCCGGKHKAAA

SEQ ID NO: 26280 - protein, 415 aa, Homo sapiens
  MOD_RES (19)..(19): Selenocysteine
  MOD_RES (79)..(79): Selenocysteine
  MOD_RES (84)..(84): Selenocysteine
  MOD_RES (98)..(98): Selenocysteine
  MOD_RES (124)..(125): Selenocysteine
  MOD_RES (129)..(129): Selenocysteine
  MOD_RES (143)..(144): Selenocysteine
  MOD_RES (146)..(146): Selenocysteine
  MOD_RES (160)..(160): Selenocysteine
  MOD_RES (162)..(162): Selenocysteine
  MOD_RES (167)..(167): Selenocysteine
  MOD_RES (176)..(176): Selenocysteine
  MOD_RES (186)..(186): Selenocysteine
  MOD_RES (223)..(223): Selenocysteine
  MOD_RES (287)..(287): Selenocysteine
  MOD_RES (332)..(332): Selenocysteine
  MOD_RES (359)..(359): Selenocysteine
  MOD_RES (366)..(366): Selenocysteine
MASPGSDSYIVRVKAVVMXRDDSSGGWFPQEGGGISRVGVCKVMHPEGNGRSGFLIHGERQKDKLVVLECYVRKDLVYXKANPXFHHWKVDNRKFGLXFQSPADARAFDRGVRKAIEDLIEGSXXSSSXIHNEAELGDDDVFXXAXDSSSNSSQKREQPXRXISSPXSCEHRRIYXLGHLHDSYPXDHYHLDQPMPRPYRQVSFPDDDEEIVRINPREKIWMXGYEDYRHAPVRGKYPDPSEDADSSYVRFAKGEVPKHDYNYPYVDSSDFGLGEDPKGRGGSVIKXQPSRGKSRRRKEDGERSRCVYCRDMFNHEENRRGHCQDAPDSVRXCIRRVSCMWCADSMLYHCMSDPEGDYXDPCSCDXSDEKFCLRWMALIALSFLAPCMCCYLPLRACYHCGVMCRCCGGKHKAAA

SEQ ID NO: 26281 - protein, 116 aa, Homo sapiens
  MOD_RES (2)..(2): Selenocysteine
  MOD_RES (5)..(5): Selenocysteine
  MOD_RES (22)..(22): Selenocysteine
  MOD_RES (82)..(82): Selenocysteine
  MOD_RES (87)..(87): Selenocysteine
  MOD_RES (101)..(101): Selenocysteine
MXEEXHPDDDSYIVRVKAVVMXRDDSSGGWFPQEGGGISRVGVCKVMHPEGNGRSGFLIHGERQKDKLVVLECYVRKDLVYXKANPXFHHWKVDNRKFGLXFQSPADARAFDRGVR

SEQ ID NO: 26282 - protein, 418 aa, Homo sapiens
  MOD_RES (2)..(2): Selenocysteine
  MOD_RES (5)..(5): Selenocysteine
  MOD_RES (22)..(22): Selenocysteine
  MOD_RES (82)..(82): Selenocysteine
  MOD_RES (87)..(87): Selenocysteine
  MOD_RES (101)..(101): Selenocysteine
  MOD_RES (127)..(128): Selenocysteine
  MOD_RES (132)..(132): Selenocysteine
  MOD_RES (146)..(147): Selenocysteine
  MOD_RES (149)..(149): Selenocysteine
  MOD_RES (163)..(163): Selenocysteine
  MOD_RES (165)..(165): Selenocysteine
  MOD_RES (170)..(170): Selenocysteine
  MOD_RES (179)..(179): Selenocysteine
  MOD_RES (189)..(189): Selenocysteine
  MOD_RES (226)..(226): Selenocysteine
  MOD_RES (290)..(290): Selenocysteine
  MOD_RES (335)..(335): Selenocysteine
  MOD_RES (362)..(362): Selenocysteine
  MOD_RES (369)..(369): Selenocysteine
MXEEXHPDDDSYIVRVKAVVMXRDDSSGGWFPQEGGGISRVGVCKVMHPEGNGRSGFLIHGERQKDKLVVLECYVRKDLVYXKANPXFHHWKVDNRKFGLXFQSPADARAFDRGVRKAIEDLIEGSXXSSSXIHNEAELGDDDVFXXAXDSSSNSSQKREQPXRXISSPXSCEHRRIYXLGHLHDSYPXDHYHLDQPMPRPYRQVSFPDDDEEIVRINPREKIWMXGYEDYRHAPVRGKYPDPSEDADSSYVRFAKGEVPKHDYNYPYVDSSDFGLGEDPKGRGGSVIKXQPSRGKSRRRKEDGERSRCVYCRDMFNHEENRRGHCQDAPDSVRXCIRRVSCMWCADSMLYHCMSDPEGDYXDPCSCDXSDEKFCLRWMALIALSFLAPCMCCYLPLRACYHCGVMCRCCGGKHKAAA

SEQ ID NO: 26283 - protein, 233 aa, Homo sapiens
  MOD_RES (14)..(14): Selenocysteine
  MOD_RES (19)..(19): Selenocysteine
  MOD_RES (33)..(33): Selenocysteine
  MOD_RES (59)..(60): Selenocysteine
  MOD_RES (64)..(64): Selenocysteine
  MOD_RES (78)..(78): Selenocysteine
  MOD_RES (108)..(108): Selenocysteine
  MOD_RES (172)..(172): Selenocysteine
  MOD_RES (217)..(217): Selenocysteine
VVLECYVRKDLVYXKANPXFHHWKVDNRKFGLXFQSPADARAFDRGVRKAIEDLIEGSXXSSSXIHNEAELGDDDVFXPMPRPYRQVSFPDDDEEIVRINPREKIWMXGYEDYRHAPVRGKYPDPSEDADSSYVRFAKGEVPKHDYNYPYVDSSDFGLGEDPKGRGGSVIKXQPSRGKSRRRKEDGERSRCVYCRDMFNHEENRRGHCQDAPDSVRXCIRRVSCMWCADSMLY

SEQ ID NO: 26284 - protein, 47 aa, Homo sapiens
  MOD_RES (1)..(1): Any amino acid
XMHPEGNGRSGFLIHGERQKDKLLQKLEPRSWCQIVKRDCPFQQSLF

SEQ ID NO: 26285 - protein, 454 aa, Homo sapiens
  MOD_RES (33)..(33): Selenocysteine
  MOD_RES (54)..(54): Selenocysteine
  MOD_RES (104)..(105): Selenocysteine
  MOD_RES (109)..(109): Selenocysteine
  MOD_RES (136)..(136): Selenocysteine
  MOD_RES (163)..(163): Selenocysteine
  MOD_RES (177)..(177): Selenocysteine
  MOD_RES (180)..(180): Selenocysteine
  MOD_RES (185)..(185): Selenocysteine
  MOD_RES (201)..(201): Selenocysteine
  MOD_RES (212)..(212): Selenocysteine
  MOD_RES (222)..(223): Selenocysteine
  MOD_RES (242)..(242): Selenocysteine
  MOD_RES (280)..(280): Selenocysteine
  MOD_RES (288)..(288): Selenocysteine
  MOD_RES (307)..(307): Selenocysteine
MAQMGGKVGDPLWILRKWGLGGCSLELVPGSRXQQASKPASLLPLPQAAPSPPXRLPGSPSLPPRPGSRCPSPAPPEPAREPERKGGGGGRVAAARSPAGASQXXLECXLKPGLVYNKVNPIFHHWSLGDCKFGLXFQSPAEADEFQKSLLAALAALGRGSLXPSSSSSSSSPSQDXAEXPCPLXSHVDSDSSSSHSRQEXPPSAAAAPIIXMESASGFGPXXPPQRRRSSAQSYPPLLPFXGIPEPSEPLAGAGGLGWGGRGYEDYRRSGPPAPLALSXCVVRFAKXGALRGAALGPPAALPAPLXEAAPPAPPARPPPGPGPSSAPAKASPEAEEAARCVHCRALFRRRADGRGGRCAEAPDPGRLLVRRLSCLWCAESLLYHCLSDAEGDFSDPCACEPGHPRPAARWAALAALSLAVPCLCCYAPLRACHWVAARCGCAGCGGRHEEAAR

SEQ ID NO: 26286 - protein, 121 aa, Homo sapiens
  MOD_RES (29)..(30): Selenocysteine
  MOD_RES (34)..(34): Selenocysteine
  MOD_RES (61)..(61): Selenocysteine
  MOD_RES (88)..(88): Selenocysteine
  MOD_RES (102)..(102): Selenocysteine
  MOD_RES (105)..(105): Selenocysteine
  MOD_RES (110)..(110): Selenocysteine
MVRVRAVVMARDDSSGGWLPVGGGGLSQXXLECXLKPGLVYNKVNPIFHHWSLGDCKFGLXFQSPAEADEFQKSLLAALAALGRGSLXPSSSSSSSSPSQDXAEXPCPLXLSQYFRHMLCP

SEQ ID NO: 26287 - protein, 181 aa, Homo sapiens
  MOD_RES (60)..(61): Selenocysteine
  MOD_RES (65)..(65): Selenocysteine
  MOD_RES (92)..(92): Selenocysteine
  MOD_RES (119)..(119): Selenocysteine
  MOD_RES (133)..(133): Selenocysteine
  MOD_RES (136)..(136): Selenocysteine
  MOD_RES (141)..(141): Selenocysteine
  MOD_RES (157)..(157): Selenocysteine
  MOD_RES (168)..(168): Selenocysteine
  MOD_RES (178)..(179): Selenocysteine
MVRVRAVVMARDDSSGGWLPVGGGGLSQVSVCRVRGARPEGGARQGHYVIHGERLRDQKXXLECXLKPGLVYNKVNPIFHHWSLGDCKFGLXFQSPAEADEFQKSLLAALAALGRGSLXPSSSSSSSSPSQDXAEXPCPLXSHVDSDSSSSHSRQEXPPSAAAAPIIXMESASGFGPXXPP

SEQ ID NO: 26288 - protein, 410 aa, Homo sapiens
  MOD_RES (60)..(61): Selenocysteine
  MOD_RES (65)..(65): Selenocysteine
  MOD_RES (92)..(92): Selenocysteine
  MOD_RES (119)..(119): Selenocysteine
  MOD_RES (133)..(133): Selenocysteine
  MOD_RES (136)..(136): Selenocysteine
  MOD_RES (141)..(141): Selenocysteine
  MOD_RES (157)..(157): Selenocysteine
  MOD_RES (168)..(168): Selenocysteine
  MOD_RES (178)..(179): Selenocysteine
  MOD_RES (198)..(198): Selenocysteine
  MOD_RES (236)..(236): Selenocysteine
  MOD_RES (244)..(244): Selenocysteine
  MOD_RES (263)..(263): Selenocysteine
MVRVRAVVMARDDSSGGWLPVGGGGLSQVSVCRVRGARPEGGARQGHYVIHGERLRDQKXXLECXLKPGLVYNKVNPIFHHWSLGDCKFGLXFQSPAEADEFQKSLLAALAALGRGSLXPSSSSSSSSPSQDXAEXPCPLXSHVDSDSSSSHSRQEXPPSAAAAPIIXMESASGFGPXXPPQRRRSSAQSYPPLLPFXGIPEPSEPLAGAGGLGWGGRGYEDYRRSGPPAPLALSXCVVRFAKXGALRGAALGPPAALPAPLXEAAPPAPPARPPPGPGPSSAPAKASPEAEEAARCVHCRALFRRRADGRGGRCAEAPDPGRLLVRRLSCLWCAESLLYHCLSDAEGDFSDPCACEPGHPRPAARWAALAALSLAVPCLCCYAPLRACHWVAARCGCAGCGGRHEEAAR

SEQ ID NO: 26289 - protein, 35 aa, Homo sapiens
MDPQNQHGSGSSLVVIQQPSLDSRQRLDYEREIQP

SEQ ID NO: 26290 - protein, 67 aa, Homo sapiens
  MOD_RES (36)..(36): Selenocysteine
  MOD_RES (54)..(54): Selenocysteine
  MOD_RES (67)..(67): Selenocysteine
MDPQNQHGSGSSLVVIQQPSLDSRQRLDYEREIQPXAILSLDQIKAIRGSNEYXEGPSVVKRPAPRX

SEQ ID NO: 26291 - protein, 209 aa, Homo sapiens
  MOD_RES (36)..(36): Selenocysteine
  MOD_RES (54)..(54): Selenocysteine
  MOD_RES (67)..(67): Selenocysteine
  MOD_RES (77)..(77): Selenocysteine
  MOD_RES (94)..(94): Selenocysteine
  MOD_RES (115)..(115): Selenocysteine
  MOD_RES (117)..(117): Selenocysteine
  MOD_RES (142)..(142): Selenocysteine
  MOD_RES (156)..(156): Selenocysteine
  MOD_RES (175)..(175): Selenocysteine
  MOD_RES (193)..(193): Selenocysteine
  MOD_RES (197)..(197): Selenocysteine
MDPQNQHGSGSSLVVIQQPSLDSRQRLDYEREIQPXAILSLDQIKAIRGSNEYXEGPSVVKRPAPRXAPRQEKHERXHEIIPINVNNNYEHRHXSHLGHAVLPSNARGPILSRSXSXGSAASSGSNSSASSEQGLLGRSPPXRPVPGHRSERAIRXQPKQLIVDDLKGSLKEDLXQHKFICEQCGKCKCGECXAPRXLPSCLACNRQCL

SEQ ID NO: 26292 - protein, 319 aa, Homo sapiens
  MOD_RES (36)..(36): Selenocysteine
  MOD_RES (54)..(54): Selenocysteine
  MOD_RES (67)..(67): Selenocysteine
  MOD_RES (77)..(77): Selenocysteine
  MOD_RES (94)..(94): Selenocysteine
  MOD_RES (115)..(115): Selenocysteine
  MOD_RES (117)..(117): Selenocysteine
  MOD_RES (142)..(142): Selenocysteine
  MOD_RES (156)..(156): Selenocysteine
  MOD_RES (175)..(175): Selenocysteine
  MOD_RES (193)..(193): Selenocysteine
  MOD_RES (197)..(197): Selenocysteine
  MOD_RES (220)..(220): Selenocysteine
  MOD_RES (302)..(302): Selenocysteine
MDPQNQHGSGSSLVVIQQPSLDSRQRLDYEREIQPXAILSLDQIKAIRGSNEYXEGPSVVKRPAPRXAPRQEKHERXHEIIPINVNNNYEHRHXSHLGHAVLPSNARGPILSRSXSXGSAASSGSNSSASSEQGLLGRSPPXRPVPGHRSERAIRXQPKQLIVDDLKGSLKEDLXQHKFICEQCGKCKCGECXAPRXLPSCLACNRQCLCSAESMVEYGXCMCLVKGIFYHCSNDDEGDSYSDNPCSCSQSHCCSRYLCMGAMSLFLPCLLCYPPAKGCLKLCRRCYDWIHRPGCRCKNSNXVYCKLESCPSRGQGKPS

SEQ ID NO: 26293 - protein, 315 aa, Homo sapiens
  MOD_RES (17)..(17): Selenocysteine
  MOD_RES (35)..(35): Selenocysteine
  MOD_RES (52)..(52): Selenocysteine
  MOD_RES (56)..(56): Selenocysteine
  MOD_RES (60)..(60): Selenocysteine
  MOD_RES (75)..(75): Selenocysteine
  MOD_RES (113)..(113): Selenocysteine
  MOD_RES (122)..(122): Selenocysteine
  MOD_RES (124)..(124): Selenocysteine
  MOD_RES (126)..(126): Selenocysteine
  MOD_RES (190)..(190): Selenocysteine
  MOD_RES (217)..(217): Selenocysteine
  MOD_RES (251)..(251): Selenocysteine
  MOD_RES (298)..(298): Selenocysteine
  MOD_RES (305)..(305): Selenocysteine
  MOD_RES (315)..(315): Selenocysteine
MEARAQSGNGSQPLLQXPRDGGRQRGEPDPRDALXQQVHVLSLDQIRAIRNXNEYXEGPXVVPRPGLKPAPRPSXQHKHERLHGLPEHRQPPRLQHSQVHSSARAPLSRSISXVSSGSRSSXRXSXSSSSSEQRLLGSSFSSGPVADGIIRVQPKSELKPGELKPLSKEDLGLHAYRCEDCGKCKCKECXYPRPLPSDWICDKQCLCSAQNVIDYGXCVCCVKGLFYHCSNDDEDNCADNPCSCSQSHCCXRWSAMGVMSLFLPCLWCYLPAKGCLKLCQGCYDRVNRPGCRCKNSNXVCCKVPXVPPRNFEKPX

SEQ ID NO: 26294 - protein, 288 aa, Homo sapiens
  MOD_RES (6)..(6): Selenocysteine
  MOD_RES (21)..(21): Selenocysteine
  MOD_RES (48)..(48): Selenocysteine
  MOD_RES (57)..(57): Selenocysteine
  MOD_RES (60)..(60): Selenocysteine
  MOD_RES (92)..(93): Selenocysteine
  MOD_RES (104)..(104): Selenocysteine
  MOD_RES (115)..(115): Selenocysteine
  MOD_RES (159)..(159): Selenocysteine
  MOD_RES (186)..(186): Selenocysteine
  MOD_RES (200)..(200): Selenocysteine
  MOD_RES (241)..(241): Selenocysteine
  MOD_RES (266)..(266): Selenocysteine
  MOD_RES (268)..(268): Selenocysteine
MDAAVXDDFQQILPIEQLRSXHASNDYVERPPAPCKQALSSPSLIVQXHKSDWSLAXMPXSLPRSLSQCHQLQPLPQHLSQSSIASSMSHSXXASDQRLLASIXPSPSGQSIIRXQPGAGVHPKADGALKGEAEQSAGHPSEHLFICEECGRCKCVPCXAARPLPSCWLCNQRCLCSAESLLDYGXCLCCVKGLFYHCSXDDEDNCADEPCSCGPSSCFVRWAAMSLISLFLPCLCCYLPXRGCLHLCQQGYDSLRRPGCRCKRHXNXVCRKISSGSAPFPKAQEKSV

SEQ ID NO: 26295 - protein, 50 aa, Homo sapiens
  MOD_RES (12)..(12): Selenocysteine
  MOD_RES (36)..(36): Selenocysteine
  MOD_RES (45)..(45): Selenocysteine
MEPPIPQSAPLXPNSVMVQPLLDSRMSHSRLQHPLXILPIDQVKXSHVEN

SEQ ID NO: 26296 - protein, 299 aa, Homo sapiens
  MOD_RES (12)..(12): Selenocysteine
  MOD_RES (36)..(36): Selenocysteine
  MOD_RES (45)..(45): Selenocysteine
  MOD_RES (61)..(62): Selenocysteine
  MOD_RES (67)..(67): Selenocysteine
  MOD_RES (77)..(77): Selenocysteine
  MOD_RES (86)..(86): Selenocysteine
  MOD_RES (105)..(105): Selenocysteine
  MOD_RES (175)..(175): Selenocysteine
  MOD_RES (192)..(192): Selenocysteine
  MOD_RES (198)..(198): Selenocysteine
  MOD_RES (211)..(211): Selenocysteine
  MOD_RES (255)..(255): Selenocysteine
  MOD_RES (278)..(278): Selenocysteine
  MOD_RES (292)..(292): Selenocysteine
MEPPIPQSAPLXPNSVMVQPLLDSRMSHSRLQHPLXILPIDQVKXSHVENDYIDNPSLALXXGPKRXRGGAPELAPXPARCDQDVXHHWISFSGRPSSVSSSSSXSSDQRLLDHMAPPPVADQASPRAVRIQPKVVHCQPLDLKGPAVPPELDKHFLLCEACGKCKCKECASPRXLPSCWVCNQECLCSAQXLVNYGXCMCLVQGIFYHCXNEDDEGSCADHPCSCSRSNCCARWSFMGALSVVLPCLLCYLPAXGCVKLAQRGYDRLRRPGCRCKHXNSVICKAASGDAKXSRPDKPF

SEQ ID NO: 26297 - protein, 322 aa, Homo sapiens
  MOD_RES (7)..(7): Selenocysteine
  MOD_RES (20)..(20): Selenocysteine
  MOD_RES (35)..(35): Selenocysteine
  MOD_RES (59)..(59): Selenocysteine
  MOD_RES (68)..(68): Selenocysteine
  MOD_RES (84)..(85): Selenocysteine
  MOD_RES (90)..(90): Selenocysteine
  MOD_RES (100)..(100): Selenocysteine
  MOD_RES (109)..(109): Selenocysteine
  MOD_RES (128)..(128): Selenocysteine
  MOD_RES (198)..(198): Selenocysteine
  MOD_RES (215)..(215): Selenocysteine
  MOD_RES (221)..(221): Selenocysteine
  MOD_RES (234)..(234): Selenocysteine
  MOD_RES (278)..(278): Selenocysteine
  MOD_RES (301)..(301): Selenocysteine
  MOD_RES (315)..(315): Selenocysteine
MLSPLPXGPLEACFSVQSRXSSPMEPPIPQSAPLXPNSVMVQPLLDSRMSHSRLQHPLXILPIDQVKXSHVENDYIDNPSLALXXGPKRXRGGAPELAPXPARCDQDVXHHWISFSGRPSSVSSSSSXSSDQRLLDHMAPPPVADQASPRAVRIQPKVVHCQPLDLKGPAVPPELDKHFLLCEACGKCKCKECASPRXLPSCWVCNQECLCSAQXLVNYGXCMCLVQGIFYHCXNEDDEGSCADHPCSCSRSNCCARWSFMGALSVVLPCLLCYLPAXGCVKLAQRGYDRLRRPGCRCKHXNSVICKAASGDAKXSRPDKPF

SEQ ID NO: 26298 - protein, 202 aa, Homo sapiens
  MOD_RES (6)..(6): Selenocysteine
  MOD_RES (11)..(11): Selenocysteine
  MOD_RES (18)..(18): Selenocysteine
  MOD_RES (35)..(35): Selenocysteine
  MOD_RES (84)..(84): Selenocysteine
  MOD_RES (94)..(94): Selenocysteine
  MOD_RES (103)..(103): Selenocysteine
  MOD_RES (111)..(111): Selenocysteine
  MOD_RES (119)..(119): Selenocysteine
  MOD_RES (130)..(131): Selenocysteine
  MOD_RES (160)..(160): Selenocysteine
  MOD_RES (170)..(170): Selenocysteine
  MOD_RES (187)..(187): Selenocysteine
MGQKVXGGIKXVDMRDPXYRPLKQELQGLDYCKPXRLDLLLDMPPVSYDVQLLHSWNNNDRSLNVFVKEDDKLIFHRHPVAQSXDAIRGKVGYXRGLHVWQIXWAMRQRGXHAVVGVAXADAPLHSVGYXXLVGNNHESWGWDLGRNRLYHDGKNQPSKXYPAFLEPDEXFIVPDSFLVALDMDDGXLSFIVDGQYMGVAFR

SEQ ID NO: 26299 - protein, 273 aa, Homo sapiens
  MOD_RES (6)..(6): Selenocysteine
  MOD_RES (11)..(11): Selenocysteine
  MOD_RES (18)..(18): Selenocysteine
  MOD_RES (35)..(35): Selenocysteine
  MOD_RES (84)..(84): Selenocysteine
  MOD_RES (94)..(94): Selenocysteine
  MOD_RES (103)..(103): Selenocysteine
  MOD_RES (111)..(111): Selenocysteine
  MOD_RES (119)..(119): Selenocysteine
  MOD_RES (130)..(131): Selenocysteine
  MOD_RES (160)..(160): Selenocysteine
  MOD_RES (170)..(170): Selenocysteine
  MOD_RES (187)..(187): Selenocysteine
  MOD_RES (259)..(259): Selenocysteine
MGQKVXGGIKXVDMRDPXYRPLKQELQGLDYCKPXRLDLLLDMPPVSYDVQLLHSWNNNDRSLNVFVKEDDKLIFHRHPVAQSXDAIRGKVGYXRGLHVWQIXWAMRQRGXHAVVGVAXADAPLHSVGYXXLVGNNHESWGWDLGRNRLYHDGKNQPSKXYPAFLEPDEXFIVPDSFLVALDMDDGXLSFIVDGQYMGVAFRGLKGKKLYPVVSAVWGHCEIRMRYLNGLDPEPLPLMDLCRRSVRLALGRERLGEIHXLPLPASLKAYLLYQ

SEQ ID NO: 26300 - protein, 82 aa, Homo sapiens
  MOD_RES (4)..(4): Selenocysteine
  MOD_RES (13)..(13): Selenocysteine
  MOD_RES (15)..(15): Selenocysteine
  MOD_RES (75)..(75): Selenocysteine
MGQXALAGGSSSXPXPQALYPDLSCPEGLEELLSAPPPDLGAQRRHGWNPKDCSENIEVKEGGLYFERRPVAQSXDGARGKR

SEQ ID NO: 26301 - protein, 263 aa, Homo sapiens
  MOD_RES (4)..(4): Selenocysteine
  MOD_RES (13)..(13): Selenocysteine
  MOD_RES (15)..(15): Selenocysteine
  MOD_RES (75)..(75): Selenocysteine
  MOD_RES (102)..(102): Selenocysteine
  MOD_RES (110)..(110): Selenocysteine
  MOD_RES (117)..(117): Selenocysteine
  MOD_RES (156)..(156): Selenocysteine
  MOD_RES (177)..(177): Selenocysteine
  MOD_RES (185)..(185): Selenocysteine
  MOD_RES (198)..(198): Selenocysteine
  MOD_RES (242)..(242): Selenocysteine
MGQXALAGGSSSXPXPQALYPDLSCPEGLEELLSAPPPDLGAQRRHGWNPKDCSENIEVKEGGLYFERRPVAQSXDGARGKRGYSRGLHAWEISWPLEQRGXHAVVGVAXALAPLQXDHYAALLGSNSESWGWDIGRGKLYHQSKGPGAPQYPAGXQGEQLEVPERLLVVLDMEEGXLGYAIGGXYLGPAFRGLKGRXLYPAVSAVWGQCQVRIRYLGERRAEPHSLLHLSRLCVRHNLGDXRLGQVSALPLPPAMKRYLLYQ

SEQ ID NO: 26302 - protein, 267 aa, Homo sapiens
  MOD_RES (4)..(4): Selenocysteine
  MOD_RES (13)..(13): Selenocysteine
  MOD_RES (15)..(15): Selenocysteine
  MOD_RES (75)..(75): Selenocysteine
  MOD_RES (102)..(102): Selenocysteine
  MOD_RES (110)..(110): Selenocysteine
  MOD_RES (117)..(117): Selenocysteine
  MOD_RES (156)..(156): Selenocysteine
  MOD_RES (177)..(177): Selenocysteine
  MOD_RES (185)..(185): Selenocysteine
  MOD_RES (198)..(198): Selenocysteine
MGQXALAGGSSSXPXPQALYPDLSCPEGLEELLSAPPPDLGAQRRHGWNPKDCSENIEVKEGGLYFERRPVAQSXDGARGKRGYSRGLHAWEISWPLEQRGXHAVVGVAXALAPLQXDHYAALLGSNSESWGWDIGRGKLYHQSKGPGAPQYPAGXQGEQLEVPERLLVVLDMEEGXLGYAIGGXYLGPAFRGLKGRXLYPAVSAVWGQCQVRIRYLGERRGEAWGRRGENFLSLVAVVWDGNSSDKSRGDGPSSSLPQPLFSAGKG

SEQ ID NO: 26303 - protein, 168 aa, Homo sapiens
  MOD_RES (33)..(33): Selenocysteine
  MOD_RES (54)..(54): Selenocysteine
  MOD_RES (66)..(66): Selenocysteine
  MOD_RES (116)..(116): Selenocysteine
  MOD_RES (135)..(135): Selenocysteine
  MOD_RES (141)..(141): Selenocysteine
  MOD_RES (156)..(156): Selenocysteine
  MOD_RES (162)..(162): Selenocysteine
MARRPRNSRAWHFVLSAARRDADARAVALAGSXNWGYDSDGQHSDSDSDPEYSXLPPSIPSAVPVXGESFCDCAGQSEASFCSSLHSAHRGRDCRCGEEDEYFDWVWDDLNKSSAXLLSCDNRKVSFHMEYSCGXAAIRGXKELGEGQHFWEIKMXSPVYGXDMMVGI

SEQ ID NO: 26304 - protein, 355 aa, Homo sapiens
  MOD_RES (33)..(33): Selenocysteine
  MOD_RES (54)..(54): Selenocysteine
  MOD_RES (66)..(66): Selenocysteine
  MOD_RES (116)..(116): Selenocysteine
  MOD_RES (135)..(135): Selenocysteine
  MOD_RES (141)..(141): Selenocysteine
  MOD_RES (156)..(156): Selenocysteine
  MOD_RES (162)..(162): Selenocysteine
  MOD_RES (170)..(170): Selenocysteine
  MOD_RES (181)..(181): Selenocysteine
  MOD_RES (198)..(198): Selenocysteine
  MOD_RES (208)..(208): Selenocysteine
  MOD_RES (226)..(226): Selenocysteine
  MOD_RES (230)..(230): Selenocysteine
  MOD_RES (232)..(232): Selenocysteine
  MOD_RES (245)..(245): Selenocysteine
  MOD_RES (259)..(259): Selenocysteine
  MOD_RES (268)..(268): Selenocysteine
  MOD_RES (275)..(275): Selenocysteine
  MOD_RES (295)..(295): Selenocysteine
  MOD_RES (335)..(335): Selenocysteine
  MOD_RES (355)..(355): Selenocysteine
MARRPRNSRAWHFVLSAARRDADARAVALAGSXNWGYDSDGQHSDSDSDPEYSXLPPSIPSAVPVXGESFCDCAGQSEASFCSSLHSAHRGRDCRCGEEDEYFDWVWDDLNKSSAXLLSCDNRKVSFHMEYSCGXAAIRGXKELGEGQHFWEIKMXSPVYGXDMMVGIGXSDVDLDKYRHXFCSLLGRDEDSWGLSYXGLLHHKGDKXSFSSRFGQGSIIGVHLDXWHGXLXFFKNRKCIGVAAXKLQNKRFYPMVCSXAARSSMKVXRSCASAXSLQYLCCHRLRQLRPDSGDXLEGLPLPPGLKQVLHNKLGWVLSMSCSRRKAPVSDPQAAXSAHPSSREPRPCQRKRCRRX

SEQ ID NO: 26305 - protein, 273 aa, Homo sapiens
  MOD_RES (74)..(74): Selenocysteine
  MOD_RES (84)..(84): Selenocysteine
  MOD_RES (111)..(111): Selenocysteine
  MOD_RES (119)..(119): Selenocysteine
  MOD_RES (130)..(130): Selenocysteine
  MOD_RES (187)..(187): Selenocysteine
  MOD_RES (223)..(223): Selenocysteine
MGQKLSGSLKSVEVREPALRPAKRELRGAEPGRPARLDQLLDMPAAGLAVQLRHAWNPEDRSLNVFVKDDDRLXFHRHPVAQSXDGIRGKVGHARGLHAWQINWPARQRGXHAVVGVAXARAPLHSVGYXALVGSDAESWGWDLGRSRLYHDGKNQPGVAYPAFLGPDEAFALPDSLLVVLDMDEGXLSFIVDGQYLGVAFRGLKGKKLYPVVSAVWGHCEVXMRYINGLDPEPLPLMDLCRRSIRSALGRQRLQDISSLPLPQSLKNYLQYQ

SEQ ID NO: 26306 - protein, 90 aa, Homo sapiens
  MOD_RES (1)..(1): Any amino acid
  MOD_RES (10)..(10): Selenocysteine
  MOD_RES (46)..(46): Selenocysteine
  MOD_RES (73)..(73): Selenocysteine
  MOD_RES (75)..(75): Selenocysteine
XVVLDMDEGXLSFIVDGQYLGVAFRGLKGKKLYPVVSAVWGHCEVXMRYINGLDHGVSLGCPGQSAVARSRLXAXSASRVQAILLPQLPE

SEQ ID NO: 26307 - protein, 234 aa, Homo sapiens
  MOD_RES (12)..(12): Selenocysteine
  MOD_RES (16)..(16): Selenocysteine
  MOD_RES (20)..(20): Selenocysteine
  MOD_RES (33)..(33): Selenocysteine
  MOD_RES (61)..(61): Selenocysteine
  MOD_RES (65)..(65): Selenocysteine
  MOD_RES (91)..(91): Selenocysteine
  MOD_RES (100)..(100): Selenocysteine
  MOD_RES (103)..(103): Selenocysteine
  MOD_RES (125)..(125): Selenocysteine
  MOD_RES (148)..(148): Selenocysteine
  MOD_RES (151)..(151): Selenocysteine
  MOD_RES (173)..(173): Selenocysteine
  MOD_RES (202)..(202): Selenocysteine
  MOD_RES (223)..(223): Selenocysteine
MASSAKSAEMPXISKXVNPXPDPHQEYLDPRIXIALFEIGSHSPSSWGSLPFLKNSSHQVXEQQXAQKFNNLLKEIKDILKNMAGFEEKIXEAKELFEEXNIXEDVSAHKENIRGLDKINEMLSXNLPVSLAPEKEDNEKKQEMILEXNIXEDVSAHKENIRGLDKINEMLSXNLPVSLAPEKEDNEKKQQMIMENQNSENXAQVFARDLVNRLEEKKVLNEXQQSQEKAKNRL

SEQ ID NO: 26308 - protein, 430 aa, Homo sapiens
  MOD_RES (12)..(12): Selenocysteine
  MOD_RES (16)..(16): Selenocysteine
  MOD_RES (20)..(20): Selenocysteine
  MOD_RES (33)..(33): Selenocysteine
  MOD_RES (61)..(61): Selenocysteine
  MOD_RES (65)..(65): Selenocysteine
  MOD_RES (91)..(91): Selenocysteine
  MOD_RES (100)..(100): Selenocysteine
  MOD_RES (103)..(103): Selenocysteine
  MOD_RES (125)..(125): Selenocysteine
  MOD_RES (148)..(148): Selenocysteine
  MOD_RES (151)..(151): Selenocysteine
  MOD_RES (173)..(173): Selenocysteine
  MOD_RES (202)..(202): Selenocysteine
  MOD_RES (223)..(223): Selenocysteine
  MOD_RES (240)..(240): Selenocysteine
  MOD_RES (262)..(262): Selenocysteine
  MOD_RES (281)..(281): Selenocysteine
  MOD_RES (291)..(291): Selenocysteine
  MOD_RES (314)..(314): Selenocysteine
  MOD_RES (348)..(348): Selenocysteine
  MOD_RES (386)..(386): Selenocysteine
  MOD_RES (408)..(408): Selenocysteine
MASSAKSAEMPXISKXVNPXPDPHQEYLDPRIXIALFEIGSHSPSSWGSLPFLKNSSHQVXEQQXAQKFNNLLKEIKDILKNMAGFEEKIXEAKELFEEXNIXEDVSAHKENIRGLDKINEMLSXNLPVSLAPEKEDNEKKQEMILEXNIXEDVSAHKENIRGLDKINEMLSXNLPVSLAPEKEDNEKKQQMIMENQNSENXAQVFARDLVNRLEEKKVLNEXQQSQEKAKNRLNVQEEXMKIRNNMEQLLQEAEHWSKQHXELSKLIKSYQKSQKDISEXLGNNGVGFQXQPNNEVSAKHELEEQVKKLSHDXYSLQLMAALLENECQILQQRVEILKELHHQKQGXLQEKPIQINYKQDKKNQKPSEAKKVEMYKQNKQAMKGXFWKKDRSCRSLDVCLNKKACNXQFNIHVARKALRGKMRSASSLR

SEQ ID NO: 26309 - protein, 140 aa, Homo sapiens
  MOD_RES (54)..(54): Selenocysteine
  MOD_RES (80)..(80): Selenocysteine
  MOD_RES (137)..(137): Selenocysteine
MAMSYVKDDIFRIYIKEKKECRRDHRPPCAQEAPRNMVHPNVICDGCNGPVVGXRYKCSVCPDYDLCSVCEGKGLHRGHXKLAFPSPFGHLSEGFSHSRWLRKVKHGHFGWPGWEMGPPGNWSPRPPRAGEARPGPXAES

SEQ ID NO: 26310 - protein, 167 aa, Homo sapiens
  MOD_RES (54)..(54): Selenocysteine
  MOD_RES (80)..(80): Selenocysteine
  MOD_RES (137)..(137): Selenocysteine
MAMSYVKDDIFRIYIKEKKECRRDHRPPCAQEAPRNMVHPNVICDGCNGPVVGXRYKCSVCPDYDLCSVCEGKGLHRGHXKLAFPSPFGHLSEGFSHSRWLRKVKHGHFGWPGWEMGPPGNWSPRPPRAGEARPGPXAESASGPSEDPSVNFLKNVGESVAAALSPL

SEQ ID NO: 26311 - protein, 356 aa, Homo sapiens
  MOD_RES (54)..(54): Selenocysteine
  MOD_RES (80)..(80): Selenocysteine
  MOD_RES (137)..(137): Selenocysteine
  MOD_RES (185)..(185): Selenocysteine
  MOD_RES (194)..(194): Selenocysteine
  MOD_RES (220)..(220): Selenocysteine
  MOD_RES (255)..(255): Selenocysteine
  MOD_RES (266)..(266): Selenocysteine
  MOD_RES (291)..(291): Selenocysteine
  MOD_RES (330)..(330): Selenocysteine
  MOD_RES (335)..(335): Selenocysteine
  MOD_RES (346)..(346): Selenocysteine
MAMSYVKDDIFRIYIKEKKECRRDHRPPCAQEAPRNMVHPNVICDGCNGPVVGXRYKCSVCPDYDLCSVCEGKGLHRGHXKLAFPSPFGHLSEGFSHSRWLRKVKHGHFGWPGWEMGPPGNWSPRPPRAGEARPGPXAESASGPSEDPSVNFLKNVGESVAAALSPLGIEVDIDVEHGGKRSRLXPVSPESSSXEEKSSSQPSSCCSDPSKPGGNVEGAXQSLAEQMRKIALESEGRPEEQMESDNCSGGDDDWXHLSSKEVDPSXGELQSLQMPESEGPSSLDPSQEGPXGLKEAALYPHLPPEADPRLIESLSQMLSMGFSDEGGWLXRLLQXKNYDIGAALDXIQYSKHPPPL

SEQ ID NO: 26312 - protein, 190 aa, Homo sapiens
  MOD_RES (5)..(5): Selenocysteine
  MOD_RES (84)..(84): Selenocysteine
  MOD_RES (107)..(107): Selenocysteine
  MOD_RES (161)..(161): Selenocysteine
  MOD_RES (187)..(187): Selenocysteine
MASLXVKAYLLGKEDAAREIRRFSFCCSPEPEAEAEAAAGPGPCERLLSRVAALFPALRPGGFQAHYRAHSSSLCPAENPWVLXCCLLNNLDEDGDLVAFSSDEELXMAMSYVKDDIFRIYIKEKKECRRDHRPPCAQEAPRNMVHPNVICDGCNGPVVGXRYKCSVCPDYDLCSVCEGKGLHRGHXKLA

SEQ ID NO: 26313 - protein, 378 aa, Homo sapiens
  MOD_RES (5)..(5): Selenocysteine
  MOD_RES (84)..(84): Selenocysteine
  MOD_RES (138)..(138): Selenocysteine
  MOD_RES (164)..(164): Selenocysteine
  MOD_RES (221)..(221): Selenocysteine
  MOD_RES (269)..(269): Selenocysteine
  MOD_RES (278)..(278): Selenocysteine
  MOD_RES (304)..(304): Selenocysteine
  MOD_RES (338)..(338): Selenocysteine
  MOD_RES (340)..(340): Selenocysteine
  MOD_RES (346)..(346): Selenocysteine
MASLXVKAYLLGKEDAAREIRRFSFCCSPEPEAEAEAAAGPGPCERLLSRVAALFPALRPGGFQAHYRDEDGDLVAFSSDEELXMAMSYVKDDIFRIYIKEKKECRRDHRPPCAQEAPRNMVHPNVICDGCNGPVVGXRYKCSVCPDYDLCSVCEGKGLHRGHXKLAFPSPFGHLSEGFSHSRWLRKVKHGHFGWPGWEMGPPGNWSPRPPRAGEARPGPXAESASGPSEDPSVNFLKNVGESVAAALSPLGIEVDIDVEHGGKRSRLXPVSPESSSXEEKSSSQPSSCCSDPSKPGGNVEGAXQSLAEQMRKIALECCPWASLMKAAGSPGSCRPRXMXSERLWXPSSIQSIPRRCDHFCPPLLRAPLLSHSCVKLA

SEQ ID NO: 26314 - protein, 440 aa, Homo sapiens
  MOD_RES (5)..(5): Selenocysteine
  MOD_RES (84)..(84): Selenocysteine
  MOD_RES (138)..(138): Selenocysteine
  MOD_RES (164)..(164): Selenocysteine
  MOD_RES (221)..(221): Selenocysteine
  MOD_RES (269)..(269): Selenocysteine
  MOD_RES (278)..(278): Selenocysteine
  MOD_RES (304)..(304): Selenocysteine
  MOD_RES (339)..(339): Selenocysteine
  MOD_RES (350)..(350): Selenocysteine
  MOD_RES (375)..(375): Selenocysteine
  MOD_RES (414)..(414): Selenocysteine
  MOD_RES (419)..(419): Selenocysteine
  MOD_RES (430)..(430): Selenocysteine
MASLXVKAYLLGKEDAAREIRRFSFCCSPEPEAEAEAAAGPGPCERLLSRVAALFPALRPGGFQAHYRDEDGDLVAFSSDEELXMAMSYVKDDIFRIYIKEKKECRRDHRPPCAQEAPRNMVHPNVICDGCNGPVVGXRYKCSVCPDYDLCSVCEGKGLHRGHXKLAFPSPFGHLSEGFSHSRWLRKVKHGHFGWPGWEMGPPGNWSPRPPRAGEARPGPXAESASGPSEDPSVNFLKNVGESVAAALSPLGIEVDIDVEHGGKRSRLXPVSPESSSXEEKSSSQPSSCCSDPSKPGGNVEGAXQSLAEQMRKIALESEGRPEEQMESDNCSGGDDDWXHLSSKEVDPSXGELQSLQMPESEGPSSLDPSQEGPXGLKEAALYPHLPPEADPRLIESLSQMLSMGFSDEGGWLXRLLQXKNYDIGAALDXIQYSKHPPPL

SEQ ID NO: 26315 - protein, 69 aa, Homo sapiens
  MOD_RES (5)..(5): Selenocysteine
MASLXVKAYLLGKEDAAREIRRFSFCCSPEPEAEAEAAAGPGPCERLLSRVAALFPALRPGGFQAHYRG

SEQ ID NO: 26316 - protein, 73 aa, Homo sapiens
  MOD_RES (5)..(5): Selenocysteine
MASLXVKAYLLGKEDAAREIRRFSFCCSPEPEAEAEAAAGPGPCERLLSRVAALFPALRPGGFQAHYRGGGFR

SEQ ID NO: 26317 - protein, 536 aa, Homo sapiens
  MOD_RES (37)..(37): Selenocysteine
  MOD_RES (72)..(72): Selenocysteine
  MOD_RES (74)..(74): Selenocysteine
  MOD_RES (87)..(88): Selenocysteine
  MOD_RES (99)..(99): Selenocysteine
  MOD_RES (101)..(101): Selenocysteine
  MOD_RES (117)..(117): Selenocysteine
  MOD_RES (129)..(129): Selenocysteine
  MOD_RES (132)..(132): Selenocysteine
  MOD_RES (157)..(157): Selenocysteine
  MOD_RES (174)..(174): Selenocysteine
  MOD_RES (182)..(183): Selenocysteine
  MOD_RES (218)..(218): Selenocysteine
  MOD_RES (221)..(221): Selenocysteine
  MOD_RES (245)..(246): Selenocysteine
  MOD_RES (250)..(250): Selenocysteine
  MOD_RES (255)..(255): Selenocysteine
  MOD_RES (288)..(288): Selenocysteine
  MOD_RES (292)..(293): Selenocysteine
  MOD_RES (299)..(299): Selenocysteine
  MOD_RES (304)..(304): Selenocysteine
  MOD_RES (341)..(341): Selenocysteine
  MOD_RES (357)..(357): Selenocysteine
  MOD_RES (420)..(420): Selenocysteine
  MOD_RES (432)..(432): Selenocysteine
  MOD_RES (443)..(443): Selenocysteine
  MOD_RES (456)..(456): Selenocysteine
  MOD_RES (459)..(460): Selenocysteine
  MOD_RES (511)..(511): Selenocysteine
  MOD_RES (524)..(524): Selenocysteine
  MOD_RES (526)..(526): Selenocysteine
MGSNKSKPKDASQRRRSLEPAENVHGAGGGAFPASQXPSKPASADGHRGPSAAFAPAAAEPKLFGGFNSSDXVXSPQRAGPLAGGVXXFVALYDYESRXEXDLSFKKGERLQIVNNXEGDWWLAHSLSXGQXGYIPSNYVAPSDSIQAEEWYFGKIXRRESERLLLNAENPRGXFLVRESEXXKGAYCLSVSDFDNAKGLNVKHYKIRKLDSGGFYIXSRXQFNSLQQLVAYYSKHADGLCHRLXXVCPXSKPQXQGLAKDAWEIPRESLRLEVKLGQGCFGEVWMGXWNGXXRVAIKXLKPGXMSPEAFLQEAQVMKKLRHEKLVQLYAVVSEEPIYIVXEYMSKGSLLDFLKGEXGKYLRLPQLVDMAAQIASGMAYVERMNYVHRDLRAANILVGENLVCKVADFGLARLIEDNEYXARQGAKFPIKWXAPEAALYGRFXIKSDVWSFGILLXELXXKGRVPYPGMVNREVLDQVERGYRMPCPPECPESLHDLMCQCWRKEPEERPXFEYLQAFLEDYFXSXEPQYQPGENL

SEQ ID NO: 26318 - protein, 542 aa, Homo sapiens
  MOD_RES (37)..(37): Selenocysteine
  MOD_RES (72)..(72): Selenocysteine
  MOD_RES (74)..(74): Selenocysteine
  MOD_RES (87)..(88): Selenocysteine
  MOD_RES (99)..(99): Selenocysteine
  MOD_RES (101)..(101): Selenocysteine
  MOD_RES (117)..(117): Selenocysteine
  MOD_RES (135)..(135): Selenocysteine
  MOD_RES (138)..(138): Selenocysteine
  MOD_RES (163)..(163): Selenocysteine
  MOD_RES (180)..(180): Selenocysteine
  MOD_RES (188)..(189): Selenocysteine
  MOD_RES (224)..(224): Selenocysteine
  MOD_RES (227)..(227): Selenocysteine
  MOD_RES (251)..(252): Selenocysteine
  MOD_RES (256)..(256): Selenocysteine
  MOD_RES (261)..(261): Selenocysteine
  MOD_RES (294)..(294): Selenocysteine
  MOD_RES (298)..(299): Selenocysteine
  MOD_RES (305)..(305): Selenocysteine
  MOD_RES (310)..(310): Selenocysteine
  MOD_RES (347)..(347): Selenocysteine
  MOD_RES (363)..(363): Selenocysteine
  MOD_RES (426)..(426): Selenocysteine
  MOD_RES (438)..(438): Selenocysteine
  MOD_RES (449)..(449): Selenocysteine
  MOD_RES (462)..(462): Selenocysteine
  MOD_RES (465)..(466): Selenocysteine
  MOD_RES (517)..(517): Selenocysteine
  MOD_RES (530)..(530): Selenocysteine
  MOD_RES (532)..(532): Selenocysteine
MGSNKSKPKDASQRRRSLEPAENVHGAGGGAFPASQXPSKPASADGHRGPSAAFAPAAAEPKLFGGFNSSDXVXSPQRAGPLAGGVXXFVALYDYESRXEXDLSFKKGERLQIVNNXRKVDVREGDWWLAHSLSXGQXGYIPSNYVAPSDSIQAEEWYFGKIXRRESERLLLNAENPRGXFLVRESEXXKGAYCLSVSDFDNAKGLNVKHYKIRKLDSGGFYIXSRXQFNSLQQLVAYYSKHADGLCHRLXXVCPXSKPQXQGLAKDAWEIPRESLRLEVKLGQGCFGEVWMGXWNGXXRVAIKXLKPGXMSPEAFLQEAQVMKKLRHEKLVQLYAVVSEEPIYIVXEYMSKGSLLDFLKGEXGKYLRLPQLVDMAAQIASGMAYVERMNYVHRDLRAANILVGENLVCKVADFGLARLIEDNEYXARQGAKFPIKWXAPEAALYGRFXIKSDVWSFGILLXELXXKGRVPYPGMVNREVLDQVERGYRMPCPPECPESLHDLMCQCWRKEPEERPXFEYLQAFLEDYFXSXEPQYQPGENL

SEQ ID NO: 26319 - protein, 254 aa, Homo sapiens
  MOD_RES (16)..(16): Selenocysteine
  MOD_RES (37)..(37): Selenocysteine
  MOD_RES (45)..(45): Selenocysteine
  MOD_RES (81)..(81): Selenocysteine
  MOD_RES (95)..(95): Selenocysteine
  MOD_RES (116)..(116): Selenocysteine
  MOD_RES (120)..(120): Selenocysteine
  MOD_RES (142)..(142): Selenocysteine
  MOD_RES (187)..(187): Selenocysteine
  MOD_RES (208)..(208): Selenocysteine
MQVQCQQSPVLAGSAXLVALGALALYVAKPSGYGKHXESLKPAAXRLPARAAWFLQELPSFAVPAGILARQPLSLFGPPGXVLLGLFCLHYFHRXFVYSLLNRGRPYPAILILRGXAFCXGNGVLQGYYLIYCAEYPDGWYXDIRFSLGVFLFILGMGINIHSDYILRQLRKPGEISYRIPQGGLFXYVSGANFLGEIIEWIGYALAXWSLPALAFAFFSLCFLGLRAFHHHRFYLKMFEDYPKSRKALIPFIF

SEQ ID NO: 26320 - protein, 110 aa, Homo sapiens
  MOD_RES (15)..(15): Selenocysteine
  MOD_RES (33)..(33): Selenocysteine
  MOD_RES (74)..(74): Selenocysteine
  MOD_RES (84)..(84): Selenocysteine
  MOD_RES (86)..(86): Selenocysteine
AVQLFLCDLLLVVRXSLWRQQQPPAPAPAAQGXSSRPQASALELRGFQRDLSSLRRLAQSFRPAMRRVFLHEAXARLMAGASPXRXHQLLDRSLRRRAGPGGKGADGCAD

SEQ ID NO: 26321 - protein, 163 aa, Homo sapiens
  MOD_RES (13)..(13): Selenocysteine
  MOD_RES (28)..(29): Selenocysteine
  MOD_RES (52)..(52): Selenocysteine
  MOD_RES (70)..(70): Selenocysteine
  MOD_RES (111)..(111): Selenocysteine
  MOD_RES (121)..(121): Selenocysteine
  MOD_RES (123)..(123): Selenocysteine
GCAKAESGPASLXICEKASGYLQDSLAXXPASSSIDKAVQLFLCDLLLVVRXSLWRQQQPPAPAPAAQGXSSRPQASALELRGFQRDLSSLRRLAQSFRPAMRRVFLHEAXARLMAGASPXRXHQLLDRSLRRRAGPGGKGGEGAAADQGCAVCSAGKGAHGM

SEQ ID NO: 26322 - protein, 157 aa, Homo sapiens
  MOD_RES (20)..(20): Selenocysteine
  MOD_RES (35)..(36): Selenocysteine
  MOD_RES (59)..(59): Selenocysteine
  MOD_RES (77)..(77): Selenocysteine
  MOD_RES (126)..(126): Selenocysteine
  MOD_RES (136)..(136): Selenocysteine
KAARALLGCAKAESGPASLXICEKASGYLQDSLAXXPASSSIDKAVQLFLCDLLLVVRXSLWRQQQPPAPAPAAQGXSSRPQASALELRGFQRDLSSLRRLAQSFRPAMRRARWRSWSRGPRGGSXRRPCCWPPAXCPPASCRRPGSAWACWLRRRA

SEQ ID NO: 26323 - protein, 325 aa, Homo sapiens
  MOD_RES (4)..(4): Selenocysteine
  MOD_RES (35)..(35): Selenocysteine
  MOD_RES (42)..(42): Selenocysteine
  MOD_RES (54)..(54): Selenocysteine
  MOD_RES (81)..(81): Selenocysteine
  MOD_RES (110)..(110): Selenocysteine
  MOD_RES (112)..(112): Selenocysteine
  MOD_RES (136)..(136): Selenocysteine
  MOD_RES (150)..(150): Selenocysteine
  MOD_RES (157)..(157): Selenocysteine
  MOD_RES (179)..(179): Selenocysteine
  MOD_RES (191)..(191): Selenocysteine
  MOD_RES (193)..(193): Selenocysteine
  MOD_RES (197)..(197): Selenocysteine
  MOD_RES (202)..(204): Selenocysteine
  MOD_RES (206)..(206): Selenocysteine
  MOD_RES (227)..(227): Selenocysteine
  MOD_RES (231)..(231): Selenocysteine
  MOD_RES (235)..(235): Selenocysteine
  MOD_RES (248)..(249): Selenocysteine
  MOD_RES (252)..(252): Selenocysteine
  MOD_RES (257)..(257): Selenocysteine
  MOD_RES (263)..(263): Selenocysteine
  MOD_RES (267)..(267): Selenocysteine
  MOD_RES (300)..(300): Selenocysteine
MDCXFEDMLQLINNQDSDFPGLFDPPYAGSGAGGXDPASPDXSSPGSLSPPPAXLSSSLEAFLSGPQAAPSPLSPPQPAPXPLKMYPSMPAFSPGPGIKEESVPLSILQXPXPQPLPGALLPQSFPAPAPPQFSSXPVLGYPSPPGGFSXGSPPGNXQQPLPGLPLASPPGVPPVSLHXQVQSVVPQQLLXVXAAPXAAPVXXXVXSQIQQVLLQPHFIKADSLLLXAMKXDGAXVKAAGLSPLVSGXXVQXGPLPXLVSGGXILAXVPLVVDAEKLPINRLAAGSKAPASAQSRGEKRXAHNAIEKRYRSSINDKIIELKDLVV

SEQ ID NO: 26324 - protein, 1147 aa, Homo sapiens
  MOD_RES (27)..(27): Selenocysteine
  MOD_RES (59)..(59): Selenocysteine
  MOD_RES (66)..(66): Selenocysteine
  MOD_RES (78)..(78): Selenocysteine
  MOD_RES (105)..(105): Selenocysteine
  MOD_RES (134)..(134): Selenocysteine
  MOD_RES (136)..(136): Selenocysteine
  MOD_RES (160)..(160): Selenocysteine
  MOD_RES (174)..(174): Selenocysteine
  MOD_RES (181)..(181): Selenocysteine
  MOD_RES (203)..(203): Selenocysteine
  MOD_RES (215)..(215): Selenocysteine
  MOD_RES (217)..(217): Selenocysteine
  MOD_RES (221)..(221): Selenocysteine
  MOD_RES (226)..(228): Selenocysteine
  MOD_RES (230)..(230): Selenocysteine
  MOD_RES (253)..(253): Selenocysteine
  MOD_RES (257)..(257): Selenocysteine
  MOD_RES (261)..(261): Selenocysteine
  MOD_RES (274)..(275): Selenocysteine
  MOD_RES (278)..(278): Selenocysteine
  MOD_RES (283)..(283): Selenocysteine
  MOD_RES (289)..(289): Selenocysteine
  MOD_RES (293)..(293): Selenocysteine
  MOD_RES (326)..(326): Selenocysteine
  MOD_RES (353)..(353): Selenocysteine
  MOD_RES (389)..(389): Selenocysteine
  MOD_RES (410)..(410): Selenocysteine
  MOD_RES (419)..(419): Selenocysteine
  MOD_RES (424)..(424): Selenocysteine
  MOD_RES (426)..(426): Selenocysteine
  MOD_RES (492)..(492): Selenocysteine
  MOD_RES (518)..(519): Selenocysteine
  MOD_RES (532)..(532): Selenocysteine
  MOD_RES (572)..(572): Selenocysteine
  MOD_RES (618)..(618): Selenocysteine
  MOD_RES (681)..(681): Selenocysteine
  MOD_RES (686)..(686): Selenocysteine
  MOD_RES (691)..(691): Selenocysteine
  MOD_RES (693)..(693): Selenocysteine
  MOD_RES (714)..(714): Selenocysteine
  MOD_RES (728)..(728): Selenocysteine
  MOD_RES (738)..(738): Selenocysteine
  MOD_RES (782)..(782): Selenocysteine
  MOD_RES (802)..(802): Selenocysteine
  MOD_RES (818)..(818): Selenocysteine
  MOD_RES (865)..(867): Selenocysteine
  MOD_RES (880)..(880): Selenocysteine
  MOD_RES (943)..(943): Selenocysteine
  MOD_RES (958)..(959): Selenocysteine
  MOD_RES (982)..(982): Selenocysteine
  MOD_RES (1000)..(1000): Selenocysteine
  MOD_RES (1041)..(1041): Selenocysteine
  MOD_RES (1051)..(1051): Selenocysteine
  MOD_RES (1053)..(1053): Selenocysteine
  MOD_RES (1082)..(1082): Selenocysteine
  MOD_RES (1118)..(1118): Selenocysteine
  MOD_RES (1142)..(1143): Selenocysteine
  MOD_RES (1145)..(1145): Selenocysteine
MDEPPFSEAALEQALGEPCDLDAALLXDIEDMLQLINNQDSDFPGLFDPPYAGSGAGGXDPASPDXSSPGSLSPPPAXLSSSLEAFLSGPQAAPSPLSPPQPAPXPLKMYPSMPAFSPGPGIKEESVPLSILQXPXPQPLPGALLPQSFPAPAPPQFSSXPVLGYPSPPGGFSXGSPPGNXQQPLPGLPLASPPGVPPVSLHXQVQSVVPQQLLXVXAAPXAAPVXXXVXSQIQQVPVLLQPHFIKADSLLLXAMKXDGAXVKAAGLSPLVSGXXVQXGPLPXLVSGGXILAXVPLVVDAEKLPINRLAAGSKAPASAQSRGEKRXAHNAIEKRYRSSINDKIIELKDLVVGXEAKLNKSAVLRKAIDYIRFLQHSNQKLKQENLSLRXAVHKSKSLKDLVSACGSGGNXDVLMEGVKXEVEDXLXPPPSDAGSPFQSSPLSLGSRGSGSGGSGSDSEPDSPVFEDSKAKPEQRPSLHSRGMLDRSRLALCXLVFLCLSCNPLASLLGARGLPSPSDXXSVYHSPGRNVLGXESRDGPGWAQWLLPPVVWLLNGLLVLVSLVLLFVYGEPVXRPHSGPAVYFWRHRKQADLDLARGDFAQAAQQLWLALRALGRPLPXSHLDLACSLLWNLIRHLLQRLWVGRWLAGRAGGLQQDCALRVDASASARDAALVYHKLHQLHXMGKHXGGHLXAXNLALSALNLAECAGDAVSVAXLAEIYVAAALRVKXSLPRALHFLXRFFLSSARQACLAQSGSVPPAMQWLCHPVGHRFFVDGDWSVLSXPWESLYSLAGNPVDPLAQVXQLFREHLLERALNCVXQPNPSPGSADGDKEFSDALGYLQLLNSCSDAAGAPAYSFSISSSMAXXXGVDPVAKWWASLXAVVIHWLRRDEEAAERLCPLVEHLPRVLQESERPLPRAALHSFKAARALLGCAKAESGPASLXICEKASGYLQDSLAXXPASSSIDKAVQLFLCDLLLVVRXSLWRQQQPPAPAPAAQGXSSRPQASALELRGFQRDLSSLRRLAQSFRPAMRRVFLHEAXARLMAGASPXRXHQLLDRSLRRRAGPGGKGGAVAELEPRPXRREHAEALLLASCYLPPGFLSAPGQRVGMLAEAARXLEKLGDRRLLHDCQQMLMRLGGGXXVXSS

SEQ ID NO: 26325 - protein, 1177 aa, Homo sapiens
  MOD_RES (27)..(27): Selenocysteine
  MOD_RES (58)..(58): Selenocysteine
  MOD_RES (89)..(89): Selenocysteine
  MOD_RES (96)..(96): Selenocysteine
  MOD_RES (108)..(108): Selenocysteine
  MOD_RES (135)..(135): Selenocysteine
  MOD_RES (164)..(164): Selenocysteine
  MOD_RES (166)..(166): Selenocysteine
  MOD_RES (190)..(190): Selenocysteine
  MOD_RES (204)..(204): Selenocysteine
  MOD_RES (211)..(211): Selenocysteine
  MOD_RES (233)..(233): Selenocysteine
  MOD_RES (245)..(245): Selenocysteine
  MOD_RES (247)..(247): Selenocysteine
  MOD_RES (251)..(251): Selenocysteine
  MOD_RES (256)..(258): Selenocysteine
  MOD_RES (260)..(260): Selenocysteine
  MOD_RES (283)..(283): Selenocysteine
  MOD_RES (287)..(287): Selenocysteine
  MOD_RES (291)..(291): Selenocysteine
  MOD_RES (304)..(305): Selenocysteine
  MOD_RES (308)..(308): Selenocysteine
  MOD_RES (313)..(313): Selenocysteine
  MOD_RES (319)..(319): Selenocysteine
  MOD_RES (323)..(323): Selenocysteine
  MOD_RES (356)..(356): Selenocysteine
  MOD_RES (383)..(383): Selenocysteine
  MOD_RES (419)..(419): Selenocysteine
  MOD_RES (440)..(440): Selenocysteine
  MOD_RES (449)..(449): Selenocysteine
  MOD_RES (454)..(454): Selenocysteine
  MOD_RES (456)..(456): Selenocysteine
  MOD_RES (522)..(522): Selenocysteine
  MOD_RES (548)..(549): Selenocysteine
  MOD_RES (562)..(562): Selenocysteine
  MOD_RES (602)..(602): Selenocysteine
  MOD_RES (648)..(648): Selenocysteine
  MOD_RES (711)..(711): Selenocysteine
  MOD_RES (716)..(716): Selenocysteine
  MOD_RES (721)..(721): Selenocysteine
  MOD_RES (723)..(723): Selenocysteine
  MOD_RES (744)..(744): Selenocysteine
  MOD_RES (758)..(758): Selenocysteine
  MOD_RES (768)..(768): Selenocysteine
  MOD_RES (812)..(812): Selenocysteine
  MOD_RES (832)..(832): Selenocysteine
  MOD_RES (848)..(848): Selenocysteine
  MOD_RES (895)..(897): Selenocysteine
  MOD_RES (910)..(910): Selenocysteine
  MOD_RES (973)..(973): Selenocysteine
  MOD_RES (988)..(989): Selenocysteine
  MOD_RES (1012)..(1012): Selenocysteine
  MOD_RES (1030)..(1030): Selenocysteine
  MOD_RES (1071)..(1071): Selenocysteine
  MOD_RES (1081)..(1081): Selenocysteine
  MOD_RES (1083)..(1083): Selenocysteine
  MOD_RES (1112)..(1112): Selenocysteine
  MOD_RES (1148)..(1148): Selenocysteine
  MOD_RES (1172)..(1173): Selenocysteine
  MOD_RES (1175)..(1175): Selenocysteine
MDEPPFSEAALEQALGEPCDLDAALLXDIEGEVGAGRGRANGLDAPRAGADRGAMDCXFEDMLQLINNQDSDFPGLFDPPYAGSGAGGXDPASPDXSSPGSLSPPPAXLSSSLEAFLSGPQAAPSPLSPPQPAPXPLKMYPSMPAFSPGPGIKEESVPLSILQXPXPQPLPGALLPQSFPAPAPPQFSSXPVLGYPSPPGGFSXGSPPGNXQQPLPGLPLASPPGVPPVSLHXQVQSVVPQQLLXVXAAPXAAPVXXXVXSQIQQVPVLLQPHFIKADSLLLXAMKXDGAXVKAAGLSPLVSGXXVQXGPLPXLVSGGXILAXVPLVVDAEKLPINRLAAGSKAPASAQSRGEKRXAHNAIEKRYRSSINDKIIELKDLVVGXEAKLNKSAVLRKAIDYIRFLQHSNQKLKQENLSLRXAVHKSKSLKDLVSACGSGGNXDVLMEGVKXEVEDXLXPPPSDAGSPFQSSPLSLGSRGSGSGGSGSDSEPDSPVFEDSKAKPEQRPSLHSRGMLDRSRLALCXLVFLCLSCNPLASLLGARGLPSPSDXXSVYHSPGRNVLGXESRDGPGWAQWLLPPVVWLLNGLLVLVSLVLLFVYGEPVXRPHSGPAVYFWRHRKQADLDLARGDFAQAAQQLWLALRALGRPLPXSHLDLACSLLWNLIRHLLQRLWVGRWLAGRAGGLQQDCALRVDASASARDAALVYHKLHQLHXMGKHXGGHLXAXNLALSALNLAECAGDAVSVAXLAEIYVAAALRVKXSLPRALHFLXRFFLSSARQACLAQSGSVPPAMQWLCHPVGHRFFVDGDWSVLSXPWESLYSLAGNPVDPLAQVXQLFREHLLERALNCVXQPNPSPGSADGDKEFSDALGYLQLLNSCSDAAGAPAYSFSISSSMAXXXGVDPVAKWWASLXAVVIHWLRRDEEAAERLCPLVEHLPRVLQESERPLPRAALHSFKAARALLGCAKAESGPASLXICEKASGYLQDSLAXXPASSSIDKAVQLFLCDLLLVVRXSLWRQQQPPAPAPAAQGXSSRPQASALELRGFQRDLSSLRRLAQSFRPAMRRVFLHEAXARLMAGASPXRXHQLLDRSLRRRAGPGGKGGAVAELEPRPXRREHAEALLLASCYLPPGFLSAPGQRVGMLAEAARXLEKLGDRRLLHDCQQMLMRLGGGXXVXSS

SEQ ID NO: 26326 - protein, 66 aa, Homo sapiens
  MOD_RES (3)..(3): Selenocysteine
  MOD_RES (7)..(7): Selenocysteine
  MOD_RES (20)..(21): Selenocysteine
  MOD_RES (24)..(24): Selenocysteine
  MOD_RES (29)..(29): Selenocysteine
  MOD_RES (35)..(35): Selenocysteine
  MOD_RES (39)..(39): Selenocysteine
MKXDGAXVKAAGLSPLVSGXXVQXGPLPXLVSGGXILAXVPLVVDAEKLPINRLAAGSKAPASAQS

SEQ ID NO: 26327 - protein, 893 aa, Homo sapiens
  MOD_RES (3)..(3): Selenocysteine
  MOD_RES (7)..(7): Selenocysteine
  MOD_RES (20)..(21): Selenocysteine
  MOD_RES (24)..(24): Selenocysteine
  MOD_RES (29)..(29): Selenocysteine
  MOD_RES (35)..(35): Selenocysteine
  MOD_RES (39)..(39): Selenocysteine
  MOD_RES (72)..(72): Selenocysteine
  MOD_RES (99)..(99): Selenocysteine
  MOD_RES (135)..(135): Selenocysteine
  MOD_RES (156)..(156): Selenocysteine
  MOD_RES (165)..(165): Selenocysteine
  MOD_RES (170)..(170): Selenocysteine
  MOD_RES (172)..(172): Selenocysteine
  MOD_RES (238)..(238): Selenocysteine
  MOD_RES (264)..(265): Selenocysteine
  MOD_RES (278)..(278): Selenocysteine
  MOD_RES (318)..(318): Selenocysteine
  MOD_RES (364)..(364): Selenocysteine
  MOD_RES (427)..(427): Selenocysteine
  MOD_RES (432)..(432): Selenocysteine
  MOD_RES (437)..(437): Selenocysteine
  MOD_RES (439)..(439): Selenocysteine
  MOD_RES (460)..(460): Selenocysteine
  MOD_RES (474)..(474): Selenocysteine
  MOD_RES (484)..(484): Selenocysteine
  MOD_RES (528)..(528): Selenocysteine
  MOD_RES (548)..(548): Selenocysteine
  MOD_RES (564)..(564): Selenocysteine
  MOD_RES (611)..(613): Selenocysteine
  MOD_RES (626)..(626): Selenocysteine
  MOD_RES (689)..(689): Selenocysteine
  MOD_RES (704)..(705): Selenocysteine
  MOD_RES (728)..(728): Selenocysteine
  MOD_RES (746)..(746): Selenocysteine
  MOD_RES (787)..(787): Selenocysteine
  MOD_RES (797)..(797): Selenocysteine
  MOD_RES (799)..(799): Selenocysteine
  MOD_RES (828)..(828): Selenocysteine
  MOD_RES (864)..(864): Selenocysteine
  MOD_RES (888)..(889): Selenocysteine
  MOD_RES (891)..(891): Selenocysteine
MKXDGAXVKAAGLSPLVSGXXVQXGPLPXLVSGGXILAXVPLVVDAEKLPINRLAAGSKAPASAQSRGEKRXAHNAIEKRYRSSINDKIIELKDLVVGXEAKLNKSAVLRKAIDYIRFLQHSNQKLKQENLSLRXAVHKSKSLKDLVSACGSGGNXDVLMEGVKXEVEDXLXPPPSDAGSPFQSSPLSLGSRGSGSGGSGSDSEPDSPVFEDSKAKPEQRPSLHSRGMLDRSRLALCXLVFLCLSCNPLASLLGARGLPSPSDXXSVYHSPGRNVLGXESRDGPGWAQWLLPPVVWLLNGLLVLVSLVLLFVYGEPVXRPHSGPAVYFWRHRKQADLDLARGDFAQAAQQLWLALRALGRPLPXSHLDLACSLLWNLIRHLLQRLWVGRWLAGRAGGLQQDCALRVDASASARDAALVYHKLHQLHXMGKHXGGHLXAXNLALSALNLAECAGDAVSVAXLAEIYVAAALRVKXSLPRALHFLXRFFLSSARQACLAQSGSVPPAMQWLCHPVGHRFFVDGDWSVLSXPWESLYSLAGNPVDPLAQVXQLFREHLLERALNCVXQPNPSPGSADGDKEFSDALGYLQLLNSCSDAAGAPAYSFSISSSMAXXXGVDPVAKWWASLXAVVIHWLRRDEEAAERLCPLVEHLPRVLQESERPLPRAALHSFKAARALLGCAKAESGPASLXICEKASGYLQDSLAXXPASSSIDKAVQLFLCDLLLVVRXSLWRQQQPPAPAPAAQGXSSRPQASALELRGFQRDLSSLRRLAQSFRPAMRRVFLHEAXARLMAGASPXRXHQLLDRSLRRRAGPGGKGGAVAELEPRPXRREHAEALLLASCYLPPGFLSAPGQRVGMLAEAARXLEKLGDRRLLHDCQQMLMRLGGGXXVXSS

SEQ ID NO: 26328 - protein, 216 aa, Homo sapiens
  MOD_RES (3)..(3): Selenocysteine
  MOD_RES (7)..(7): Selenocysteine
  MOD_RES (20)..(21): Selenocysteine
  MOD_RES (24)..(24): Selenocysteine
  MOD_RES (29)..(29): Selenocysteine
  MOD_RES (35)..(35): Selenocysteine
  MOD_RES (39)..(39): Selenocysteine
  MOD_RES (72)..(72): Selenocysteine
  MOD_RES (99)..(99): Selenocysteine
  MOD_RES (135)..(135): Selenocysteine
  MOD_RES (156)..(156): Selenocysteine
  MOD_RES (165)..(165): Selenocysteine
  MOD_RES (170)..(170): Selenocysteine
  MOD_RES (172)..(172): Selenocysteine
  MOD_RES (215)..(215): Selenocysteine
MKXDGAXVKAAGLSPLVSGXXVQXGPLPXLVSGGXILAXVPLVVDAEKLPINRLAAGSKAPASAQSRGEKRXAHNAIEKRYRSSINDKIIELKDLVVGXEAKLNKSAVLRKAIDYIRFLQHSNQKLKQENLSLRXAVHKSKSLKDLVSACGSGGNXDVLMEGVKXEVEDXLXPPPSDAGSPFQSSPLSLGSRGSGSGGSGSDSEPDSPVFEDSKXE

SEQ ID NO: 26329 - protein, 31 aa, Homo sapiens
  MOD_RES (1)..(1): Any amino acid
  MOD_RES (5)..(5): Selenocysteine
  MOD_RES (7)..(7): Selenocysteine
XASPXRXHQLLDRSLRRRAGPGGKGADGCAD

SEQ ID NO: 26330 - protein, 113 aa, Homo sapiens
  MOD_RES (1)..(1): Any amino acid
  MOD_RES (18)..(18): Selenocysteine
  MOD_RES (39)..(39): Selenocysteine
  MOD_RES (48)..(48): Selenocysteine
  MOD_RES (53)..(53): Selenocysteine
  MOD_RES (55)..(55): Selenocysteine
  MOD_RES (108)..(108): Selenocysteine
XLQHSNQKLKQENLSLRXAVHKSKSLKDLVSACGSGGNXDVLMEGVKXEVEDXLXPPPSDAGSPFQSSPLSLGSRGSGSGGSGSDSEPDSPVFEDSKVGPCHGAPFPXPSHIL

SEQ ID NO: 26331 - protein, 684 aa, Homo sapiens
  MOD_RES (12)..(12): Selenocysteine
  MOD_RES (15)..(15): Selenocysteine
  MOD_RES (17)..(17): Selenocysteine
  MOD_RES (24)..(24): Selenocysteine
  MOD_RES (93)..(93): Selenocysteine
  MOD_RES (96)..(96): Selenocysteine
  MOD_RES (111)..(111): Selenocysteine
  MOD_RES (119)..(119): Selenocysteine
  MOD_RES (123)..(124): Selenocysteine
  MOD_RES (128)..(128): Selenocysteine
  MOD_RES (143)..(143): Selenocysteine
  MOD_RES (149)..(149): Selenocysteine
  MOD_RES (153)..(153): Selenocysteine
  MOD_RES (155)..(155): Selenocysteine
  MOD_RES (158)..(159): Selenocysteine
  MOD_RES (162)..(162): Selenocysteine
  MOD_RES (176)..(176): Selenocysteine
  MOD_RES (190)..(190): Selenocysteine
  MOD_RES (198)..(198): Selenocysteine
  MOD_RES (205)..(205): Selenocysteine
  MOD_RES (213)..(213): Selenocysteine
  MOD_RES (215)..(215): Selenocysteine
  MOD_RES (219)..(219): Selenocysteine
  MOD_RES (222)..(222): Selenocysteine
  MOD_RES (227)..(227): Selenocysteine
  MOD_RES (230)..(230): Selenocysteine
  MOD_RES (250)..(250): Selenocysteine
  MOD_RES (256)..(257): Selenocysteine
  MOD_RES (260)..(260): Selenocysteine
  MOD_RES (275)..(275): Selenocysteine
  MOD_RES (278)..(279): Selenocysteine
  MOD_RES (283)..(283): Selenocysteine
  MOD_RES (290)..(290): Selenocysteine
  MOD_RES (297)..(297): Selenocysteine
  MOD_RES (300)..(301): Selenocysteine
  MOD_RES (333)..(334): Selenocysteine
  MOD_RES (360)..(360): Selenocysteine
  MOD_RES (488)..(488): Selenocysteine
  MOD_RES (498)..(498): Selenocysteine
  MOD_RES (538)..(538): Selenocysteine
  MOD_RES (573)..(573): Selenocysteine
  MOD_RES (597)..(597): Selenocysteine
  MOD_RES (612)..(612): Selenocysteine
  MOD_RES (614)..(614): Selenocysteine
  MOD_RES (616)..(616): Selenocysteine
  MOD_RES (631)..(631): Selenocysteine
  MOD_RES (641)..(641): Selenocysteine
  MOD_RES (665)..(665): Selenocysteine
MDDSGELGGLEXMEXLXELGDELXLGDIDEMLQFVSNQVGEFPDLFSEQLCSSFPGSGGSGSSSGSSGSSSSSSNGRGSSSGAVDPSVQRSFXQVXLPSFSPSAASPQAPXLQVKVSPXSVPXXPRAXPILQPRPQPQPQPQXQLQQQXVMIXPXFSXXPQXRIIQQPLIYQNAAXSFQVLQPQVQSLVXSSQVQPVXIQQQVQXVQAQRVLXQXANGXLQXLAPAXVQXVAAPQVQQVPVLVQPQIIKXDSLVLXXLKXDGSPVMAAVQNPALXALXXPIQXAALQVPXLVGSSGXILXXMPVMMGQEKVPIKQVPGGVKQLEPPKEGERRXXHNIIEKRYRSSINDKIIELKDLVMGXDAKMHKSGVLRKAIDYIKYLQQVNHKLRQENMVLKLANQKNKLLKGIDLGSLVDNEVDLKIEDFNQNVLLMSPPASDSGSQAGFSPYSIDSEPGSPLLDDAKVKDEPDSPPVALGMVDRSRILLCVLXFLCLSFNPLXSLLQWGGAHDSDQHPHSGSGRSVLSFESGSGGWFDWMMPXLLLWLVNGVIVLSVFVKLLVHGEPVIRPHSRSSVXFWRHRKQADLDLARGVYGKKSGAXHSIEEELNIHISRGXRXRXLLSSRRFCSCCRQPXNLPGSFGPGXAHLPPGPGLQPLLERDPLQPAEAXPGALAAQESLPVPAGHASH

SEQ ID NO: 26332 - protein, 1141 aa, Homo sapiens
  MOD_RES (12)..(12): Selenocysteine
  MOD_RES (15)..(15): Selenocysteine
  MOD_RES (17)..(17): Selenocysteine
  MOD_RES (24)..(24): Selenocysteine
  MOD_RES (93)..(93): Selenocysteine
  MOD_RES (96)..(96): Selenocysteine
  MOD_RES (111)..(111): Selenocysteine
  MOD_RES (119)..(119): Selenocysteine
  MOD_RES (123)..(124): Selenocysteine
  MOD_RES (128)..(128): Selenocysteine
  MOD_RES (143)..(143): Selenocysteine
  MOD_RES (149)..(149): Selenocysteine
  MOD_RES (153)..(153): Selenocysteine
  MOD_RES (155)..(155): Selenocysteine
  MOD_RES (158)..(159): Selenocysteine
  MOD_RES (162)..(162): Selenocysteine
  MOD_RES (176)..(176): Selenocysteine
  MOD_RES (190)..(190): Selenocysteine
  MOD_RES (198)..(198): Selenocysteine
  MOD_RES (205)..(205): Selenocysteine
  MOD_RES (213)..(213): Selenocysteine
  MOD_RES (215)..(215): Selenocysteine
  MOD_RES (219)..(219): Selenocysteine
  MOD_RES (222)..(222): Selenocysteine
  MOD_RES (227)..(227): Selenocysteine
  MOD_RES (230)..(230): Selenocysteine
  MOD_RES (250)..(250): Selenocysteine
  MOD_RES (256)..(257): Selenocysteine
  MOD_RES (260)..(260): Selenocysteine
  MOD_RES (275)..(275): Selenocysteine
  MOD_RES (278)..(279): Selenocysteine
  MOD_RES (283)..(283): Selenocysteine
  MOD_RES (290)..(290): Selenocysteine
  MOD_RES (297)..(297): Selenocysteine
  MOD_RES (300)..(301): Selenocysteine
  MOD_RES (333)..(334): Selenocysteine
  MOD_RES (360)..(360): Selenocysteine
  MOD_RES (488)..(488): Selenocysteine
  MOD_RES (498)..(498): Selenocysteine
  MOD_RES (538)..(538): Selenocysteine
  MOD_RES (573)..(573): Selenocysteine
  MOD_RES (599)..(599): Selenocysteine
  MOD_RES (610)..(610): Selenocysteine
  MOD_RES (648)..(648): Selenocysteine
  MOD_RES (651)..(651): Selenocysteine
  MOD_RES (661)..(661): Selenocysteine
  MOD_RES (679)..(679): Selenocysteine
  MOD_RES (712)..(712): Selenocysteine
  MOD_RES (719)..(719): Selenocysteine
  MOD_RES (726)..(726): Selenocysteine
  MOD_RES (878)..(878): Selenocysteine
  MOD_RES (882)..(882): Selenocysteine
  MOD_RES (900)..(900): Selenocysteine
  MOD_RES (912)..(912): Selenocysteine
  MOD_RES (962)..(962): Selenocysteine
  MOD_RES (975)..(975): Selenocysteine
  MOD_RES (984)..(984): Selenocysteine
  MOD_RES (1000)..(1000): Selenocysteine
  MOD_RES (1038)..(1038): Selenocysteine
  MOD_RES (1048)..(1048): Selenocysteine
  MOD_RES (1050)..(1050): Selenocysteine
  MOD_RES (1062)..(1063): Selenocysteine
  MOD_RES (1066)..(1066): Selenocysteine
  MOD_RES (1082)..(1082): Selenocysteine
  MOD_RES (1112)..(1112): Selenocysteine
  MOD_RES (1136)..(1136): Selenocysteine
MDDSGELGGLEXMEXLXELGDELXLGDIDEMLQFVSNQVGEFPDLFSEQLCSSFPGSGGSGSSSGSSGSSSSSSNGRGSSSGAVDPSVQRSFXQVXLPSFSPSAASPQAPXLQVKVSPXSVPXXPRAXPILQPRPQPQPQPQXQLQQQXVMIXPXFSXXPQXRIIQQPLIYQNAAXSFQVLQPQVQSLVXSSQVQPVXIQQQVQXVQAQRVLXQXANGXLQXLAPAXVQXVAAPQVQQVPVLVQPQIIKXDSLVLXXLKXDGSPVMAAVQNPALXALXXPIQXAALQVPXLVGSSGXILXXMPVMMGQEKVPIKQVPGGVKQLEPPKEGERRXXHNIIEKRYRSSINDKIIELKDLVMGXDAKMHKSGVLRKAIDYIKYLQQVNHKLRQENMVLKLANQKNKLLKGIDLGSLVDNEVDLKIEDFNQNVLLMSPPASDSGSQAGFSPYSIDSEPGSPLLDDAKVKDEPDSPPVALGMVDRSRILLCVLXFLCLSFNPLXSLLQWGGAHDSDQHPHSGSGRSVLSFESGSGGWFDWMMPXLLLWLVNGVIVLSVFVKLLVHGEPVIRPHSRSSVXFWRHRKQADLDLARGDFAAAAGNLQXCLAVLGRALPXSRLDLACSLSWNVIRYSLQKLRLVRWLLKKVFQCRRAXPAXEAGFEDEAKXSARDAALAYHRLHQLHIXGKLPAGSACSDVHMALCAVNLAECAEEKIPPSXLVEIHLXAAMGLKXRCGGKLGFLASYFLSRAQSLCGPEHSAVPDSLRWLCHPLGQKFFMERSWSVKSAAKESLYCAQRNPADPIAQVHQAFCKNLLERAIESLVKPQAKKKAGDQEEESCEFSSALEYLKLLHSFVDSVGVMSPPLSRSSVLKSALGPDIICRWWXSAIXVAISWLQGDDAAVRSHFXKVERIPKALEVXESPLVKAIFHACRAMHASLPGKADGQQSSFCHCERASGHLWSSLNVSGAXSDPALNHVVQLLXCDLLLSLRXALWQKQASASQAVGEXYHASGAELAGFQRDLGSLRRLAHSFRPAYRKVFLHEAXVRLMAGASPXRXHQLLEHSLRRRXXQSXKHGEVDAWPGQRERAXAILLACRHLPLSFLSSPGQRAVLLAEAARXLEKVGDRRSCNDCQQMIVKLGGGXAIAAS

SEQ ID NO: 26333 - protein, 654 aa, Homo sapiens
  MOD_RES (63)..(63): Selenocysteine
  MOD_RES (66)..(66): Selenocysteine
  MOD_RES (81)..(81): Selenocysteine
  MOD_RES (89)..(89): Selenocysteine
  MOD_RES (93)..(94): Selenocysteine
  MOD_RES (98)..(98): Selenocysteine
  MOD_RES (113)..(113): Selenocysteine
  MOD_RES (119)..(119): Selenocysteine
  MOD_RES (123)..(123): Selenocysteine
  MOD_RES (125)..(125): Selenocysteine
  MOD_RES (128)..(129): Selenocysteine
  MOD_RES (132)..(132): Selenocysteine
  MOD_RES (146)..(146): Selenocysteine
  MOD_RES (160)..(160): Selenocysteine
  MOD_RES (168)..(168): Selenocysteine
  MOD_RES (175)..(175): Selenocysteine
  MOD_RES (183)..(183): Selenocysteine
  MOD_RES (185)..(185): Selenocysteine
  MOD_RES (189)..(189): Selenocysteine
  MOD_RES (192)..(192): Selenocysteine
  MOD_RES (197)..(197): Selenocysteine
  MOD_RES (200)..(200): Selenocysteine
  MOD_RES (220)..(220): Selenocysteine
  MOD_RES (226)..(227): Selenocysteine
  MOD_RES (230)..(230): Selenocysteine
  MOD_RES (245)..(245): Selenocysteine
  MOD_RES (248)..(249): Selenocysteine
  MOD_RES (253)..(253): Selenocysteine
  MOD_RES (260)..(260): Selenocysteine
  MOD_RES (267)..(267): Selenocysteine
  MOD_RES (270)..(271): Selenocysteine
  MOD_RES (303)..(304): Selenocysteine
  MOD_RES (330)..(330): Selenocysteine
  MOD_RES (458)..(458): Selenocysteine
  MOD_RES (468)..(468): Selenocysteine
  MOD_RES (508)..(508): Selenocysteine
  MOD_RES (543)..(543): Selenocysteine
  MOD_RES (567)..(567): Selenocysteine
  MOD_RES (582)..(582): Selenocysteine
  MOD_RES (584)..(584): Selenocysteine
  MOD_RES (586)..(586): Selenocysteine
  MOD_RES (601)..(601): Selenocysteine
  MOD_RES (611)..(611): Selenocysteine
  MOD_RES (635)..(635): Selenocysteine
MLQFVSNQVGEFPDLFSEQLCSSFPGSGGSGSSSGSSGSSSSSSNGRGSSSGAVDPSVQRSFXQVXLPSFSPSAASPQAPXLQVKVSPXSVPXXPRAXPILQPRPQPQPQPQXQLQQQXVMIXPXFSXXPQXRIIQQPLIYQNAAXSFQVLQPQVQSLVXSSQVQPVXIQQQVQXVQAQRVLXQXANGXLQXLAPAXVQXVAAPQVQQVPVLVQPQIIKXDSLVLXXLKXDGSPVMAAVQNPALXALXXPIQXAALQVPXLVGSSGXILXXMPVMMGQEKVPIKQVPGGVKQLEPPKEGERRXXHNIIEKRYRSSINDKIIELKDLVMGXDAKMHKSGVLRKAIDYIKYLQQVNHKLRQENMVLKLANQKNKLLKGIDLGSLVDNEVDLKIEDFNQNVLLMSPPASDSGSQAGFSPYSIDSEPGSPLLDDAKVKDEPDSPPVALGMVDRSRILLCVLXFLCLSFNPLXSLLQWGGAHDSDQHPHSGSGRSVLSFESGSGGWFDWMMPXLLLWLVNGVIVLSVFVKLLVHGEPVIRPHSRSSVXFWRHRKQADLDLARGVYGKKSGAXHSIEEELNIHISRGXRXRXLLSSRRFCSCCRQPXNLPGSFGPGXAHLPPGPGLQPLLERDPLQPAEAXPGALAAQESLPVPAGHASH

SEQ ID NO: 26334 - protein, 257 aa, Homo sapiens
  MOD_RES (1)..(1): Any amino acid
  MOD_RES (5)..(5): Selenocysteine
  MOD_RES (23)..(23): Selenocysteine
  MOD_RES (35)..(35): Selenocysteine
  MOD_RES (85)..(85): Selenocysteine
  MOD_RES (98)..(98): Selenocysteine
  MOD_RES (107)..(107): Selenocysteine
  MOD_RES (123)..(123): Selenocysteine
  MOD_RES (169)..(169): Selenocysteine
  MOD_RES (172)..(172): Selenocysteine
  MOD_RES (181)..(181): Selenocysteine
  MOD_RES (227)..(227): Selenocysteine
  MOD_RES (237)..(237): Selenocysteine
  MOD_RES (239)..(239): Selenocysteine
  MOD_RES (251)..(252): Selenocysteine
  MOD_RES (255)..(255): Selenocysteine
XSAIXVAISWLQGDDAAVRSHFXKVERIPKALEVXESPLVKAIFHACRAMHASLPGKADGQQSSFCHCERASGHLWSSLNVSGAXSDPALNHVVQLLXCDLLLSLRXALWQKQASASQAVGEXYHASGAELAGFQRDLGSLRRLAHSFRPAYRKAASRALGLHPGHLSXSPXRCVQGFLVXSWEKQAFCLSLLSSCSCCSARFPAWLRVRVRDNRGCFSGVFLHEAXVRLMAGASPXRXHQLLEHSLRRRXXQSXKH

SEQ ID NO: 26335 - protein, 508 aa, Homo sapiens
  MOD_RES (4)..(4): Selenocysteine
  MOD_RES (25)..(25): Selenocysteine
  MOD_RES (27)..(27): Selenocysteine
  MOD_RES (36)..(36): Selenocysteine
  MOD_RES (66)..(67): Selenocysteine
  MOD_RES (71)..(71): Selenocysteine
  MOD_RES (121)..(121): Selenocysteine
  MOD_RES (140)..(140): Selenocysteine
  MOD_RES (159)..(160): Selenocysteine
  MOD_RES (166)..(166): Selenocysteine
  MOD_RES (177)..(177): Selenocysteine
  MOD_RES (179)..(179): Selenocysteine
  MOD_RES (181)..(181): Selenocysteine
  MOD_RES (191)..(191): Selenocysteine
  MOD_RES (196)..(196): Selenocysteine
  MOD_RES (199)..(199): Selenocysteine
  MOD_RES (207)..(207): Selenocysteine
  MOD_RES (210)..(210): Selenocysteine
  MOD_RES (217)..(217): Selenocysteine
  MOD_RES (231)..(232): Selenocysteine
  MOD_RES (239)..(239): Selenocysteine
  MOD_RES (244)..(244): Selenocysteine
  MOD_RES (247)..(247): Selenocysteine
  MOD_RES (259)..(259): Selenocysteine
  MOD_RES (262)..(262): Selenocysteine
  MOD_RES (268)..(268): Selenocysteine
  MOD_RES (270)..(270): Selenocysteine
  MOD_RES (275)..(276): Selenocysteine
  MOD_RES (278)..(278): Selenocysteine
  MOD_RES (281)..(281): Selenocysteine
  MOD_RES (285)..(285): Selenocysteine
  MOD_RES (287)..(288): Selenocysteine
  MOD_RES (300)..(300): Selenocysteine
  MOD_RES (321)..(321): Selenocysteine
  MOD_RES (326)..(326): Selenocysteine
  MOD_RES (341)..(341): Selenocysteine
  MOD_RES (344)..(344): Selenocysteine
  MOD_RES (377)..(377): Selenocysteine
  MOD_RES (380)..(380): Selenocysteine
  MOD_RES (382)..(382): Selenocysteine
  MOD_RES (387)..(387): Selenocysteine
  MOD_RES (389)..(389): Selenocysteine
  MOD_RES (393)..(393): Selenocysteine
  MOD_RES (396)..(396): Selenocysteine
  MOD_RES (401)..(402): Selenocysteine
  MOD_RES (420)..(420): Selenocysteine
  MOD_RES (429)..(429): Selenocysteine
  MOD_RES (440)..(440): Selenocysteine
  MOD_RES (460)..(460): Selenocysteine
  MOD_RES (465)..(465): Selenocysteine
  MOD_RES (492)..(492): Selenocysteine
  MOD_RES (501)..(501): Selenocysteine
  MOD_RES (505)..(505): Selenocysteine
MLPXQAGAAAALGRGSALGGSLNRXPXGRPGGGGGXRGANGGRVPGNGAGLGPGRLEREAAAAAAXXPAPXAGALYSGSEGDSESGEEEELGAERRGLKRSLSEMEIGMVVGGPEASAAAXGGYGPVSGAVSGAKPGKKXRGRVKIKMEFIDNKLRRYXXFSKRKXGIMKKAYELSXLXGXQVLLLVASEXGHVYXFAXRKLQPMIXSEXGKALIQXCLNSPDSPPRSDPXXDQRMSAXGFEEXDLXYQVSESDSSGEXKDXLKPAFXVXNLPGXXSXIQXAPSXSXXMQVSSGPSFPIXNYLAPVSASVSPSAVSSANGXVLKSXGSGPVSSGGLMQLPXSFXLMPGGAVAQQVPVQAIQVHQAPQQASPSRDSSXDLXQXSSSGXVXLPAXIMXSSVPXXVGGHMMYPSPHAVMYAPXSGLGDGSLXVLNAFSQAPSXMQVSHSQVQEPGGVPQVFLXASSGXVQIPVSAVQLHQMAVIGQQAGSSSNLXELQVVNLDXAHSXKSE

SEQ ID NO: 26336 - protein, 1022 aa, Homo sapiens
  MOD_RES (21)..(21): Selenocysteine
  MOD_RES (38)..(38): Selenocysteine
  MOD_RES (41)..(41): Selenocysteine
  MOD_RES (76)..(76): Selenocysteine
  MOD_RES (97)..(97): Selenocysteine
  MOD_RES (123)..(123): Selenocysteine
  MOD_RES (127)..(127): Selenocysteine
  MOD_RES (206)..(206): Selenocysteine
  MOD_RES (210)..(210): Selenocysteine
  MOD_RES (243)..(243): Selenocysteine
  MOD_RES (253)..(253): Selenocysteine
  MOD_RES (328)..(328): Selenocysteine
  MOD_RES (339)..(340): Selenocysteine
  MOD_RES (343)..(343): Selenocysteine
  MOD_RES (346)..(346): Selenocysteine
  MOD_RES (352)..(352): Selenocysteine
  MOD_RES (368)..(368): Selenocysteine
  MOD_RES (374)..(374): Selenocysteine
  MOD_RES (378)..(378): Selenocysteine
  MOD_RES (395)..(395): Selenocysteine
  MOD_RES (414)..(414): Selenocysteine
  MOD_RES (426)..(426): Selenocysteine
  MOD_RES (437)..(438): Selenocysteine
  MOD_RES (447)..(447): Selenocysteine
  MOD_RES (559)..(559): Selenocysteine
  MOD_RES (599)..(599): Selenocysteine
  MOD_RES (622)..(622): Selenocysteine
  MOD_RES (629)..(629): Selenocysteine
  MOD_RES (661)..(661): Selenocysteine
  MOD_RES (671)..(671): Selenocysteine
  MOD_RES (675)..(675): Selenocysteine
  MOD_RES (742)..(742): Selenocysteine
  MOD_RES (746)..(746): Selenocysteine
  MOD_RES (761)..(761): Selenocysteine
  MOD_RES (774)..(774): Selenocysteine
  MOD_RES (801)..(801): Selenocysteine
  MOD_RES (856)..(856): Selenocysteine
  MOD_RES (876)..(876): Selenocysteine
  MOD_RES (882)..(882): Selenocysteine
  MOD_RES (894)..(894): Selenocysteine
  MOD_RES (902)..(902): Selenocysteine
  MOD_RES (905)..(905): Selenocysteine
  MOD_RES (918)..(918): Selenocysteine
  MOD_RES (929)..(929): Selenocysteine
  MOD_RES (938)..(938): Selenocysteine
  MOD_RES (941)..(941): Selenocysteine
  MOD_RES (943)..(943): Selenocysteine
  MOD_RES (965)..(965): Selenocysteine
  MOD_RES (971)..(971): Selenocysteine
  MOD_RES (974)..(974): Selenocysteine
  MOD_RES (1002)..(1002): Selenocysteine
  MOD_RES (1005)..(1005): Selenocysteine
  MOD_RES (1016)..(1016): Selenocysteine
  MOD_RES (1021)..(1021): Selenocysteine
MRVQLLQDLQDFFRKKAEIEXEYSRNLEKLAERFMAKXRSXKDHQQYKKDQNLLSPVNCWYLLLNQVRRESKDHAXLSDIYLNNVIMRFMQISEDSXRMFKKSKEIAFQLHEDLMKVLNELYXVMKXYHMYHAESISAESKLKEAEKQEEKQIGRSGDPVFHIRLEERHQRRSSVKKIEKMKEKRQAKYSENKLKSIKARNEYLLXLEAXNASVFKYYIHDLSDLIDCCDLGYHASLNRALRXYLSAEYNLEXSRHEGLDIIENAVDNLEPRSDKQRFMEMYPAAFCPPMKFEFQSHMGDEVCQVSAQQPVQAELMLRYQQLQSRLAXLKIENEEVKKXXEAXLQXIQDMVXIEDYDVSECFQHSRSXESVKSXVSEXYLSKPSIAKRRANQQEXEQFYFMKLREYLEGSNLIXKLQAKHDLLQRXLGEGHRAEYMXXSRGRRNSHXRHQDSGQVIPLIVESCIRFINLYGLQHQGIFRVSGSQVEVNDIKNSFERGENPLADDQSNHDINSVAGVLKLYFRGLENPLFPKERFNDLISCIRIDNLYERALHIRKLLLXLPRSVLIVMRYLFAFLNHLSQYSDENMMDPYNLAICFGPXLMPVPEIQDQVSCQAHVNEIIKXIIIHHEXIFPDAKELDGPVYEKCMAGDDYCDSPYSEHGXLEEVDQDAGXEPHXSEDECEPIEAIAKFDYVGRSARELSFKKGASLLLYHRASEDWWEGRHNGIDGLVPHQYIVVQDMDDXFSDXLSQKADSEASSGPVXEDKSSSKDMNSPXDRHPDGYLARQRKRGEPPPPVRRPGRXSDGHCPLHPPHALSNSSVDLGSPSLASHPRGLLQNRGLNNDSPERRRRPGHGSLXNISRHDSLKKIDSPPIRRSXSSGQYXGFNDHKPLDPEXIAQDIEEXMNXALNELRELERQSXAKHAPDVVLDXLEQVKNSPXPAXSXESLSPLHNVALRSSEPQIRRSXSSSSDXMSXFKPMVAPRMGVQLKPPALRPKPAVLPKXNPXIGPAPPPQGPXDKSCXM

SEQ ID NO: 26337 - protein, 1085 aa, Homo sapiens
  MOD_RES (3)..(3): Selenocysteine
  MOD_RES (39)..(39): Selenocysteine
  MOD_RES (61)..(61): Selenocysteine
  MOD_RES (78)..(78): Selenocysteine
  MOD_RES (81)..(81): Selenocysteine
  MOD_RES (116)..(116): Selenocysteine
  MOD_RES (137)..(137): Selenocysteine
  MOD_RES (163)..(163): Selenocysteine
  MOD_RES (167)..(167): Selenocysteine
  MOD_RES (246)..(246): Selenocysteine
  MOD_RES (250)..(250): Selenocysteine
  MOD_RES (283)..(283): Selenocysteine
  MOD_RES (293)..(293): Selenocysteine
  MOD_RES (368)..(368): Selenocysteine
  MOD_RES (379)..(380): Selenocysteine
  MOD_RES (383)..(383): Selenocysteine
  MOD_RES (386)..(386): Selenocysteine
  MOD_RES (392)..(392): Selenocysteine
  MOD_RES (408)..(408): Selenocysteine
  MOD_RES (414)..(414): Selenocysteine
  MOD_RES (418)..(418): Selenocysteine
  MOD_RES (435)..(435): Selenocysteine
  MOD_RES (454)..(454): Selenocysteine
  MOD_RES (466)..(466): Selenocysteine
  MOD_RES (477)..(478): Selenocysteine
  MOD_RES (501)..(501): Selenocysteine
  MOD_RES (510)..(510): Selenocysteine
  MOD_RES (622)..(622): Selenocysteine
  MOD_RES (662)..(662): Selenocysteine
  MOD_RES (685)..(685): Selenocysteine
  MOD_RES (692)..(692): Selenocysteine
  MOD_RES (724)..(724): Selenocysteine
  MOD_RES (734)..(734): Selenocysteine
  MOD_RES (738)..(738): Selenocysteine
  MOD_RES (805)..(805): Selenocysteine
  MOD_RES (809)..(809): Selenocysteine
  MOD_RES (824)..(824): Selenocysteine
  MOD_RES (837)..(837): Selenocysteine
  MOD_RES (864)..(864): Selenocysteine
  MOD_RES (919)..(919): Selenocysteine
  MOD_RES (939)..(939): Selenocysteine
  MOD_RES (945)..(945): Selenocysteine
  MOD_RES (957)..(957): Selenocysteine
  MOD_RES (965)..(965): Selenocysteine
  MOD_RES (968)..(968): Selenocysteine
  MOD_RES (981)..(981): Selenocysteine
  MOD_RES (992)..(992): Selenocysteine
  MOD_RES (1001)..(1001): Selenocysteine
  MOD_RES (1004)..(1004): Selenocysteine
  MOD_RES (1006)..(1006): Selenocysteine
  MOD_RES (1028)..(1028): Selenocysteine
  MOD_RES (1034)..(1034): Selenocysteine
  MOD_RES (1037)..(1037): Selenocysteine
  MOD_RES (1065)..(1065): Selenocysteine
  MOD_RES (1068)..(1068): Selenocysteine
  MOD_RES (1079)..(1079): Selenocysteine
  MOD_RES (1084)..(1084): Selenocysteine
MSXPSRFKKDKEIIAEYESQVKEIRAQLVEQQKCLEQQXEMRVQLLQDLQDFFRKKAEIEXEYSRNLEKLAERFMAKXRSXKDHQQYKKDQNLLSPVNCWYLLLNQVRRESKDHAXLSDIYLNNVIMRFMQISEDSXRMFKKSKEIAFQLHEDLMKVLNELYXVMKXYHMYHAESISAESKLKEAEKQEEKQIGRSGDPVFHIRLEERHQRRSSVKKIEKMKEKRQAKYSENKLKSIKARNEYLLXLEAXNASVFKYYIHDLSDLIDCCDLGYHASLNRALRXYLSAEYNLEXSRHEGLDIIENAVDNLEPRSDKQRFMEMYPAAFCPPMKFEFQSHMGDEVCQVSAQQPVQAELMLRYQQLQSRLAXLKIENEEVKKXXEAXLQXIQDMVXIEDYDVSECFQHSRSXESVKSXVSEXYLSKPSIAKRRANQQEXEQFYFMKLREYLEGSNLIXKLQAKHDLLQRXLGEGHRAEYMXXRPPNVPPKPQKHRKSRPRSQYNXKLFNGDLEXFVKDSGQVIPLIVESCIRFINLYGLQHQGIFRVSGSQVEVNDIKNSFERGENPLADDQSNHDINSVAGVLKLYFRGLENPLFPKERFNDLISCIRIDNLYERALHIRKLLLXLPRSVLIVMRYLFAFLNHLSQYSDENMMDPYNLAICFGPXLMPVPEIQDQVSCQAHVNEIIKXIIIHHEXIFPDAKELDGPVYEKCMAGDDYCDSPYSEHGXLEEVDQDAGXEPHXSEDECEPIEAIAKFDYVGRSARELSFKKGASLLLYHRASEDWWEGRHNGIDGLVPHQYIVVQDMDDXFSDXLSQKADSEASSGPVXEDKSSSKDMNSPXDRHPDGYLARQRKRGEPPPPVRRPGRXSDGHCPLHPPHALSNSSVDLGSPSLASHPRGLLQNRGLNNDSPERRRRPGHGSLXNISRHDSLKKIDSPPIRRSXSSGQYXGFNDHKPLDPEXIAQDIEEXMNXALNELRELERQSXAKHAPDVVLDXLEQVKNSPXPAXSXESLSPLHNVALRSSEPQIRRSXSSSSDXMSXFKPMVAPRMGVQLKPPALRPKPAVLPKXNPXIGPAPPPQGPXDKSCXM

SEQ ID NO: 26338 - protein, 294 aa, Homo sapiens
  MOD_RES (17)..(17): Selenocysteine
  MOD_RES (61)..(61): Selenocysteine
  MOD_RES (87)..(87): Selenocysteine
  MOD_RES (117)..(117): Selenocysteine
  MOD_RES (121)..(122): Selenocysteine
  MOD_RES (136)..(136): Selenocysteine
  MOD_RES (149)..(149): Selenocysteine
  MOD_RES (209)..(209): Selenocysteine
  MOD_RES (211)..(211): Selenocysteine
  MOD_RES (236)..(236): Selenocysteine
  MOD_RES (256)..(256): Selenocysteine
  MOD_RES (263)..(263): Selenocysteine
  MOD_RES (269)..(269): Selenocysteine
  MOD_RES (276)..(276): Selenocysteine
  MOD_RES (285)..(285): Selenocysteine
ECEPIEAIAKFDYVGRXARELSFKKGASLLLYQRASDDWWEGRHNGIDGLIPHQYIVVQDXEDGVVERSSPKSEIEVISEPPEEKVXARAGASCPSGGHVADIYLANINNNLHLDNXKPVXXKQRKRPESGSIRKXFRSDSHGLSSSLXDSSSPGVGASCRPSSQPIMSQSLPKEGPDKCSISGHGSLNSISRHSSLKNRLDSPQIRKXAXAGRSKSFNNHRPMDPEVIAQDIEAXMNSALNELRELERQSSVKHXPDVVLDXLEPLKXSPVVAPXSEPSSPLHXQLLKDPEPA

SEQ ID NO: 26339 - protein, 118 aa, Homo sapiens
  MOD_RES (47)..(47): Selenocysteine
  MOD_RES (50)..(50): Selenocysteine
  MOD_RES (99)..(99): Selenocysteine
MKCLDQQCELRVQLLQDLQDFFRKKAEIEMDYSRNLEKLAERFLAKXRSXKDQQFKKDQNVLSPVNCWNLLLNQSKEVGQQLQDDLMKVLNELYSVMKXYHMYNADSISAQSKLKEAE

SEQ ID NO: 26340 - protein, 305 aa, Homo sapiens
  MOD_RES (13)..(13): Selenocysteine
  MOD_RES (50)..(50): Selenocysteine
  MOD_RES (57)..(57): Selenocysteine
  MOD_RES (87)..(87): Selenocysteine
  MOD_RES (107)..(107): Selenocysteine
  MOD_RES (140)..(140): Selenocysteine
  MOD_RES (169)..(169): Selenocysteine
  MOD_RES (225)..(225): Selenocysteine
  MOD_RES (236)..(236): Selenocysteine
  MOD_RES (240)..(240): Selenocysteine
  MOD_RES (243)..(243): Selenocysteine
  MOD_RES (249)..(249): Selenocysteine
  MOD_RES (271)..(271): Selenocysteine
  MOD_RES (275)..(275): Selenocysteine
  MOD_RES (292)..(292): Selenocysteine
  MOD_RES (298)..(298): Selenocysteine
MKVLNELYSVMKXYHMYNADSISAQSKLKEAEKQEEKQIGKSVKQEDRQXPRSPDSXANVRIEEKHVRRSSVKKIEKMKEKRQAKYXENKLKAIKARNEYLLALEAXNASVFKYYIHDLSDLIDCCDLGYHASLNRALRXFLSAELNLEQSKHEGLDAIENAVENLDAXSDKQRLMEMYNNVFCPPMKFEFQPHMGDMASQLCAQQPVQSELVQRCQQLQSRLSXLKIENEEVKKXMEAXLQXIQDIVXVEDFDVSDCFQYSNSMESVKSXVSEXFMSKPSIAKRRANQQEXEQFYFXVRECYGF

SEQ ID NO: 26341 - protein, 86 aa, Homo sapiens
  MOD_RES (2)..(2): Selenocysteine
  MOD_RES (19)..(19): Selenocysteine
  MOD_RES (29)..(29): Selenocysteine
  MOD_RES (78)..(78): Selenocysteine
  MOD_RES (81)..(81): Selenocysteine
MXSPAKFKKDKEIIAEYDXQVKEIRAQLXEQMKCLDQQCELRVQLLQDLQDFFRKKAEIEMDYSRNLEKLAERFLAKXRSXKDQQF

SEQ ID NO: 26342 - protein, 789 aa, Homo sapiens
  MOD_RES (2)..(2): Selenocysteine
  MOD_RES (19)..(19): Selenocysteine
  MOD_RES (29)..(29): Selenocysteine
  MOD_RES (78)..(78): Selenocysteine
  MOD_RES (81)..(81): Selenocysteine
  MOD_RES (114)..(115): Selenocysteine
  MOD_RES (166)..(166): Selenocysteine
  MOD_RES (203)..(203): Selenocysteine
  MOD_RES (210)..(210): Selenocysteine
  MOD_RES (240)..(240): Selenocysteine
  MOD_RES (260)..(260): Selenocysteine
  MOD_RES (293)..(293): Selenocysteine
  MOD_RES (322)..(322): Selenocysteine
  MOD_RES (378)..(378): Selenocysteine
  MOD_RES (389)..(389): Selenocysteine
  MOD_RES (393)..(393): Selenocysteine
  MOD_RES (396)..(396): Selenocysteine
  MOD_RES (402)..(402): Selenocysteine
  MOD_RES (424)..(424): Selenocysteine
  MOD_RES (428)..(428): Selenocysteine
  MOD_RES (445)..(445): Selenocysteine
  MOD_RES (451)..(451): Selenocysteine
  MOD_RES (464)..(464): Selenocysteine
  MOD_RES (476)..(476): Selenocysteine
  MOD_RES (483)..(483): Selenocysteine
  MOD_RES (493)..(493): Selenocysteine
  MOD_RES (589)..(589): Selenocysteine
  MOD_RES (610)..(611): Selenocysteine
  MOD_RES (669)..(669): Selenocysteine
  MOD_RES (706)..(707): Selenocysteine
  MOD_RES (713)..(713): Selenocysteine
  MOD_RES (717)..(717): Selenocysteine
  MOD_RES (722)..(722): Selenocysteine
  MOD_RES (742)..(742): Selenocysteine
  MOD_RES (786)..(786): Selenocysteine
MXSPAKFKKDKEIIAEYDXQVKEIRAQLXEQMKCLDQQCELRVQLLQDLQDFFRKKAEIEMDYSRNLEKLAERFLAKXRSXKDQQFKKDQNVLSPVNCWNLLLNQVKRESRDHXXLSDIYLNNIIPRFVQVSEDSGRLFKKSKEVGQQLQDDLMKVLNELYSVMKXYHMYNADSISAQSKLKEAEKQEEKQIGKSVKQEDRQXPRSPDSXANVRIEEKHVRRSSVKKIEKMKEKRQAKYXENKLKAIKARNEYLLALEAXNASVFKYYIHDLSDLIDCCDLGYHASLNRALRXFLSAELNLEQSKHEGLDAIENAVENLDAXSDKQRLMEMYNNVFCPPMKFEFQPHMGDMASQLCAQQPVQSELVQRCQQLQSRLSXLKIENEEVKKXMEAXLQXIQDIVXVEDFDVSDCFQYSNSMESVKSXVSEXFMSKPSIAKRRANQQEXEQFYFXKMKEYLEGRNLIXKLQAKHDLLQKXLGESQRXDCSLARRSSXVRKQDSSQAIPLVVESCIRFISRHGLQHEGIFRVSGSQVEVNDIKNAFERGEDPLAGDQNDHDMDSIAGVLKLYFRGLEHPLFPKDIFHDLMACVXMDNLQERALHIRKVLLVLPKXXLIIMRYLFAFLNHLSQFSEENMMDPYNLAICFGPSLMSVPEGHDQVSCQAHVNELIKXIIIQHENIFPSPRELEGPVYSRGGSMEDYCDSPHGEXXSVEDSXQDVXAEHHXSDDECEPIEAIAKFDYVGRXARELSFKKGASLLLYQRASDDWWEGRHNGIDGLIPHQYIVVQDXLIS

SEQ ID NO: 26343 - protein, 1070 aa, Homo sapiens
  MOD_RES (2)..(2): Selenocysteine
  MOD_RES (19)..(19): Selenocysteine
  MOD_RES (29)..(29): Selenocysteine
  MOD_RES (78)..(78): Selenocysteine
  MOD_RES (81)..(81): Selenocysteine
  MOD_RES (114)..(115): Selenocysteine
  MOD_RES (166)..(166): Selenocysteine
  MOD_RES (203)..(203): Selenocysteine
  MOD_RES (210)..(210): Selenocysteine
  MOD_RES (240)..(240): Selenocysteine
  MOD_RES (260)..(260): Selenocysteine
  MOD_RES (293)..(293): Selenocysteine
  MOD_RES (322)..(322): Selenocysteine
  MOD_RES (378)..(378): Selenocysteine
  MOD_RES (389)..(389): Selenocysteine
  MOD_RES (393)..(393): Selenocysteine
  MOD_RES (396)..(396): Selenocysteine
  MOD_RES (402)..(402): Selenocysteine
  MOD_RES (424)..(424): Selenocysteine
  MOD_RES (428)..(428): Selenocysteine
  MOD_RES (445)..(445): Selenocysteine
  MOD_RES (451)..(451): Selenocysteine
  MOD_RES (464)..(464): Selenocysteine
  MOD_RES (476)..(476): Selenocysteine
  MOD_RES (483)..(483): Selenocysteine
  MOD_RES (493)..(493): Selenocysteine
  MOD_RES (589)..(589): Selenocysteine
  MOD_RES (610)..(611): Selenocysteine
  MOD_RES (669)..(669): Selenocysteine
  MOD_RES (706)..(707): Selenocysteine
  MOD_RES (713)..(713): Selenocysteine
  MOD_RES (717)..(717): Selenocysteine
  MOD_RES (722)..(722): Selenocysteine
  MOD_RES (742)..(742): Selenocysteine
  MOD_RES (786)..(786): Selenocysteine
  MOD_RES (812)..(812): Selenocysteine
  MOD_RES (848)..(848): Selenocysteine
  MOD_RES (861)..(861): Selenocysteine
  MOD_RES (921)..(921): Selenocysteine
  MOD_RES (923)..(923): Selenocysteine
  MOD_RES (948)..(948): Selenocysteine
  MOD_RES (968)..(968): Selenocysteine
  MOD_RES (975)..(975): Selenocysteine
  MOD_RES (981)..(981): Selenocysteine
  MOD_RES (988)..(988): Selenocysteine
  MOD_RES (997)..(997): Selenocysteine
  MOD_RES (1013)..(1013): Selenocysteine
  MOD_RES (1038)..(1038): Selenocysteine
  MOD_RES (1043)..(1043): Selenocysteine
  MOD_RES (1048)..(1048): Selenocysteine
  MOD_RES (1051)..(1051): Selenocysteine
  MOD_RES (1059)..(1059): Selenocysteine
  MOD_RES (1064)..(1064): Selenocysteine
  MOD_RES (1069)..(1069): Selenocysteine
MXSPAKFKKDKEIIAEYDXQVKEIRAQLXEQMKCLDQQCELRVQLLQDLQDFFRKKAEIEMDYSRNLEKLAERFLAKXRSXKDQQFKKDQNVLSPVNCWNLLLNQVKRESRDHXXLSDIYLNNIIPRFVQVSEDSGRLFKKSKEVGQQLQDDLMKVLNELYSVMKXYHMYNADSISAQSKLKEAEKQEEKQIGKSVKQEDRQXPRSPDSXANVRIEEKHVRRSSVKKIEKMKEKRQAKYXENKLKAIKARNEYLLALEAXNASVFKYYIHDLSDLIDCCDLGYHASLNRALRXFLSAELNLEQSKHEGLDAIENAVENLDAXSDKQRLMEMYNNVFCPPMKFEFQPHMGDMASQLCAQQPVQSELVQRCQQLQSRLSXLKIENEEVKKXMEAXLQXIQDIVXVEDFDVSDCFQYSNSMESVKSXVSEXFMSKPSIAKRRANQQEXEQFYFXKMKEYLEGRNLIXKLQAKHDLLQKXLGESQRXDCSLARRSSXVRKQDSSQAIPLVVESCIRFISRHGLQHEGIFRVSGSQVEVNDIKNAFERGEDPLAGDQNDHDMDSIAGVLKLYFRGLEHPLFPKDIFHDLMACVXMDNLQERALHIRKVLLVLPKXXLIIMRYLFAFLNHLSQFSEENMMDPYNLAICFGPSLMSVPEGHDQVSCQAHVNELIKXIIIQHENIFPSPRELEGPVYSRGGSMEDYCDSPHGEXXSVEDSXQDVXAEHHXSDDECEPIEAIAKFDYVGRXARELSFKKGASLLLYQRASDDWWEGRHNGIDGLIPHQYIVVQDXEDGVVERSSPKSEIEVISEPPEEKVXARAGASCPSGGHVADIYLANINKQRKRPESGSIRKXFRSDSHGLSSSLXDSSSPGVGASCRPSSQPIMSQSLPKEGPDKCSISGHGSLNSISRHSSLKNRLDSPQIRKXAXAGRSKSFNNHRPMDPEVIAQDIEAXMNSALNELRELERQSSVKHXPDVVLDXLEPLKXSPVVAPXSEPSSPLHXQLLKDPEPAFQRSASXAGDIACAFRPVKSVKMAAPVKPPAXRPKPXVFPKXNAXSPGVNSSXSPQSXDKSCXV

SEQ ID NO: 26344 - protein, 1071 aa, Homo sapiens
  MOD_RES (2)..(2): Selenocysteine
  MOD_RES (19)..(19): Selenocysteine
  MOD_RES (29)..(29): Selenocysteine
  MOD_RES (78)..(78): Selenocysteine
  MOD_RES (81)..(81): Selenocysteine
  MOD_RES (114)..(115): Selenocysteine
  MOD_RES (166)..(166): Selenocysteine
  MOD_RES (203)..(203): Selenocysteine
  MOD_RES (210)..(210): Selenocysteine
  MOD_RES (240)..(240): Selenocysteine
  MOD_RES (260)..(260): Selenocysteine
  MOD_RES (294)..(294): Selenocysteine
  MOD_RES (323)..(323): Selenocysteine
  MOD_RES (379)..(379): Selenocysteine
  MOD_RES (390)..(390): Selenocysteine
  MOD_RES (394)..(394): Selenocysteine
  MOD_RES (397)..(397): Selenocysteine
  MOD_RES (403)..(403): Selenocysteine
  MOD_RES (425)..(425): Selenocysteine
  MOD_RES (429)..(429): Selenocysteine
  MOD_RES (446)..(446): Selenocysteine
  MOD_RES (452)..(452): Selenocysteine
  MOD_RES (465)..(465): Selenocysteine
  MOD_RES (477)..(477): Selenocysteine
  MOD_RES (484)..(484): Selenocysteine
  MOD_RES (494)..(494): Selenocysteine
  MOD_RES (590)..(590): Selenocysteine
  MOD_RES (611)..(612): Selenocysteine
  MOD_RES (670)..(670): Selenocysteine
  MOD_RES (707)..(708): Selenocysteine
  MOD_RES (714)..(714): Selenocysteine
  MOD_RES (718)..(718): Selenocysteine
  MOD_RES (723)..(723): Selenocysteine
  MOD_RES (743)..(743): Selenocysteine
  MOD_RES (787)..(787): Selenocysteine
  MOD_RES (813)..(813): Selenocysteine
  MOD_RES (849)..(849): Selenocysteine
  MOD_RES (862)..(862): Selenocysteine
  MOD_RES (922)..(922): Selenocysteine
  MOD_RES (924)..(924): Selenocysteine
  MOD_RES (949)..(949): Selenocysteine
  MOD_RES (969)..(969): Selenocysteine
  MOD_RES (976)..(976): Selenocysteine
  MOD_RES (982)..(982): Selenocysteine
  MOD_RES (989)..(989): Selenocysteine
  MOD_RES (998)..(998): Selenocysteine
  MOD_RES (1014)..(1014): Selenocysteine
  MOD_RES (1039)..(1039): Selenocysteine
  MOD_RES (1044)..(1044): Selenocysteine
  MOD_RES (1049)..(1049): Selenocysteine
  MOD_RES (1052)..(1052): Selenocysteine
  MOD_RES (1060)..(1060): Selenocysteine
  MOD_RES (1065)..(1065): Selenocysteine
  MOD_RES (1070)..(1070): Selenocysteine
MXSPAKFKKDKEIIAEYDXQVKEIRAQLXEQMKCLDQQCELRVQLLQDLQDFFRKKAEIEMDYSRNLEKLAERFLAKXRSXKDQQFKKDQNVLSPVNCWNLLLNQVKRESRDHXXLSDIYLNNIIPRFVQVSEDSGRLFKKSKEVGQQLQDDLMKVLNELYSVMKXYHMYNADSISAQSKLKEAEKQEEKQIGKSVKQEDRQXPRSPDSXANVRIEEKHVRRSSVKKIEKMKEKRQAKYXENKLKAIKARNEYLLALEAXNASVFKYYIHDLSDLIDQCCDLGYHASLNRALRXFLSAELNLEQSKHEGLDAIENAVENLDAXSDKQRLMEMYNNVFCPPMKFEFQPHMGDMASQLCAQQPVQSELVQRCQQLQSRLSXLKIENEEVKKXMEAXLQXIQDIVXVEDFDVSDCFQYSNSMESVKSXVSEXFMSKPSIAKRRANQQEXEQFYFXKMKEYLEGRNLIXKLQAKHDLLQKXLGESQRXDCSLARRSSXVRKQDSSQAIPLVVESCIRFISRHGLQHEGIFRVSGSQVEVNDIKNAFERGEDPLAGDQNDHDMDSIAGVLKLYFRGLEHPLFPKDIFHDLMACVXMDNLQERALHIRKVLLVLPKXXLIIMRYLFAFLNHLSQFSEENMMDPYNLAICFGPSLMSVPEGHDQVSCQAHVNELIKXIIIQHENIFPSPRELEGPVYSRGGSMEDYCDSPHGEXXSVEDSXQDVXAEHHXSDDECEPIEAIAKFDYVGRXARELSFKKGASLLLYQRASDDWWEGRHNGIDGLIPHQYIVVQDXEDGVVERSSPKSEIEVISEPPEEKVXARAGASCPSGGHVADIYLANINKQRKRPESGSIRKXFRSDSHGLSSSLXDSSSPGVGASCRPSSQPIMSQSLPKEGPDKCSISGHGSLNSISRHSSLKNRLDSPQIRKXAXAGRSKSFNNHRPMDPEVIAQDIEAXMNSALNELRELERQSSVKHXPDVVLDXLEPLKXSPVVAPXSEPSSPLHXQLLKDPEPAFQRSASXAGDIACAFRPVKSVKMAAPVKPPAXRPKPXVFPKXNAXSPGVNSSXSPQSXDKSCXV

SEQ ID NO: 26345 - protein, 450 aa, Homo sapiens
  MOD_RES (4)..(4): Selenocysteine
  MOD_RES (8)..(8): Selenocysteine
  MOD_RES (11)..(11): Selenocysteine
  MOD_RES (17)..(17): Selenocysteine
  MOD_RES (39)..(39): Selenocysteine
  MOD_RES (43)..(43): Selenocysteine
  MOD_RES (60)..(60): Selenocysteine
  MOD_RES (66)..(66): Selenocysteine
  MOD_RES (79)..(79): Selenocysteine
  MOD_RES (91)..(91): Selenocysteine
  MOD_RES (98)..(98): Selenocysteine
  MOD_RES (108)..(108): Selenocysteine
  MOD_RES (204)..(204): Selenocysteine
  MOD_RES (225)..(226): Selenocysteine
  MOD_RES (284)..(284): Selenocysteine
  MOD_RES (321)..(322): Selenocysteine
  MOD_RES (328)..(328): Selenocysteine
  MOD_RES (332)..(332): Selenocysteine
  MOD_RES (337)..(337): Selenocysteine
  MOD_RES (357)..(357): Selenocysteine
  MOD_RES (401)..(401): Selenocysteine
  MOD_RES (427)..(427): Selenocysteine
VKKXMEAXLQXIQDIVXVEDFDVSDCFQYSNSMESVKSXVSEXFMSKPSIAKRRANQQEXEQFYFXKMKEYLEGRNLIXKLQAKHDLLQKXLGESQRXDCSLARRSSXVRKQDSSQAIPLVVESCIRFISRHGLQHEGIFRVSGSQVEVNDIKNAFERGEDPLAGDQNDHDMDSIAGVLKLYFRGLEHPLFPKDIFHDLMACVXMDNLQERALHIRKVLLVLPKXXLIIMRYLFAFLNHLSQFSEENMMDPYNLAICFGPSLMSVPEGHDQVSCQAHVNELIKXIIIQHENIFPSPRELEGPVYSRGGSMEDYCDSPHGEXXSVEDSXQDVXAEHHXSDDECEPIEAIAKFDYVGRXARELSFKKGASLLLYQRASDDWWEGRHNGIDGLIPHQYIVVQDXEDGVVERSSPKSEIEVISEPPEEKVXARAGASCPSGGHVADIYLANINK

SEQ ID NO: 26346 - protein, 224 aa, Homo sapiens
  MOD_RES (1)..(1): Any amino acid
  MOD_RES (53)..(53): Selenocysteine
  MOD_RES (90)..(91): Selenocysteine
  MOD_RES (97)..(97): Selenocysteine
  MOD_RES (101)..(101): Selenocysteine
  MOD_RES (106)..(106): Selenocysteine
  MOD_RES (126)..(126): Selenocysteine
  MOD_RES (170)..(170): Selenocysteine
  MOD_RES (196)..(196): Selenocysteine
XLFAFLNHLSQFSEENMMDPYNLAICFGPSLMSVPEGHDQVSCQAHVNELIKXIIIQHENIFPSPRELEGPVYSRGGSMEDYCDSPHGEXXSVEDSXQDVXAEHHXSDDECEPIEAIAKFDYVGRXARELSFKKGASLLLYQRASDDWWEGRHNGIDGLIPHQYIVVQDXEDGVVERSSPKSEIEVISEPPEEKVXARAGASCPSGGHVADIYLANINNFHCGC

SEQ ID NO: 26347 - protein, 335 aa, Homo sapiens
  MOD_RES (37)..(37): Selenocysteine
  MOD_RES (42)..(42): Selenocysteine
  MOD_RES (46)..(46): Selenocysteine
  MOD_RES (117)..(117): Selenocysteine
  MOD_RES (130)..(130): Selenocysteine
  MOD_RES (160)..(160): Selenocysteine
  MOD_RES (163)..(163): Selenocysteine
  MOD_RES (173)..(173): Selenocysteine
  MOD_RES (197)..(197): Selenocysteine
  MOD_RES (233)..(233): Selenocysteine
  MOD_RES (248)..(248): Selenocysteine
  MOD_RES (259)..(259): Selenocysteine
  MOD_RES (263)..(263): Selenocysteine
  MOD_RES (266)..(266): Selenocysteine
  MOD_RES (272)..(272): Selenocysteine
  MOD_RES (288)..(288): Selenocysteine
  MOD_RES (298)..(298): Selenocysteine
  MOD_RES (315)..(315): Selenocysteine
  MOD_RES (321)..(321): Selenocysteine
MNNVIVRLSQISEDVIRLFKKSKEIGLQMHEELLKVXNELYXVMKXYHMYHAESISAESKLKEAEKQEEKQFNKSGDLSMNLLRHEDRPQRRSSVKKIEKMKEKRQAKYSENKLKCXKARNDYLLNLAAXNAAISKYYIHDVSDLIDCCDLGFHASLARXFRXYLSAEYNLEXSRHEGLDVIENAVDNLDSRSDKHXVMDMCNQVFCPPLKFEFQPHMGDEVCQVSAQQPVQXELLMRYHQLQSRLAXLKIENEEVRKXLDAXMQXLQDMLXVEDFDVSDAFQHSRSXESVKSAASEXYMSKINIAKRRANQQEXEMFYFXKGPDDVFPICHPRL

SEQ ID NO: 26348 - protein, 1075 aa, Homo sapiens
  MOD_RES (5)..(5): Selenocysteine
  MOD_RES (26)..(26): Selenocysteine
  MOD_RES (106)..(106): Selenocysteine
  MOD_RES (115)..(115): Selenocysteine
  MOD_RES (157)..(157): Selenocysteine
  MOD_RES (162)..(162): Selenocysteine
  MOD_RES (166)..(166): Selenocysteine
  MOD_RES (237)..(237): Selenocysteine
  MOD_RES (250)..(250): Selenocysteine
  MOD_RES (280)..(280): Selenocysteine
  MOD_RES (283)..(283): Selenocysteine
  MOD_RES (293)..(293): Selenocysteine
  MOD_RES (317)..(317): Selenocysteine
  MOD_RES (353)..(353): Selenocysteine
  MOD_RES (368)..(368): Selenocysteine
  MOD_RES (379)..(379): Selenocysteine
  MOD_RES (383)..(383): Selenocysteine
  MOD_RES (386)..(386): Selenocysteine
  MOD_RES (392)..(392): Selenocysteine
  MOD_RES (408)..(408): Selenocysteine
  MOD_RES (418)..(418): Selenocysteine
  MOD_RES (435)..(435): Selenocysteine
  MOD_RES (441)..(441): Selenocysteine
  MOD_RES (454)..(454): Selenocysteine
  MOD_RES (466)..(466): Selenocysteine
  MOD_RES (477)..(478): Selenocysteine
  MOD_RES (486)..(486): Selenocysteine
  MOD_RES (579)..(579): Selenocysteine
  MOD_RES (598)..(598): Selenocysteine
  MOD_RES (638)..(638): Selenocysteine
  MOD_RES (661)..(661): Selenocysteine
  MOD_RES (711)..(711): Selenocysteine
  MOD_RES (715)..(715): Selenocysteine
  MOD_RES (815)..(815): Selenocysteine
  MOD_RES (848)..(848): Selenocysteine
  MOD_RES (861)..(861): Selenocysteine
  MOD_RES (878)..(878): Selenocysteine
  MOD_RES (892)..(892): Selenocysteine
  MOD_RES (916)..(916): Selenocysteine
  MOD_RES (920)..(920): Selenocysteine
  MOD_RES (943)..(943): Selenocysteine
  MOD_RES (946)..(946): Selenocysteine
  MOD_RES (959)..(959): Selenocysteine
  MOD_RES (970)..(970): Selenocysteine
  MOD_RES (991)..(991): Selenocysteine
  MOD_RES (1009)..(1009): Selenocysteine
  MOD_RES (1013)..(1014): Selenocysteine
  MOD_RES (1058)..(1058): Selenocysteine
  MOD_RES (1060)..(1060): Selenocysteine
  MOD_RES (1074)..(1074): Selenocysteine
MSSQXKFKKDKEIIAEYEAQIKEIRXQLVEQFKCLEQQSESRLQLLQDLQEFFRRKAEIELEYSRSLEKLAERFSSKIRSSREHQFKKDQYLLSPVNCWYLVLHQXRRESRDHAXLNDIFMNNVIVRLSQISEDVIRLFKKSKEIGLQMHEELLKVXNELYXVMKXYHMYHAESISAESKLKEAEKQEEKQFNKSGDLSMNLLRHEDRPQRRSSVKKIEKMKEKRQAKYSENKLKCXKARNDYLLNLAAXNAAISKYYIHDVSDLIDCCDLGFHASLARXFRXYLSAEYNLEXSRHEGLDVIENAVDNLDSRSDKHXVMDMCNQVFCPPLKFEFQPHMGDEVCQVSAQQPVQXELLMRYHQLQSRLAXLKIENEEVRKXLDAXMQXLQDMLXVEDFDVSDAFQHSRSXESVKSAASEXYMSKINIAKRRANQQEXEMFYFXKFKEYVNGSNLIXKLQAKHDLLKQXLGEGERAECGXXRGRRNARXRNQDSGQAIPLVVESCIRYINLYGLQQQGIFRVPGSQVEVNDIKNSFERGEDPLVDDQNERDINSVAGVLKLYFRGLENPLFPKERFQDLISXIKLENPAERVHQIQQILVXLPRVVIVVMRYLFAFLNHLSQYSDENMMDPYNLAICFGPXLMHIPDGQDPVSCQAHINEVIKXIIIHHEAIFPSPRELEGPVYEKCMAGGEEYCDSPHSEPGAIDEVDHDNGXEPHXSDEEVEQIEAIAKFDYMGRSPRELSFKKGASLLLYHRASEDWWEGRHNGVDGLIPHQYIVVQDMDDAFSDSLSQKADSEASSGPLLDDKASSKNDLQSPXEHISDYGFGGVMGRVRLRSDGAAIPRRRSGGDXHSPPRGLGPSIDXPPRAAACPSSPHKIPLXRGRIESPEKRRMAXFGSAGSINYPDKKALSEGHSMRSXCGSXRHSSLGDHKSLEAEALAEDIEKXMSXALHELRELERQNXVKQAPDVVLDXLEPLKNPPGPVSSEPASPLHXIVIRDPDAAMRRSSSSSXEMMXXFKPALSARLAGAQLRPPPMRPVRPVVQHRSSSSSSSGVGSPAVXPXEKMFPNSSADKSGXM

SEQ ID NO: 26349 - protein, 1099 aa, Homo sapiens
  MOD_RES (5)..(5): Selenocysteine
  MOD_RES (26)..(26): Selenocysteine
  MOD_RES (106)..(106): Selenocysteine
  MOD_RES (115)..(115): Selenocysteine
  MOD_RES (157)..(157): Selenocysteine
  MOD_RES (162)..(162): Selenocysteine
  MOD_RES (166)..(166): Selenocysteine
  MOD_RES (237)..(237): Selenocysteine
  MOD_RES (250)..(250): Selenocysteine
  MOD_RES (280)..(280): Selenocysteine
  MOD_RES (283)..(283): Selenocysteine
  MOD_RES (293)..(293): Selenocysteine
  MOD_RES (317)..(317): Selenocysteine
  MOD_RES (353)..(353): Selenocysteine
  MOD_RES (368)..(368): Selenocysteine
  MOD_RES (379)..(379): Selenocysteine
  MOD_RES (383)..(383): Selenocysteine
  MOD_RES (386)..(386): Selenocysteine
  MOD_RES (392)..(392): Selenocysteine
  MOD_RES (408)..(408): Selenocysteine
  MOD_RES (418)..(418): Selenocysteine
  MOD_RES (435)..(435): Selenocysteine
  MOD_RES (441)..(441): Selenocysteine
  MOD_RES (454)..(454): Selenocysteine
  MOD_RES (466)..(466): Selenocysteine
  MOD_RES (477)..(478): Selenocysteine
  MOD_RES (603)..(603): Selenocysteine
  MOD_RES (622)..(622): Selenocysteine
  MOD_RES (662)..(662): Selenocysteine
  MOD_RES (685)..(685): Selenocysteine
  MOD_RES (735)..(735): Selenocysteine
  MOD_RES (739)..(739): Selenocysteine
  MOD_RES (839)..(839): Selenocysteine
  MOD_RES (872)..(872): Selenocysteine
  MOD_RES (885)..(885): Selenocysteine
  MOD_RES (902)..(902): Selenocysteine
  MOD_RES (916)..(916): Selenocysteine
  MOD_RES (940)..(940): Selenocysteine
  MOD_RES (944)..(944): Selenocysteine
  MOD_RES (967)..(967): Selenocysteine
  MOD_RES (970)..(970): Selenocysteine
  MOD_RES (983)..(983): Selenocysteine
  MOD_RES (994)..(994): Selenocysteine
  MOD_RES (1015)..(1015): Selenocysteine
  MOD_RES (1033)..(1033): Selenocysteine
  MOD_RES (1037)..(1038): Selenocysteine
  MOD_RES (1082)..(1082): Selenocysteine
  MOD_RES (1084)..(1084): Selenocysteine
  MOD_RES (1098)..(1098): Selenocysteine
MSSQXKFKKDKEIIAEYEAQIKEIRXQLVEQFKCLEQQSESRLQLLQDLQEFFRRKAEIELEYSRSLEKLAERFSSKIRSSREHQFKKDQYLLSPVNCWYLVLHQXRRESRDHAXLNDIFMNNVIVRLSQISEDVIRLFKKSKEIGLQMHEELLKVXNELYXVMKXYHMYHAESISAESKLKEAEKQEEKQFNKSGDLSMNLLRHEDRPQRRSSVKKIEKMKEKRQAKYSENKLKCXKARNDYLLNLAAXNAAISKYYIHDVSDLIDCCDLGFHASLARXFRXYLSAEYNLEXSRHEGLDVIENAVDNLDSRSDKHXVMDMCNQVFCPPLKFEFQPHMGDEVCQVSAQQPVQXELLMRYHQLQSRLAXLKIENEEVRKXLDAXMQXLQDMLXVEDFDVSDAFQHSRSXESVKSAASEXYMSKINIAKRRANQQEXEMFYFXKFKEYVNGSNLIXKLQAKHDLLKQXLGEGERAECGXXRPPCLPPKPQKMRRPRPLSVYSHKLFNGSMEAFIKDSGQAIPLVVESCIRYINLYGLQQQGIFRVPGSQVEVNDIKNSFERGEDPLVDDQNERDINSVAGVLKLYFRGLENPLFPKERFQDLISXIKLENPAERVHQIQQILVXLPRVVIVVMRYLFAFLNHLSQYSDENMMDPYNLAICFGPXLMHIPDGQDPVSCQAHINEVIKXIIIHHEAIFPSPRELEGPVYEKCMAGGEEYCDSPHSEPGAIDEVDHDNGXEPHXSDEEVEQIEAIAKFDYMGRSPRELSFKKGASLLLYHRASEDWWEGRHNGVDGLIPHQYIVVQDMDDAFSDSLSQKADSEASSGPLLDDKASSKNDLQSPXEHISDYGFGGVMGRVRLRSDGAAIPRRRSGGDXHSPPRGLGPSIDXPPRAAACPSSPHKIPLXRGRIESPEKRRMAXFGSAGSINYPDKKALSEGHSMRSXCGSXRHSSLGDHKSLEAEALAEDIEKXMSXALHELRELERQNXVKQAPDVVLDXLEPLKNPPGPVSSEPASPLHXIVIRDPDAAMRRSSSSSXEMMXXFKPALSARLAGAQLRPPPMRPVRPVVQHRSSSSSSSGVGSPAVXPXEKMFPNSSADKSGXM

SEQ ID NO: 26350 - protein, 158 aa, Homo sapiens
  MOD_RES (30)..(30): Selenocysteine
  MOD_RES (72)..(72): Selenocysteine
  MOD_RES (78)..(78): Selenocysteine
  MOD_RES (114)..(114): Selenocysteine
MMQKLLKCSRLVLALALILVLESSVQGYPXRRARYQWVRCNPDSNSANCLEEKGPMFELLPGESNKIPRLRXDLFPKXRIQDLNRIFPLSEDYSGSGFGSGSGSGSGSGSGFLXEMEQDYQLVDESDAFHDNLRSLDRNLPSDSQDLGQHGLEEDFML

SEQ ID NO: 26351 - protein, 72 aa, Homo sapiens
  MOD_RES (31)..(31): Selenocysteine
  MOD_RES (59)..(59): Selenocysteine
MAYPGHPGAGGGYYPGGYGGAPGGPAFPGQXQDPLYGYFAAVAGQDGQIDADELQRCLXQSGIAGGYKLVRL

SEQ ID NO: 26352 - protein, 198 aa, Homo sapiens
  MOD_RES (31)..(31): Selenocysteine
  MOD_RES (59)..(59): Selenocysteine
  MOD_RES (74)..(74): Selenocysteine
  MOD_RES (89)..(89): Selenocysteine
  MOD_RES (114)..(114): Selenocysteine
  MOD_RES (119)..(119): Selenocysteine
  MOD_RES (130)..(131): Selenocysteine
  MOD_RES (150)..(150): Selenocysteine
  MOD_RES (155)..(155): Selenocysteine
  MOD_RES (170)..(170): Selenocysteine
  MOD_RES (178)..(178): Selenocysteine
MAYPGHPGAGGGYYPGGYGGAPGGPAFPGQXQDPLYGYFAAVAGQDGQIDADELQRCLXQSGIAGGYKPFNLEXCRLMVSMLDRDMSGXMGFNEFKELWAVLNGWRQHFISFDXDRSGXVDPQELQKALXXMGFRLSPQAVNSIAKRYSXNGKIXFDDYIACCVKLRALXDSFRRRDXAQQGVVNFPYDDFIQCVMSV

SEQ ID NO: 26353 - protein, 158 aa, Homo sapiens
  MOD_RES (31)..(31): Selenocysteine
  MOD_RES (59)..(59): Selenocysteine
  MOD_RES (74)..(74): Selenocysteine
  MOD_RES (89)..(89): Selenocysteine
  MOD_RES (110)..(110): Selenocysteine
  MOD_RES (115)..(115): Selenocysteine
  MOD_RES (130)..(130): Selenocysteine
  MOD_RES (138)..(138): Selenocysteine
MAYPGHPGAGGGYYPGGYGGAPGGPAFPGQXQDPLYGYFAAVAGQDGQIDADELQRCLXQSGIAGGYKPFNLEXCRLMVSMLDRDMSGXMGFNEFKELWAVNSIAKRYSXNGKIXFDDYIACCVKLRALXDSFRRRDXAQQGVVNFPYDDFIQCVMSV

SEQ ID NO: 26354 - protein, 155 aa, Homo sapiens
  MOD_RES (16)..(16): Selenocysteine
  MOD_RES (31)..(31): Selenocysteine
  MOD_RES (46)..(46): Selenocysteine
  MOD_RES (71)..(71): Selenocysteine
  MOD_RES (76)..(76): Selenocysteine
  MOD_RES (87)..(88): Selenocysteine
  MOD_RES (107)..(107): Selenocysteine
  MOD_RES (112)..(112): Selenocysteine
  MOD_RES (127)..(127): Selenocysteine
  MOD_RES (135)..(135): Selenocysteine
MQDGQIDADELQRCLXQSGIAGGYKPFNLEXCRLMVSMLDRDMSGXMGFNEFKELWAVLNGWRQHFISFDXDRSGXVDPQELQKALXXMGFRLSPQAVNSIAKRYSXNGKIXFDDYIACCVKLRALXDSFRRRDXAQQGVVNFPYDDFIQCVMSV

SEQ ID NO: 26355 - protein, 183 aa, Homo sapiens
  MOD_RES (16)..(16): Selenocysteine
  MOD_RES (44)..(44): Selenocysteine
  MOD_RES (59)..(59): Selenocysteine
  MOD_RES (74)..(74): Selenocysteine
  MOD_RES (99)..(99): Selenocysteine
  MOD_RES (104)..(104): Selenocysteine
  MOD_RES (115)..(116): Selenocysteine
  MOD_RES (135)..(135): Selenocysteine
  MOD_RES (140)..(140): Selenocysteine
  MOD_RES (155)..(155): Selenocysteine
  MOD_RES (163)..(163): Selenocysteine
MQYGGAPGGPAFPGQXQDPLYGYFAAVAGQDGQIDADELQRCLXQSGIAGGYKPFNLEXCRLMVSMLDRDMSGXMGFNEFKELWAVLNGWRQHFISFDXDRSGXVDPQELQKALXXMGFRLSPQAVNSIAKRYSXNGKIXFDDYIACCVKLRALXDSFRRRDXAQQGVVNFPYDDFIQCVMSV

SEQ ID NO: 26356 - protein, 180 aa, Homo sapiens
  MOD_RES (16)..(16): Selenocysteine
  MOD_RES (44)..(44): Selenocysteine
  MOD_RES (59)..(59): Selenocysteine
  MOD_RES (74)..(74): Selenocysteine
  MOD_RES (99)..(99): Selenocysteine
  MOD_RES (104)..(104): Selenocysteine
  MOD_RES (115)..(116): Selenocysteine
  MOD_RES (135)..(135): Selenocysteine
  MOD_RES (140)..(140): Selenocysteine
  MOD_RES (155)..(155): Selenocysteine
  MOD_RES (163)..(163): Selenocysteine
MQYGGAPGGPAFPGQXQDPLYGYFAAVAGQDGQIDADELQRCLXQSGIAGGYKPFNLEXCRLMVSMLDRDMSGXMGFNEFKELWAVLNGWRQHFISFDXDRSGXVDPQELQKALXXMGFRLSPQAVNSIAKRYSXNGKIXFDDYIACCVKLRALXDSFRRRDXAQQGVVNFPYDDVSLRN

SEQ ID NO: 26357 - protein, 488 aa, Homo sapiens
  MOD_RES (30)..(30): Selenocysteine
  MOD_RES (38)..(38): Selenocysteine
  MOD_RES (43)..(43): Selenocysteine
  MOD_RES (63)..(63): Selenocysteine
  MOD_RES (105)..(105): Selenocysteine
  MOD_RES (114)..(114): Selenocysteine
  MOD_RES (128)..(128): Selenocysteine
  MOD_RES (195)..(195): Selenocysteine
  MOD_RES (268)..(268): Selenocysteine
  MOD_RES (276)..(276): Selenocysteine
  MOD_RES (302)..(302): Selenocysteine
  MOD_RES (316)..(316): Selenocysteine
  MOD_RES (393)..(393): Selenocysteine
  MOD_RES (421)..(421): Selenocysteine
  MOD_RES (431)..(431): Selenocysteine
  MOD_RES (435)..(435): Selenocysteine
  MOD_RES (475)..(475): Selenocysteine
MEPFLRRRLAFLSFFWDKIWPAGGEPDHGXPGSLDPNXDPVPXLPAEPCSPFPQLFLALYDFXARCGGELSVRRGDRLCALEEGGGYIFARRLSGQPSAGLVPIXHVAKASPEXLSDQPWYFSGVSRXQAQQLLLSPPNEPGAFLIRPSESSLGGYSLSVRAQAKVCHYRVSMAADGSLYLQKGRLFPGLEELLXYYKANWKLIQNPLLQPCMPQKAPRQDVWERPHSEFALGRKLGEGYFGEVWEGLWLGSLPVAIKVIKSANMKLXDLAKEIQXLKGLRHERLIRLHAVCSGGEPVYIVXELMRKGNLQAFLGXPEGRALRLPPLLGFACQVAEGMSYLEEQRVVHRDLAARNVLVDDGLACKVADFGLARLLKDDIYSPSSSSKIPVKWXAPEAANYRVFSQKSDVWSFGVLLHEVFXYGQCPYEGMXNHEXLQQIMRGYRLPRPAACPAEVYVLMLECWRSSPEERPSFAXLREKLHAIHRCHP

SEQ ID NO: 26358 - protein, 56 aa, Homo sapiens
  MOD_RES (23)..(23): Selenocysteine
  MOD_RES (26)..(26): Selenocysteine
  MOD_RES (42)..(42): Selenocysteine
  MOD_RES (45)..(46): Selenocysteine
  MOD_RES (49)..(50): Selenocysteine
  MOD_RES (53)..(53): Selenocysteine
MAYSNLLRANMDGLKKRDKKNKXKKXKAAAAAAAAAPAAAAXAPXXAAXXAAXAAQ

SEQ ID NO: 26359 - protein, 136 aa, Homo sapiens
  MOD_RES (11)..(11): Selenocysteine
  MOD_RES (14)..(14): Selenocysteine
  MOD_RES (22)..(22): Selenocysteine
  MOD_RES (29)..(29): Selenocysteine
  MOD_RES (37)..(37): Selenocysteine
  MOD_RES (45)..(45): Selenocysteine
  MOD_RES (61)..(61): Selenocysteine
  MOD_RES (69)..(69): Selenocysteine
  MOD_RES (103)..(103): Selenocysteine
  MOD_RES (106)..(106): Selenocysteine
  MOD_RES (122)..(122): Selenocysteine
  MOD_RES (125)..(126): Selenocysteine
  MOD_RES (129)..(130): Selenocysteine
  MOD_RES (133)..(133): Selenocysteine
MVLLESEQFLXELXRLFQKCRXSGSVYIXLKKYDGRXKPIPKKGXVEGFEPADNKCLLRAXDGKKKISXVVSSKEVNKFQMAYSNLLRANMDGLKKRDKKNKXKKXKAAAAAAAAAPAAAAXAPXXAAXXAAXAAQ

SEQ ID NO: 26360 - protein, 115 aa, Homo sapiens
  MOD_RES (11)..(11): Selenocysteine
  MOD_RES (14)..(14): Selenocysteine
  MOD_RES (22)..(22): Selenocysteine
  MOD_RES (29)..(29): Selenocysteine
  MOD_RES (37)..(37): Selenocysteine
  MOD_RES (45)..(45): Selenocysteine
  MOD_RES (61)..(61): Selenocysteine
  MOD_RES (69)..(69): Selenocysteine
  MOD_RES (111)..(111): Selenocysteine
MVLLESEQFLXELXRLFQKCRXSGSVYIXLKKYDGRXKPIPKKGXVEGFEPADNKCLLRAXDGKKKISXVVSSKEVNKFQMVSFGCSLCFPSQGKSQYDSEHWVRLILGFXALRR

SEQ ID NO: 26361 - protein, 110 aa, Homo sapiens
  MOD_RES (28)..(28): Selenocysteine
  MOD_RES (45)..(45): Selenocysteine
  MOD_RES (47)..(47): Selenocysteine
  MOD_RES (103)..(103): Selenocysteine
  MOD_RES (107)..(107): Selenocysteine
MACAAARSPADQDRFICIYPAYLNNKKXIAEGRRIPISKAVENPXAXEIQDVCSAVGLNVFLEKNKMYSREWNRDVQYRGRVRVQLKQEDGSLCLVQFPSHYXLSLXSGS

SEQ ID NO: 26362 - protein, 104 aa, Homo sapiens
  MOD_RES (28)..(28): Selenocysteine
  MOD_RES (45)..(45): Selenocysteine
  MOD_RES (47)..(47): Selenocysteine
MACAAARSPADQDRFICIYPAYLNNKKXIAEGRRIPISKAVENPXAXEIQDVCSAVGLNVFLEKNKMYSREWNRDVQYRGRVRVQLKQEDGSLCLVQFPSRKLV

SEQ ID NO: 26363 - protein, 144 aa, Homo sapiens
  MOD_RES (28)..(28): Selenocysteine
  MOD_RES (45)..(45): Selenocysteine
  MOD_RES (47)..(47): Selenocysteine
  MOD_RES (117)..(117): Selenocysteine
  MOD_RES (119)..(119): Selenocysteine
  MOD_RES (122)..(122): Selenocysteine
MACAAARSPADQDRFICIYPAYLNNKKXIAEGRRIPISKAVENPXAXEIQDVCSAVGLNVFLEKNKMYSREWNRDVQYRGRVRVQLKQEDGSLCLVQFPSRKSVMLYAAEMIPKLKXRXQKXGGADQSLQQGEGSKKGKGKKKK

SEQ ID NO: 26364 - protein, 120 aa, Homo sapiens
  MOD_RES (28)..(28): Selenocysteine
  MOD_RES (93)..(93): Selenocysteine
  MOD_RES (95)..(95): Selenocysteine
  MOD_RES (98)..(98): Selenocysteine
MACAAARSPADQDRFICIYPAYLNNKKXIAEGRRIPISKKNKMYSREWNRDVQYRGRVRVQLKQEDGSLCLVQFPSRKSVMLYAAEMIPKLKXRXQKXGGADQSLQQGEGSKKGKGKKKK

SEQ ID NO: 26365 - protein, 78 aa, Homo sapiens
  MOD_RES (34)..(34): Selenocysteine
  MOD_RES (43)..(43): Selenocysteine
  MOD_RES (53)..(53): Selenocysteine
MACAAARSPADQDRLLKILQLQRFKMYVQQLDLXYFLRKIKCXLENGIVMSNXEAESGSSSNRKMGASALYSSHHVSQ

SEQ ID NO: 26366 - protein, 440 aa, Homo sapiens
  MOD_RES (31)..(31): Selenocysteine
  MOD_RES (33)..(33): Selenocysteine
  MOD_RES (51)..(53): Selenocysteine
  MOD_RES (68)..(68): Selenocysteine
  MOD_RES (75)..(75): Selenocysteine
  MOD_RES (89)..(89): Selenocysteine
  MOD_RES (100)..(100): Selenocysteine
  MOD_RES (127)..(127): Selenocysteine
  MOD_RES (184)..(184): Selenocysteine
  MOD_RES (202)..(202): Selenocysteine
  MOD_RES (211)..(211): Selenocysteine
  MOD_RES (223)..(223): Selenocysteine
  MOD_RES (264)..(264): Selenocysteine
  MOD_RES (293)..(293): Selenocysteine
  MOD_RES (313)..(313): Selenocysteine
  MOD_RES (326)..(326): Selenocysteine
  MOD_RES (350)..(350): Selenocysteine
  MOD_RES (358)..(358): Selenocysteine
  MOD_RES (361)..(361): Selenocysteine
MASGLNKRKMIQHAVFKELVKLVDPGVKAWXPXKGKQNVIMFVGLQGSGKXXXCSKLAYYYQRKGWKXCLICADXFRAGAFDQLKQNAXKARIPFYGSYXEMDPVIIASEGVEKFKNENFEIIIVDXSGRHKQEDSLFEEMLQVANAIQPDNIVYVMDASIGQACEAQAKAFKDKVDVASVIVXKLDGHAKGGGALSAVAAXKSPIIFIGXGEHIDDFEPFKXQPFISKLLGMGDIEGLIDKVNELKLDDNEALIEKLKHGQFXLRDMYEQFQNIMKMGPFSQILGMIPGFGXDFMSKGNEQESMARLKKLMXIMDSMNDQELDSXDGAKVFSKQPGRIQRVARGSGVSXRDVQELLXQYXKFAQMVKKMGGIKGLFKGGDMSKNVSQSQMAKLNQQMAKMMDPRVLHHMGGMAGLQSMMRQFQQGAAGNMKGMMGFNNM

SEQ ID NO: 26367 - protein, 455 aa, Homo sapiens
  MOD_RES (46)..(46): Selenocysteine
  MOD_RES (48)..(48): Selenocysteine
  MOD_RES (66)..(68): Selenocysteine
  MOD_RES (83)..(83): Selenocysteine
  MOD_RES (90)..(90): Selenocysteine
  MOD_RES (104)..(104): Selenocysteine
  MOD_RES (115)..(115): Selenocysteine
  MOD_RES (142)..(142): Selenocysteine
  MOD_RES (199)..(199): Selenocysteine
  MOD_RES (217)..(217): Selenocysteine
  MOD_RES (226)..(226): Selenocysteine
  MOD_RES (238)..(238): Selenocysteine
  MOD_RES (279)..(279): Selenocysteine
  MOD_RES (308)..(308): Selenocysteine
  MOD_RES (328)..(328): Selenocysteine
  MOD_RES (341)..(341): Selenocysteine
  MOD_RES (365)..(365): Selenocysteine
  MOD_RES (373)..(373): Selenocysteine
  MOD_RES (376)..(376): Selenocysteine
MPPLSMKRSAIDLEEMASGLNKRKMIQHAVFKELVKLVDPGVKAWXPXKGKQNVIMFVGLQGSGKXXXCSKLAYYYQRKGWKXCLICADXFRAGAFDQLKQNAXKARIPFYGSYXEMDPVIIASEGVEKFKNENFEIIIVDXSGRHKQEDSLFEEMLQVANAIQPDNIVYVMDASIGQACEAQAKAFKDKVDVASVIVXKLDGHAKGGGALSAVAAXKSPIIFIGXGEHIDDFEPFKXQPFISKLLGMGDIEGLIDKVNELKLDDNEALIEKLKHGQFXLRDMYEQFQNIMKMGPFSQILGMIPGFGXDFMSKGNEQESMARLKKLMXIMDSMNDQELDSXDGAKVFSKQPGRIQRVARGSGVSXRDVQELLXQYXKFAQMVKKMGGIKGLFKGGDMSKNVSQSQMAKLNQQMAKMMDPRVLHHMGGMAGLQSMMRQFQQGAAGNMKGMMGFNNM

SEQ ID NO: 26368 - protein, 44 aa, Homo sapiens
  MOD_RES (11)..(11): Selenocysteine
  MOD_RES (21)..(21): Selenocysteine
  MOD_RES (37)..(37): Selenocysteine
MVLADLGRKIXSALRSLSNAXIINEEVLNAMLKEVCXALLEADV

SEQ ID NO: 26369 - protein, 74 aa, Homo sapiens
  MOD_RES (11)..(11): Selenocysteine
  MOD_RES (21)..(21): Selenocysteine
  MOD_RES (37)..(37): Selenocysteine
MVLADLGRKIXSALRSLSNAXIINEEVLNAMLKEVCXALLEADVNIKLVKQLRENVKSAIDLEEMASGLNKRKM

SEQ ID NO: 26370 - protein, 504 aa, Homo sapiens
  MOD_RES (11)..(11): Selenocysteine
  MOD_RES (21)..(21): Selenocysteine
  MOD_RES (37)..(37): Selenocysteine
  MOD_RES (95)..(95): Selenocysteine
  MOD_RES (97)..(97): Selenocysteine
  MOD_RES (115)..(117): Selenocysteine
  MOD_RES (132)..(132): Selenocysteine
  MOD_RES (139)..(139): Selenocysteine
  MOD_RES (153)..(153): Selenocysteine
  MOD_RES (164)..(164): Selenocysteine
  MOD_RES (191)..(191): Selenocysteine
  MOD_RES (248)..(248): Selenocysteine
  MOD_RES (266)..(266): Selenocysteine
  MOD_RES (275)..(275): Selenocysteine
  MOD_RES (287)..(287): Selenocysteine
  MOD_RES (328)..(328): Selenocysteine
  MOD_RES (357)..(357): Selenocysteine
  MOD_RES (377)..(377): Selenocysteine
  MOD_RES (390)..(390): Selenocysteine
  MOD_RES (414)..(414): Selenocysteine
  MOD_RES (422)..(422): Selenocysteine
  MOD_RES (425)..(425): Selenocysteine
MVLADLGRKIXSALRSLSNAXIINEEVLNAMLKEVCXALLEADVNIKLVKQLRENVKSAIDLEEMASGLNKRKMIQHAVFKELVKLVDPGVKAWXPXKGKQNVIMFVGLQGSGKXXXCSKLAYYYQRKGWKXCLICADXFRAGAFDQLKQNAXKARIPFYGSYXEMDPVIIASEGVEKFKNENFEIIIVDXSGRHKQEDSLFEEMLQVANAIQPDNIVYVMDASIGQACEAQAKAFKDKVDVASVIVXKLDGHAKGGGALSAVAAXKSPIIFIGXGEHIDDFEPFKXQPFISKLLGMGDIEGLIDKVNELKLDDNEALIEKLKHGQFXLRDMYEQFQNIMKMGPFSQILGMIPGFGXDFMSKGNEQESMARLKKLMXIMDSMNDQELDSXDGAKVFSKQPGRIQRVARGSGVSXRDVQELLXQYXKFAQMVKKMGGIKGLFKGGDMSKNVSQSQMAKLNQQMAKMMDPRVLHHMGGMAGLQSMMRQFQQGAAGNMKGMMGFNNM

SEQ ID NO: 26371 - protein, 53 aa, Homo sapiens
  MOD_RES (11)..(11): Selenocysteine
  MOD_RES (21)..(21): Selenocysteine
  MOD_RES (37)..(37): Selenocysteine
MVLADLGRKIXSALRSLSNAXIINEEVLNAMLKEVCXALLEDLFNMCRHIQSR

SEQ ID NO: 26372 - protein, 55 aa, Homo sapiens
  MOD_RES (11)..(11): Selenocysteine
  MOD_RES (21)..(21): Selenocysteine
  MOD_RES (37)..(37): Selenocysteine
MVLADLGRKIXSALRSLSNAXIINEEVLNAMLKEVCXALLEDLFNMCRHIQSRGF

SEQ ID NO: 26373 - protein, 627 aa, Homo sapiens
  MOD_RES (97)..(97): Selenocysteine
  MOD_RES (109)..(109): Selenocysteine
  MOD_RES (114)..(114): Selenocysteine
  MOD_RES (119)..(119): Selenocysteine
  MOD_RES (147)..(147): Selenocysteine
  MOD_RES (182)..(182): Selenocysteine
  MOD_RES (190)..(190): Selenocysteine
  MOD_RES (216)..(216): Selenocysteine
  MOD_RES (226)..(226): Selenocysteine
  MOD_RES (270)..(270): Selenocysteine
  MOD_RES (283)..(283): Selenocysteine
  MOD_RES (285)..(285): Selenocysteine
  MOD_RES (292)..(292): Selenocysteine
  MOD_RES (302)..(302): Selenocysteine
  MOD_RES (332)..(332): Selenocysteine
  MOD_RES (384)..(384): Selenocysteine
  MOD_RES (390)..(390): Selenocysteine
  MOD_RES (458)..(458): Selenocysteine
  MOD_RES (518)..(518): Selenocysteine
  MOD_RES (541)..(541): Selenocysteine
  MOD_RES (543)..(543): Selenocysteine
  MOD_RES (560)..(560): Selenocysteine
  MOD_RES (569)..(569): Selenocysteine
  MOD_RES (611)..(611): Selenocysteine
  MOD_RES (616)..(616): Selenocysteine
MAAEKQVPGGGGGGGSGGGGGSGGGGSGGGRGAGGEENKENERPSAGSKANKEFGDSLSLEILQIIKESQQQHGLRHGDFQRYRGYCSRRQRRLRKXLNFKMGNRHKFXGKKVXEELLXDNRYLLLVLMDAERAWSYAMQLKQEANXEPRKRFHLLSRLRKAVKHAEELERLCESNRVDAKXKLEAQAYXAYLSGMLRFEHQEWKAAIEAFNKCKXIYEKLASAFXEEQAVLYNQRVEEISPNIRYCAYNIGDQSAINELMQMRLRSGGXEGLLAEKLEALIXQXRAKQAAXMSEVEWRGRXVPVKIDKVRIFLLGLADNEAAIVQAESEEXKERLFESMLSECRDAIQVVREELKPDQKQRDYILEGEPGKVSNLQYLHSYLXYIKLSXAIKRNENMAKGLQRALLQQQPEDDSKRSPRPQDLIRLYDIILQNLVELLQLPGLEEDKAFQKEIGLKXLVFKAYRCFFIAQSYVLVKKWSEALVLYDRVLKYANEVNSDAGAFKNSLKDLPDVQELIXQVRSEKCSLQAAAILDANDAHQXEXSSSQVKDNKPLVERFEXFCLDPSLVXKQANLVHFPPGFQPIPCKPLFFDLALNHVAFPPLEDKLEQKXKSGLXGYIKGIFGFRS

SEQ ID NO: 26374 - protein, 589 aa, Homo sapiens
  MOD_RES (109)..(109): Selenocysteine
  MOD_RES (144)..(144): Selenocysteine
  MOD_RES (152)..(152): Selenocysteine
  MOD_RES (178)..(178): Selenocysteine
  MOD_RES (188)..(188): Selenocysteine
  MOD_RES (232)..(232): Selenocysteine
  MOD_RES (245)..(245): Selenocysteine
  MOD_RES (247)..(247): Selenocysteine
  MOD_RES (254)..(254): Selenocysteine
  MOD_RES (264)..(264): Selenocysteine
  MOD_RES (294)..(294): Selenocysteine
  MOD_RES (346)..(346): Selenocysteine
  MOD_RES (352)..(352): Selenocysteine
  MOD_RES (420)..(420): Selenocysteine
  MOD_RES (480)..(480): Selenocysteine
  MOD_RES (503)..(503): Selenocysteine
  MOD_RES (505)..(505): Selenocysteine
  MOD_RES (522)..(522): Selenocysteine
  MOD_RES (531)..(531): Selenocysteine
  MOD_RES (573)..(573): Selenocysteine
  MOD_RES (578)..(578): Selenocysteine
MAAEKQVPGGGGGGGSGGGGGSGGGGSGGGRGAGGEENKENERPSAGSKANKEFGDSLSLEILQIIKESQQQHGLRHGDFQRYRYLLLVLMDAERAWSYAMQLKQEANXEPRKRFHLLSRLRKAVKHAEELERLCESNRVDAKXKLEAQAYXAYLSGMLRFEHQEWKAAIEAFNKCKXIYEKLASAFXEEQAVLYNQRVEEISPNIRYCAYNIGDQSAINELMQMRLRSGGXEGLLAEKLEALIXQXRAKQAAXMSEVEWRGRXVPVKIDKVRIFLLGLADNEAAIVQAESEEXKERLFESMLSECRDAIQVVREELKPDQKQRDYILEGEPGKVSNLQYLHSYLXYIKLSXAIKRNENMAKGLQRALLQQQPEDDSKRSPRPQDLIRLYDIILQNLVELLQLPGLEEDKAFQKEIGLKXLVFKAYRCFFIAQSYVLVKKWSEALVLYDRVLKYANEVNSDAGAFKNSLKDLPDVQELIXQVRSEKCSLQAAAILDANDAHQXEXSSSQVKDNKPLVERFEXFCLDPSLVXKQANLVHFPPGFQPIPCKPLFFDLALNHVAFPPLEDKLEQKXKSGLXGYIKGIFGFRS

SEQ ID NO: 26375 - protein, 63 aa, Homo sapiens
MAAEKQVPGGGGGGGSGGGGGSGGGGSGGGRGAGGEENKENERPSAGSKANKEFGDSLSLENY

SEQ ID NO: 26376 - protein, 54 aa, Homo sapiens
MAAEKQVPGGGGGGGSGGGGGSGGGGSGGGRGAGGEENKENERPSAGSKGLLFP

SEQ ID NO: 26377 - protein, 288 aa, Homo sapiens
  MOD_RES (45)..(45): Selenocysteine
  MOD_RES (51)..(51): Selenocysteine
  MOD_RES (119)..(119): Selenocysteine
  MOD_RES (179)..(179): Selenocysteine
  MOD_RES (202)..(202): Selenocysteine
  MOD_RES (204)..(204): Selenocysteine
  MOD_RES (221)..(221): Selenocysteine
  MOD_RES (230)..(230): Selenocysteine
  MOD_RES (272)..(272): Selenocysteine
  MOD_RES (277)..(277): Selenocysteine
MLSECRDAIQVVREELKPDQKQRDYILEGEPGKVSNLQYLHSYLXYIKLSXAIKRNENMAKGLQRALLQQQPEDDSKRSPRPQDLIRLYDIILQNLVELLQLPGLEEDKAFQKEIGLKXLVFKAYRCFFIAQSYVLVKKWSEALVLYDRVLKYANEVNSDAGAFKNSLKDLPDVQELIXQVRSEKCSLQAAAILDANDAHQXEXSSSQVKDNKPLVERFEXFCLDPSLVXKQANLVHFPPGFQPIPCKPLFFDLALNHVAFPPLEDKLEQKXKSGLXGYIKGIFGFRS

SEQ ID NO: 26378 - protein, 671 aa, Homo sapiens
  MOD_RES (28)..(28): Selenocysteine
  MOD_RES (33)..(33): Selenocysteine
  MOD_RES (46)..(46): Selenocysteine
  MOD_RES (70)..(70): Selenocysteine
  MOD_RES (72)..(72): Selenocysteine
  MOD_RES (100)..(100): Selenocysteine
  MOD_RES (108)..(108): Selenocysteine
  MOD_RES (149)..(149): Selenocysteine
  MOD_RES (175)..(175): Selenocysteine
  MOD_RES (182)..(182): Selenocysteine
  MOD_RES (214)..(214): Selenocysteine
  MOD_RES (217)..(217): Selenocysteine
  MOD_RES (242)..(242): Selenocysteine
  MOD_RES (258)..(258): Selenocysteine
  MOD_RES (272)..(272): Selenocysteine
  MOD_RES (289)..(289): Selenocysteine
  MOD_RES (317)..(317): Selenocysteine
  MOD_RES (355)..(355): Selenocysteine
  MOD_RES (378)..(378): Selenocysteine
  MOD_RES (414)..(414): Selenocysteine
  MOD_RES (430)..(430): Selenocysteine
  MOD_RES (483)..(483): Selenocysteine
  MOD_RES (528)..(528): Selenocysteine
  MOD_RES (538)..(538): Selenocysteine
  MOD_RES (571)..(571): Selenocysteine
  MOD_RES (602)..(602): Selenocysteine
  MOD_RES (606)..(606): Selenocysteine
  MOD_RES (618)..(618): Selenocysteine
  MOD_RES (624)..(624): Selenocysteine
  MOD_RES (633)..(633): Selenocysteine
  MOD_RES (638)..(638): Selenocysteine
  MOD_RES (655)..(655): Selenocysteine
MASGGSGGVSVPALWSEVNRYGQNGDFXRALKXVNKILQINKDDVXALHCKVVCLIQNGSFKEALNVINXHXKVLANNSLSFEKAYCEYRLNRIENALKXIESANQQXDKLKELYGQVLYRLERYDECLAVYRDLVRNSQDDYDEERKXNLSAVVAAQSNWEKVVPENLGLQEGXHELCYNXACALIGQGQLNQAMKILQKAEDLCRRSLSEDXDGXEEDPQAELAIIHGQMAYILQLQGRXEEALQLYNQIIKLKPXDVGLLAVIANNIIXINKDQNVFDSKKKVKLXNAEGVEFKLSKKQLQAIEFNKALLAMYXNQAEQCRKISASLQSQSPEHLLPVLIQAAQLCREKQHXKAIELLQEFSDQHPENAAEIKLXMAQLKISQGNISKACLILRSIEELKHKPGMVSALVXMYSHEEDIDSAIEVFXQAIQWYQNHQPKSPAHLSLIREAANFKLKYGRKKEAISDLQQLWKQNPKDIHXLAQLISAYSLVDPEKAKALSKHLPSSDSMSLKVDVEALENSAGAXYIRKKGGKVXGDSQPKEQGQGDLKKKKKKKKGKLPKNYDPKVXPDPERWLPMRERSYYRGRKKGKKKDQIGKGXQGAXAGASSELDASKXVSSPPXSPRPGSAAXVSASXSNIIPPRHQKPAGAPAXKKKQQQKKKKGGKGGW

SEQ ID NO: 26379 - protein, 610 aa, Homo sapiens
  MOD_RES (28)..(28): Selenocysteine
  MOD_RES (33)..(33): Selenocysteine
  MOD_RES (46)..(46): Selenocysteine
  MOD_RES (70)..(70): Selenocysteine
  MOD_RES (72)..(72): Selenocysteine
  MOD_RES (100)..(100): Selenocysteine
  MOD_RES (108)..(108): Selenocysteine
  MOD_RES (149)..(149): Selenocysteine
  MOD_RES (175)..(175): Selenocysteine
  MOD_RES (182)..(182): Selenocysteine
  MOD_RES (214)..(214): Selenocysteine
  MOD_RES (228)..(228): Selenocysteine
  MOD_RES (256)..(256): Selenocysteine
  MOD_RES (294)..(294): Selenocysteine
  MOD_RES (317)..(317): Selenocysteine
  MOD_RES (353)..(353): Selenocysteine
  MOD_RES (369)..(369): Selenocysteine
  MOD_RES (422)..(422): Selenocysteine
  MOD_RES (467)..(467): Selenocysteine
  MOD_RES (477)..(477): Selenocysteine
  MOD_RES (510)..(510): Selenocysteine
  MOD_RES (541)..(541): Selenocysteine
  MOD_RES (545)..(545): Selenocysteine
  MOD_RES (557)..(557): Selenocysteine
  MOD_RES (563)..(563): Selenocysteine
  MOD_RES (572)..(572): Selenocysteine
  MOD_RES (577)..(577): Selenocysteine
  MOD_RES (594)..(594): Selenocysteine
MASGGSGGVSVPALWSEVNRYGQNGDFXRALKXVNKILQINKDDVXALHCKVVCLIQNGSFKEALNVINXHXKVLANNSLSFEKAYCEYRLNRIENALKXIESANQQXDKLKELYGQVLYRLERYDECLAVYRDLVRNSQDDYDEERKXNLSAVVAAQSNWEKVVPENLGLQEGXHELCYNXACALIGQGQLNQAMKILQKAEDLCRRSLSEDXDQNVFDSKKKVKLXNAEGVEFKLSKKQLQAIEFNKALLAMYXNQAEQCRKISASLQSQSPEHLLPVLIQAAQLCREKQHXKAIELLQEFSDQHPENAAEIKLXMAQLKISQGNISKACLILRSIEELKHKPGMVSALVXMYSHEEDIDSAIEVFXQAIQWYQNHQPKSPAHLSLIREAANFKLKYGRKKEAISDLQQLWKQNPKDIHXLAQLISAYSLVDPEKAKALSKHLPSSDSMSLKVDVEALENSAGAXYIRKKGGKVXGDSQPKEQGQGDLKKKKKKKKGKLPKNYDPKVXPDPERWLPMRERSYYRGRKKGKKKDQIGKGXQGAXAGASSELDASKXVSSPPXSPRPGSAAXVSASXSNIIPPRHQKPAGAPAXKKKQQQKKKKGGKGGW

SEQ ID NO: 26380 - protein, 220 aa, Homo sapiens
  MOD_RES (28)..(28): Selenocysteine
  MOD_RES (33)..(33): Selenocysteine
  MOD_RES (46)..(46): Selenocysteine
  MOD_RES (70)..(70): Selenocysteine
  MOD_RES (72)..(72): Selenocysteine
  MOD_RES (100)..(100): Selenocysteine
  MOD_RES (108)..(108): Selenocysteine
  MOD_RES (149)..(149): Selenocysteine
  MOD_RES (175)..(175): Selenocysteine
  MOD_RES (182)..(182): Selenocysteine
  MOD_RES (219)..(219): Selenocysteine
MASGGSGGVSVPALWSEVNRYGQNGDFXRALKXVNKILQINKDDVXALHCKVVCLIQNGSFKEALNVINXHXKVLANNSLSFEKAYCEYRLNRIENALKXIESANQQXDKLKELYGQVLYRLERYDECLAVYRDLVRNSQDDYDEERKXNLSAVVAAQSNWEKVVPENLGLQEGXHELCYNXACALIGQGQLNQAMKILQKAEGWKFVKLICKYNVHIXL

SEQ ID NO: 26381 - protein, 357 aa, Homo sapiens
  MOD_RES (1)..(1): Any amino acid
  MOD_RES (5)..(5): Selenocysteine
  MOD_RES (31)..(31): Selenocysteine
  MOD_RES (38)..(38): Selenocysteine
  MOD_RES (70)..(70): Selenocysteine
  MOD_RES (73)..(73): Selenocysteine
  MOD_RES (98)..(98): Selenocysteine
  MOD_RES (114)..(114): Selenocysteine
  MOD_RES (128)..(128): Selenocysteine
  MOD_RES (167)..(167): Selenocysteine
  MOD_RES (190)..(190): Selenocysteine
  MOD_RES (226)..(226): Selenocysteine
  MOD_RES (242)..(242): Selenocysteine
  MOD_RES (295)..(295): Selenocysteine
  MOD_RES (340)..(340): Selenocysteine
  MOD_RES (350)..(350): Selenocysteine
XERKXNLSAVVAAQSNWEKVVPENLGLQEGXHELCYNXACALIGQGQLNQAMKILQKAEDLCRRSLSEDXDGXEEDPQAELAIIHGQMAYILQLQGRXEEALQLYNQIIKLKPXDVGLLAVIANNIIXINKAEQCRKISASLQSQSPEHLLPVLIQAAQLCREKQHXKAIELLQEFSDQHPENAAEIKLXMAQLKISQGNISKACLILRSIEELKHKPGMVSALVXMYSHEEDIDSAIEVFXQAIQWYQNHQPKSPAHLSLIREAANFKLKYGRKKEAISDLQQLWKQNPKDIHXLAQLISAYSLVDPEKAKALSKHLPSSDSMSLKVDVEALENSAGAXYIRKKGGKVXGDSQPKE

SEQ ID NO: 26382 - protein, 86 aa, Homo sapiens
  MOD_RES (6)..(6): Selenocysteine
  MOD_RES (43)..(43): Selenocysteine
  MOD_RES (53)..(53): Selenocysteine
  MOD_RES (82)..(82): Selenocysteine
  MOD_RES (85)..(85): Selenocysteine
MPQYQXWEEFSRAAEKLYLADPMKARVVLKYRHSDGNLCVKVXDDLVCLVYKXDQAQDVKKIEKFHSQLMRLMVAKEARNVXMEXE

SEQ ID NO: 26383 - protein, 66 aa, Homo sapiens
  MOD_RES (6)..(6): Selenocysteine
  MOD_RES (43)..(43): Selenocysteine
  MOD_RES (55)..(55): Selenocysteine
  MOD_RES (66)..(66): Selenocysteine
MPQYQXWEEFSRAAEKLYLADPMKARVVLKYRHSDGNLCVKVXDDLVQWHLNYCXLRHGIAGGLEX

SEQ ID NO: 26384 - protein, 82 aa, Homo sapiens
  MOD_RES (6)..(6): Selenocysteine
  MOD_RES (43)..(43): Selenocysteine
MPQYQXWEEFSRAAEKLYLADPMKARVVLKYRHSDGNLCVKVXDDLVRQCLALLLRLQCSGMIIAHCILDLLGSSGPLASAS

SEQ ID NO: 26385 - protein, 671 aa, Homo sapiens
  MOD_RES (31)..(31): Selenocysteine
  MOD_RES (44)..(44): Selenocysteine
  MOD_RES (109)..(109): Selenocysteine
  MOD_RES (134)..(134): Selenocysteine
  MOD_RES (136)..(136): Selenocysteine
  MOD_RES (175)..(175): Selenocysteine
  MOD_RES (221)..(221): Selenocysteine
  MOD_RES (228)..(228): Selenocysteine
  MOD_RES (252)..(252): Selenocysteine
  MOD_RES (269)..(269): Selenocysteine
  MOD_RES (342)..(342): Selenocysteine
  MOD_RES (351)..(351): Selenocysteine
  MOD_RES (357)..(357): Selenocysteine
  MOD_RES (363)..(363): Selenocysteine
  MOD_RES (382)..(382): Selenocysteine
  MOD_RES (389)..(389): Selenocysteine
  MOD_RES (423)..(423): Selenocysteine
  MOD_RES (427)..(427): Selenocysteine
  MOD_RES (431)..(431): Selenocysteine
  MOD_RES (434)..(434): Selenocysteine
  MOD_RES (440)..(440): Selenocysteine
  MOD_RES (448)..(448): Selenocysteine
  MOD_RES (490)..(490): Selenocysteine
  MOD_RES (525)..(525): Selenocysteine
  MOD_RES (530)..(530): Selenocysteine
  MOD_RES (546)..(546): Selenocysteine
  MOD_RES (553)..(553): Selenocysteine
  MOD_RES (562)..(562): Selenocysteine
  MOD_RES (576)..(576): Selenocysteine
  MOD_RES (608)..(608): Selenocysteine
  MOD_RES (617)..(617): Selenocysteine
  MOD_RES (643)..(643): Selenocysteine
  MOD_RES (659)..(659): Selenocysteine
KGERWSGLRHEGQWSPGRGPVLALQARKKRXKAKKDKAQRKSEXQHRGSAPHSESDLPEQEEEILGSDDDEQEDPNDYCKGGYHLVKIGDLFNGRYHVIRKLGWGHFSXVWLSWDIQGKKFVAMKVVKSAEHYXEXALDEIRLLKSVRNSDPNDPNREMVVQLLDDFKISGVNGXHICMVFEVLGHHLLKWIIKSNYQGLPLPCVKKIIQQVLQGLDYLHXKCRIIHXDIKPENILLSVNEQYIRRLAAEAXEWQRSGAPPPSGSAVSXAPQPKPADKMSKNKKKKLKKKQKRQAELLEKRMQEIEEMEKESGPGQKRPNKQEESESPVERPLKENPPNKMXQEKLEESSXIGQDQXLMERDXEGGAAEINCNGVIEVINYXQNSNNEXLRHKEDLHNANDCDVQNLNQESSFLSSQNGDSSXSQEXDSCXPIXSEVSDXMVCQSSSXVGQSFSEQHISQLQESIRAEIPCEDEQEQEHNGPLDNKGKSXAGNFLVNPLEPKNAEKLKVKIADLGNACWVHKHFXEDIQXRQYRSLEVLIGSGYNXPADIWSXACMAFELAXGDYLFEPHSGEEYXRDEDHIALIIELLGKVPRKLIVAGKYSKEFFXKKGDLKHIXKLKPWGLFEVLVEKYEWSQEEAAGFXDFLLPMLELIPEKRAXAAECLRHPWLNS

SEQ ID NO: 26386 - protein, 118 aa, Homo sapiens
  MOD_RES (23)..(23): Selenocysteine
  MOD_RES (42)..(42): Selenocysteine
  MOD_RES (54)..(54): Selenocysteine
  MOD_RES (59)..(59): Selenocysteine
  MOD_RES (64)..(64): Selenocysteine
  MOD_RES (94)..(94): Selenocysteine
  MOD_RES (100)..(100): Selenocysteine
MASGQLGGSLSSNHVEESCCCSXPGLGLSSPGPAGKGCRRRXRARPVPFLPNSXEEAQXPLAWXSPPELVDHYRSVSELWSLLPAPQRLNLPPXSSRSEXQHRGSAPHSESDLPEQEE

SEQ ID NO: 26387 - protein, 655 aa, Homo sapiens
  MOD_RES (15)..(15): Selenocysteine
  MOD_RES (28)..(28): Selenocysteine
  MOD_RES (93)..(93): Selenocysteine
  MOD_RES (118)..(118): Selenocysteine
  MOD_RES (120)..(120): Selenocysteine
  MOD_RES (159)..(159): Selenocysteine
  MOD_RES (205)..(205): Selenocysteine
  MOD_RES (212)..(212): Selenocysteine
  MOD_RES (236)..(236): Selenocysteine
  MOD_RES (253)..(253): Selenocysteine
  MOD_RES (326)..(326): Selenocysteine
  MOD_RES (335)..(335): Selenocysteine
  MOD_RES (341)..(341): Selenocysteine
  MOD_RES (347)..(347): Selenocysteine
  MOD_RES (366)..(366): Selenocysteine
  MOD_RES (373)..(373): Selenocysteine
  MOD_RES (407)..(407): Selenocysteine
  MOD_RES (411)..(411): Selenocysteine
  MOD_RES (415)..(415): Selenocysteine
  MOD_RES (418)..(418): Selenocysteine
  MOD_RES (424)..(424): Selenocysteine
  MOD_RES (432)..(432): Selenocysteine
  MOD_RES (474)..(474): Selenocysteine
  MOD_RES (509)..(509): Selenocysteine
  MOD_RES (514)..(514): Selenocysteine
  MOD_RES (530)..(530): Selenocysteine
  MOD_RES (537)..(537): Selenocysteine
  MOD_RES (546)..(546): Selenocysteine
  MOD_RES (560)..(560): Selenocysteine
  MOD_RES (592)..(592): Selenocysteine
  MOD_RES (601)..(601): Selenocysteine
  MOD_RES (627)..(627): Selenocysteine
  MOD_RES (643)..(643): Selenocysteine
MERKVLALQARKKRXKAKKDKAQRKSEXQHRGSAPHSESDLPEQEEEILGSDDDEQEDPNDYCKGGYHLVKIGDLFNGRYHVIRKLGWGHFSXVWLSWDIQGKKFVAMKVVKSAEHYXEXALDEIRLLKSVRNSDPNDPNREMVVQLLDDFKISGVNGXHICMVFEVLGHHLLKWIIKSNYQGLPLPCVKKIIQQVLQGLDYLHXKCRIIHXDIKPENILLSVNEQYIRRLAAEAXEWQRSGAPPPSGSAVSXAPQPKPADKMSKNKKKKLKKKQKRQAELLEKRMQEIEEMEKESGPGQKRPNKQEESESPVERPLKENPPNKMXQEKLEESSXIGQDQXLMERDXEGGAAEINCNGVIEVINYXQNSNNEXLRHKEDLHNANDCDVQNLNQESSFLSSQNGDSSXSQEXDSCXPIXSEVSDXMVCQSSSXVGQSFSEQHISQLQESIRAEIPCEDEQEQEHNGPLDNKGKSXAGNFLVNPLEPKNAEKLKVKIADLGNACWVHKHFXEDIQXRQYRSLEVLIGSGYNXPADIWSXACMAFELAXGDYLFEPHSGEEYXRDEDHIALIIELLGKVPRKLIVAGKYSKEFFXKKGDLKHIXKLKPWGLFEVLVEKYEWSQEEAAGFXDFLLPMLELIPEKRAXAAECLRHPWLNS

SEQ ID NO: 26388 - protein, 76 aa, Homo sapiens
  MOD_RES (6)..(6): Selenocysteine
  MOD_RES (21)..(22): Selenocysteine
  MOD_RES (28)..(28): Selenocysteine
  MOD_RES (31)..(31): Selenocysteine
  MOD_RES (37)..(37): Selenocysteine
  MOD_RES (43)..(43): Selenocysteine
MESCCXNQAGLELLASRDPLXXLASQIXRIXDLKLSXEALLPXLRVIYQSRKRRFWDLMMMSKKILMIIVKEVIIL

SEQ ID NO: 26389 - protein, 155 aa, Homo sapiens
  MOD_RES (6)..(6): Selenocysteine
  MOD_RES (21)..(22): Selenocysteine
  MOD_RES (28)..(28): Selenocysteine
  MOD_RES (31)..(31): Selenocysteine
  MOD_RES (44)..(44): Selenocysteine
  MOD_RES (109)..(109): Selenocysteine
  MOD_RES (134)..(134): Selenocysteine
  MOD_RES (136)..(136): Selenocysteine
MESCCXNQAGLELLASRDPLXXLASQIXRIXGMGIFVSFLRSEXQHRGSAPHSESDLPEQEEEILGSDDDEQEDPNDYCKGGYHLVKIGDLFNGRYHVIRKLGWGHFSXVWLSWDIQGKKFVAMKVVKSAEHYXEXALDEIRLLKSVRNSDPNDP

SEQ ID NO: 26390 - protein, 639 aa, Homo sapiens
  MOD_RES (12)..(12): Selenocysteine
  MOD_RES (77)..(77): Selenocysteine
  MOD_RES (102)..(102): Selenocysteine
  MOD_RES (104)..(104): Selenocysteine
  MOD_RES (143)..(143): Selenocysteine
  MOD_RES (189)..(189): Selenocysteine
  MOD_RES (196)..(196): Selenocysteine
  MOD_RES (220)..(220): Selenocysteine
  MOD_RES (237)..(237): Selenocysteine
  MOD_RES (310)..(310): Selenocysteine
  MOD_RES (319)..(319): Selenocysteine
  MOD_RES (325)..(325): Selenocysteine
  MOD_RES (331)..(331): Selenocysteine
  MOD_RES (350)..(350): Selenocysteine
  MOD_RES (357)..(357): Selenocysteine
  MOD_RES (391)..(391): Selenocysteine
  MOD_RES (395)..(395): Selenocysteine
  MOD_RES (399)..(399): Selenocysteine
  MOD_RES (402)..(402): Selenocysteine
  MOD_RES (408)..(408): Selenocysteine
  MOD_RES (416)..(416): Selenocysteine
  MOD_RES (458)..(458): Selenocysteine
  MOD_RES (493)..(493): Selenocysteine
  MOD_RES (498)..(498): Selenocysteine
  MOD_RES (514)..(514): Selenocysteine
  MOD_RES (521)..(521): Selenocysteine
  MOD_RES (530)..(530): Selenocysteine
  MOD_RES (544)..(544): Selenocysteine
  MOD_RES (576)..(576): Selenocysteine
  MOD_RES (585)..(585): Selenocysteine
  MOD_RES (611)..(611): Selenocysteine
  MOD_RES (627)..(627): Selenocysteine
MGIFVSFLRSEXQHRGSAPHSESDLPEQEEEILGSDDDEQEDPNDYCKGGYHLVKIGDLFNGRYHVIRKLGWGHFSXVWLSWDIQGKKFVAMKVVKSAEHYXEXALDEIRLLKSVRNSDPNDPNREMVVQLLDDFKISGVNGXHICMVFEVLGHHLLKWIIKSNYQGLPLPCVKKIIQQVLQGLDYLHXKCRIIHXDIKPENILLSVNEQYIRRLAAEAXEWQRSGAPPPSGSAVSXAPQPKPADKMSKNKKKKLKKKQKRQAELLEKRMQEIEEMEKESGPGQKRPNKQEESESPVERPLKENPPNKMXQEKLEESSXIGQDQXLMERDXEGGAAEINCNGVIEVINYXQNSNNEXLRHKEDLHNANDCDVQNLNQESSFLSSQNGDSSXSQEXDSCXPIXSEVSDXMVCQSSSXVGQSFSEQHISQLQESIRAEIPCEDEQEQEHNGPLDNKGKSXAGNFLVNPLEPKNAEKLKVKIADLGNACWVHKHFXEDIQXRQYRSLEVLIGSGYNXPADIWSXACMAFELAXGDYLFEPHSGEEYXRDEDHIALIIELLGKVPRKLIVAGKYSKEFFXKKGDLKHIXKLKPWGLFEVLVEKYEWSQEEAAGFXDFLLPMLELIPEKRAXAAECLRHPWLNS

SEQ ID NO: 26391 - protein, 146 aa, Homo sapiens
  MOD_RES (64)..(64): Selenocysteine
  MOD_RES (73)..(73): Selenocysteine
  MOD_RES (79)..(79): Selenocysteine
  MOD_RES (85)..(85): Selenocysteine
  MOD_RES (104)..(104): Selenocysteine
  MOD_RES (111)..(111): Selenocysteine
  MOD_RES (145)..(145): Selenocysteine
MSKNKKKKLKKKQKRQAELLEKRMQEIEEMEKESGPGQKRPNKQEESESPVERPLKENPPNKMXQEKLEESSXIGQDQXLMERDXEGGAAEINCNGVIEVINYXQNSNNEXLRHKEDLHNANDCDVQNLNQESSFLSSQNGDSSXS

SEQ ID NO: 26392 - protein, 42 aa, Homo sapiens
SIRAEIPCEDEQEQEHNGPLDNKVLLMMPVVCRKIHGWKFSC

SEQ ID NO: 26393 - protein, 147 aa, Homo sapiens
  MOD_RES (7)..(7): Selenocysteine
  MOD_RES (84)..(84): Selenocysteine
  MOD_RES (93)..(93): Selenocysteine
  MOD_RES (119)..(119): Selenocysteine
MAFELAXGDYLFEPHSGEDYSRDEDHIAHIIELLGSIPRHFALSGKYSREFFNRRDHIALIIELLGKVPRKYAMLGKYSKEFFXRKGELRHIXKLKPWSLFDVLVEKYGWPHEDAAQFXDFLIPMLEMVPEKRASAGECLRHPWLNS

SEQ ID NO: 26394 - protein, 231 aa, Homo sapiens
  MOD_RES (23)..(23): Selenocysteine
  MOD_RES (40)..(40): Selenocysteine
  MOD_RES (89)..(89): Selenocysteine
  MOD_RES (142)..(142): Selenocysteine
  MOD_RES (167)..(167): Selenocysteine
  MOD_RES (169)..(169): Selenocysteine
MGLQGCRGAKGEKRPREERWCEXRGGAGQGRAHGAAGGAXGRVLAIQARKRRPKREKHPKKPEPQQKAPLVPPPPPPPPPPPPPLPDPXPPEPEEEILGSDDEEQEDPADYCKGGYHPVKIGDLFNGRYHVIRKLGWGHFSXVWLCWDMQGKRFVAMKVVKSAQHYXEXALDEIKLLKCVRESDPSDPNKDMVVQLIDDFKISGMNGIHVCMVFEVLGHHLLKWIIKSNYQ

SEQ ID NO: 26395 - protein, 699 aa, Homo sapiens
  MOD_RES (52)..(52): Selenocysteine
  MOD_RES (105)..(105): Selenocysteine
  MOD_RES (130)..(130): Selenocysteine
  MOD_RES (132)..(132): Selenocysteine
  MOD_RES (224)..(224): Selenocysteine
  MOD_RES (248)..(248): Selenocysteine
  MOD_RES (265)..(265): Selenocysteine
  MOD_RES (318)..(318): Selenocysteine
  MOD_RES (338)..(339): Selenocysteine
  MOD_RES (349)..(349): Selenocysteine
  MOD_RES (387)..(387): Selenocysteine
  MOD_RES (394)..(394): Selenocysteine
  MOD_RES (437)..(437): Selenocysteine
  MOD_RES (466)..(466): Selenocysteine
  MOD_RES (489)..(489): Selenocysteine
  MOD_RES (503)..(503): Selenocysteine
  MOD_RES (509)..(509): Selenocysteine
  MOD_RES (517)..(517): Selenocysteine
  MOD_RES (553)..(553): Selenocysteine
  MOD_RES (558)..(558): Selenocysteine
  MOD_RES (574)..(574): Selenocysteine
  MOD_RES (581)..(581): Selenocysteine
  MOD_RES (590)..(590): Selenocysteine
  MOD_RES (645)..(645): Selenocysteine
  MOD_RES (671)..(671): Selenocysteine
MSSRKVLAIQARKRRPKREKHPKKPEPQQKAPLVPPPPPPPPPPPPPLPDPXPPEPEEEILGSDDEEQEDPADYCKGGYHPVKIGDLFNGRYHVIRKLGWGHFSXVWLCWDMQGKRFVAMKVVKSAQHYXEXALDEIKLLKCVRESDPSDPNKDMVVQLIDDFKISGMNGIHVCMVFEVLGHHLLKWIIKSNYQGLPVRCVKSIIRQVLQGLDYLHSKCKIIHXDIKPENILMCVDDAYVRRMAAEAXEWQKAGAPPPSGSAVSXAPQQKPIGKISKNKKKKLKKKQKRQAELLEKRLQEIEELEREAERKIIEENIXSAAPSNDQDGEYCPEVKLKXXGLEEAAEAEXAKDNGEAEDQEEKEDAEKENIEKDEDDVDQELANIDPXWIESPKXNGHIENGPFSLEQQLDDEDDDEEDCPNPEEYNLDEPNAESDYXYSSSYEQFNGELPNGRHKIPESQFPEFSXSLFSGSLEPVACGSVLSEGSPLXEQEESSPSHDRSRXVSASSXGDLPKAKXRAADLLVNPLDPRNADKIRVKIADLGNACWVHKHFXEDIQXRQYRSIEVLIGAGYSXPADIWSXACMAFELAXGDYLFEPHSGEDYSRDEDHIAHIIELLGSIPRHFALSGKYSREFFNRRGELRHIXKLKPWSLFDVLVEKYGWPHEDAAQFXDFLIPMLEMVPEKRASAGECLRHPWLNS

SEQ ID NO: 26396 - protein, 68 aa, Homo sapiens
  MOD_RES (27)..(27): Selenocysteine
  MOD_RES (38)..(38): Selenocysteine
MSSRKVLAIQARKRRPKREKHPKKWSXSCCFKGRRLLXAFLHEISKEVLVFFLPGSSIDQEDDSDVVS

SEQ ID NO: 26397 - protein, 160 aa, Homo sapiens
  MOD_RES (41)..(41): Selenocysteine
  MOD_RES (94)..(94): Selenocysteine
  MOD_RES (119)..(119): Selenocysteine
  MOD_RES (121)..(121): Selenocysteine
MSVNSEKSSSSERPEPQQKAPLVPPPPPPPPPPPPPLPDPXPPEPEEEILGSDDEEQEDPADYCKGGYHPVKIGDLFNGRYHVIRKLGWGHFSXVWLCWDMQGKRFVAMKVVKSAQHYXEXALDEIKLLKCVRESDPSDPNKDMVVQLIDDFKISGMNGI

SEQ ID NO: 26398 - protein, 688 aa, Homo sapiens
  MOD_RES (41)..(41): Selenocysteine
  MOD_RES (94)..(94): Selenocysteine
  MOD_RES (119)..(119): Selenocysteine
  MOD_RES (121)..(121): Selenocysteine
  MOD_RES (213)..(213): Selenocysteine
  MOD_RES (237)..(237): Selenocysteine
  MOD_RES (254)..(254): Selenocysteine
  MOD_RES (307)..(307): Selenocysteine
  MOD_RES (327)..(328): Selenocysteine
  MOD_RES (338)..(338): Selenocysteine
  MOD_RES (376)..(376): Selenocysteine
  MOD_RES (383)..(383): Selenocysteine
  MOD_RES (426)..(426): Selenocysteine
  MOD_RES (455)..(455): Selenocysteine
  MOD_RES (478)..(478): Selenocysteine
  MOD_RES (492)..(492): Selenocysteine
  MOD_RES (498)..(498): Selenocysteine
  MOD_RES (506)..(506): Selenocysteine
  MOD_RES (542)..(542): Selenocysteine
  MOD_RES (547)..(547): Selenocysteine
  MOD_RES (563)..(563): Selenocysteine
  MOD_RES (570)..(570): Selenocysteine
  MOD_RES (579)..(579): Selenocysteine
  MOD_RES (634)..(634): Selenocysteine
  MOD_RES (660)..(660): Selenocysteine
MSVNSEKSSSSERPEPQQKAPLVPPPPPPPPPPPPPLPDPXPPEPEEEILGSDDEEQEDPADYCKGGYHPVKIGDLFNGRYHVIRKLGWGHFSXVWLCWDMQGKRFVAMKVVKSAQHYXEXALDEIKLLKCVRESDPSDPNKDMVVQLIDDFKISGMNGIHVCMVFEVLGHHLLKWIIKSNYQGLPVRCVKSIIRQVLQGLDYLHSKCKIIHXDIKPENILMCVDDAYVRRMAAEAXEWQKAGAPPPSGSAVSXAPQQKPIGKISKNKKKKLKKKQKRQAELLEKRLQEIEELEREAERKIIEENIXSAAPSNDQDGEYCPEVKLKXXGLEEAAEAEXAKDNGEAEDQEEKEDAEKENIEKDEDDVDQELANIDPXWIESPKXNGHIENGPFSLEQQLDDEDDDEEDCPNPEEYNLDEPNAESDYXYSSSYEQFNGELPNGRHKIPESQFPEFSXSLFSGSLEPVACGSVLSEGSPLXEQEESSPSHDRSRXVSASSXGDLPKAKXRAADLLVNPLDPRNADKIRVKIADLGNACWVHKHFXEDIQXRQYRSIEVLIGAGYSXPADIWSXACMAFELAXGDYLFEPHSGEDYSRDEDHIAHIIELLGSIPRHFALSGKYSREFFNRRGELRHIXKLKPWSLFDVLVEKYGWPHEDAAQFXDFLIPMLEMVPEKRASAGECLRHPWLNS

SEQ ID NO: 26399 - protein, 204 aa, Homo sapiens
  MOD_RES (1)..(1): Any amino acid
  MOD_RES (27)..(27): Selenocysteine
  MOD_RES (32)..(32): Selenocysteine
  MOD_RES (48)..(48): Selenocysteine
  MOD_RES (55)..(55): Selenocysteine
  MOD_RES (64)..(64): Selenocysteine
  MOD_RES (141)..(141): Selenocysteine
  MOD_RES (150)..(150): Selenocysteine
  MOD_RES (176)..(176): Selenocysteine
XDPRNADKIRVKIADLGNACWVHKHFXEDIQXRQYRSIEVLIGAGYSXPADIWSXACMAFELAXGDYLFEPHSGEDYSRDEDHIAHIIELLGSIPRHFALSGKYSREFFNRRDHIALIIELLGKVPRKYAMLGKYSKEFFXRKGELRHIXKLKPWSLFDVLVEKYGWPHEDAAQFXDFLIPMLEMVPEKRASAGECLRHPWLNS

SEQ ID NO: 26400 - protein, 295 aa, Homo sapiens
  MOD_RES (1)..(1): Any amino acid
  MOD_RES (33)..(33): Selenocysteine
  MOD_RES (62)..(62): Selenocysteine
  MOD_RES (85)..(85): Selenocysteine
  MOD_RES (99)..(99): Selenocysteine
  MOD_RES (105)..(105): Selenocysteine
  MOD_RES (113)..(113): Selenocysteine
  MOD_RES (149)..(149): Selenocysteine
  MOD_RES (154)..(154): Selenocysteine
  MOD_RES (170)..(170): Selenocysteine
  MOD_RES (177)..(177): Selenocysteine
  MOD_RES (186)..(186): Selenocysteine
  MOD_RES (232)..(232): Selenocysteine
  MOD_RES (241)..(241): Selenocysteine
  MOD_RES (267)..(267): Selenocysteine
XEQQLDDEDDDEEDCPNPEEYNLDEPNAESDYXYSSSYEQFNGELPNGRHKIPESQFPEFSXSLFSGSLEPVACGSVLSEGSPLXEQEESSPSHDRSRXVSASSXGDLPKAKXRAADLLVNPLDPRNADKIRVKIADLGNACWVHKHFXEDIQXRQYRSIEVLIGAGYSXPADIWSXACMAFELAXGDYLFEPHSGEDYSRDEDHIALIIELLGKVPRKYAMLGKYSKEFFXRKGELRHIXKLKPWSLFDVLVEKYGWPHEDAAQFXDFLIPMLEMVPEKRASAGECLRHPWLNS

SEQ ID NO: 26401 - protein, 638 aa, Homo sapiens
  MOD_RES (6)..(6): Selenocysteine
  MOD_RES (26)..(26): Selenocysteine
  MOD_RES (48)..(48): Selenocysteine
  MOD_RES (53)..(53): Selenocysteine
  MOD_RES (75)..(75): Selenocysteine
  MOD_RES (77)..(77): Selenocysteine
  MOD_RES (96)..(96): Selenocysteine
  MOD_RES (110)..(110): Selenocysteine
  MOD_RES (134)..(135): Selenocysteine
  MOD_RES (155)..(155): Selenocysteine
  MOD_RES (183)..(183): Selenocysteine
  MOD_RES (232)..(232): Selenocysteine
  MOD_RES (263)..(263): Selenocysteine
  MOD_RES (265)..(266): Selenocysteine
  MOD_RES (269)..(269): Selenocysteine
  MOD_RES (284)..(284): Selenocysteine
  MOD_RES (308)..(308): Selenocysteine
  MOD_RES (313)..(313): Selenocysteine
  MOD_RES (316)..(316): Selenocysteine
  MOD_RES (377)..(377): Selenocysteine
  MOD_RES (380)..(380): Selenocysteine
  MOD_RES (382)..(382): Selenocysteine
  MOD_RES (384)..(384): Selenocysteine
  MOD_RES (422)..(422): Selenocysteine
  MOD_RES (433)..(433): Selenocysteine
  MOD_RES (456)..(456): Selenocysteine
  MOD_RES (467)..(467): Selenocysteine
  MOD_RES (469)..(469): Selenocysteine
  MOD_RES (485)..(485): Selenocysteine
  MOD_RES (521)..(521): Selenocysteine
  MOD_RES (533)..(533): Selenocysteine
  MOD_RES (540)..(540): Selenocysteine
  MOD_RES (543)..(543): Selenocysteine
  MOD_RES (578)..(578): Selenocysteine
  MOD_RES (588)..(588): Selenocysteine
  MOD_RES (592)..(592): Selenocysteine
  MOD_RES (604)..(604): Selenocysteine
  MOD_RES (607)..(607): Selenocysteine
  MOD_RES (616)..(616): Selenocysteine
  MOD_RES (619)..(619): Selenocysteine
MLDFFXIFSKGGLVLWCFQGVSDSCXGPVNALIRSVLLQERGGNNSFXHEALXLKYKLDNQFELVFVVGFQKILXLXYVDKLIDDVHRLFRDKYRXEIQQQSALSLLNGXFDFQNDFLRLLREAEESSKIRAPXXMKKFEDSEKAKKPVRSMIEXRGEKPKEKAKNSKKKGAKKEGSDGPLAXSKPVPAEKSGLPVGPENGVELSKEELIRRKREEFIQKHGRGMEKSNKSXKSDAPKEKGKKAPRVWELGGCANKEVLDYSXPXXNGXPEAALSEDINLIRGXGSGGQLQDLDCSSSDDEGAAQNSXKPSAXKGXLGGMFGMLKGLVGSKSLSREDMESVLDKMRDHLIAKNVAADIAVQLCESVANKLEGKVMGXFSXVXSXVKQALQESLVQILQPQRRVDMLRDIMDAQRRQRPYVVXFCGVNGVGKSXNLAKISFWLLENGFSVLIAACDXFRAGAVEQLRXHXRRLSALHPPEKHGGRXMVQLFEKGYGKDAAGIAMEAIAFARNQGFDVVLVDXAGRMQDNAPLMXALAKLIXVNXPDLVLFVGEALVGNEAVDQLVKFNRALADHSMAQXPRLIDGIVLXKFDXIDDKVGAAISMXYIXSKPIVFVGXGQXYCDLRSLNAKAVVAALMKA

SEQ ID NO: 26402 - protein, 610 aa, Homo sapiens
  MOD_RES (6)..(6): Selenocysteine
  MOD_RES (26)..(26): Selenocysteine
  MOD_RES (47)..(47): Selenocysteine
  MOD_RES (49)..(49): Selenocysteine
  MOD_RES (68)..(68): Selenocysteine
  MOD_RES (82)..(82): Selenocysteine
  MOD_RES (106)..(107): Selenocysteine
  MOD_RES (127)..(127): Selenocysteine
  MOD_RES (155)..(155): Selenocysteine
  MOD_RES (204)..(204): Selenocysteine
  MOD_RES (235)..(235): Selenocysteine
  MOD_RES (237)..(238): Selenocysteine
  MOD_RES (241)..(241): Selenocysteine
  MOD_RES (256)..(256): Selenocysteine
  MOD_RES (280)..(280): Selenocysteine
  MOD_RES (285)..(285): Selenocysteine
  MOD_RES (288)..(288): Selenocysteine
  MOD_RES (349)..(349): Selenocysteine
  MOD_RES (352)..(352): Selenocysteine
  MOD_RES (354)..(354): Selenocysteine
  MOD_RES (356)..(356): Selenocysteine
  MOD_RES (394)..(394): Selenocysteine
  MOD_RES (405)..(405): Selenocysteine
  MOD_RES (428)..(428): Selenocysteine
  MOD_RES (439)..(439): Selenocysteine
  MOD_RES (441)..(441): Selenocysteine
  MOD_RES (457)..(457): Selenocysteine
  MOD_RES (493)..(493): Selenocysteine
  MOD_RES (505)..(505): Selenocysteine
  MOD_RES (512)..(512): Selenocysteine
  MOD_RES (515)..(515): Selenocysteine
  MOD_RES (550)..(550): Selenocysteine
  MOD_RES (560)..(560): Selenocysteine
  MOD_RES (564)..(564): Selenocysteine
  MOD_RES (576)..(576): Selenocysteine
  MOD_RES (579)..(579): Selenocysteine
  MOD_RES (588)..(588): Selenocysteine
  MOD_RES (591)..(591): Selenocysteine
MLDFFXIFSKGGLVLWCFQGVSDSCXGPVNALIRSVLLQVGFQKILXLXYVDKLIDDVHRLFRDKYRXEIQQQSALSLLNGXFDFQNDFLRLLREAEESSKIRAPXXMKKFEDSEKAKKPVRSMIEXRGEKPKEKAKNSKKKGAKKEGSDGPLAXSKPVPAEKSGLPVGPENGVELSKEELIRRKREEFIQKHGRGMEKSNKSXKSDAPKEKGKKAPRVWELGGCANKEVLDYSXPXXNGXPEAALSEDINLIRGXGSGGQLQDLDCSSSDDEGAAQNSXKPSAXKGXLGGMFGMLKGLVGSKSLSREDMESVLDKMRDHLIAKNVAADIAVQLCESVANKLEGKVMGXFSXVXSXVKQALQESLVQILQPQRRVDMLRDIMDAQRRQRPYVVXFCGVNGVGKSXNLAKISFWLLENGFSVLIAACDXFRAGAVEQLRXHXRRLSALHPPEKHGGRXMVQLFEKGYGKDAAGIAMEAIAFARNQGFDVVLVDXAGRMQDNAPLMXALAKLIXVNXPDLVLFVGEALVGNEAVDQLVKFNRALADHSMAQXPRLIDGIVLXKFDXIDDKVGAAISMXYIXSKPIVFVGXGQXYCDLRSLNAKAVVAALMKA

SEQ ID NO: 26403 - protein, 92 aa, Homo sapiens
  MOD_RES (18)..(18): Selenocysteine
  MOD_RES (25)..(25): Selenocysteine
  MOD_RES (33)..(33): Selenocysteine
  MOD_RES (36)..(36): Selenocysteine
  MOD_RES (50)..(50): Selenocysteine
  MOD_RES (78)..(78): Selenocysteine
  MOD_RES (86)..(86): Selenocysteine
  MOD_RES (92)..(92): Selenocysteine
MASADSRRVADGGGAGGXFQPYLDXLRQELQQXDPXLLSVVVAVLAVLLXLVFWKLIRSRRSSQRAVLLVGLCDSGKXLLFVRLLXGLYRDX

SEQ ID NO: 26404 - protein, 271 aa, Homo sapiens
  MOD_RES (18)..(18): Selenocysteine
  MOD_RES (25)..(25): Selenocysteine
  MOD_RES (33)..(33): Selenocysteine
  MOD_RES (36)..(36): Selenocysteine
  MOD_RES (50)..(50): Selenocysteine
  MOD_RES (78)..(78): Selenocysteine
  MOD_RES (86)..(86): Selenocysteine
  MOD_RES (92)..(92): Selenocysteine
  MOD_RES (94)..(94): Selenocysteine
  MOD_RES (97)..(97): Selenocysteine
  MOD_RES (114)..(114): Selenocysteine
  MOD_RES (172)..(172): Selenocysteine
  MOD_RES (203)..(203): Selenocysteine
  MOD_RES (207)..(207): Selenocysteine
  MOD_RES (214)..(214): Selenocysteine
  MOD_RES (220)..(220): Selenocysteine
MASADSRRVADGGGAGGXFQPYLDXLRQELQQXDPXLLSVVVAVLAVLLXLVFWKLIRSRRSSQRAVLLVGLCDSGKXLLFVRLLXGLYRDXQXSIXDSCAVYRVNNNRGNSLXLIDLPGHESLRLQFLERFKSSARAIVFVVDSAAFQREVKDVAEFLYQVLIDSMGLKNXPSFLIACNKQDIAMAKSAKLIQQQLEKELNXLRVXRSAAPSXLDSSSXAPAQLGKKGKEFEFSQLPLKVEFLECSAKGGRGDVGSADIQDLEKWLAKIA

SEQ ID NO: 26405 - protein, 160 aa, Homo sapiens
  MOD_RES (1)..(1): Any amino acid
  MOD_RES (3)..(3): Selenocysteine
  MOD_RES (61)..(61): Selenocysteine
  MOD_RES (92)..(92): Selenocysteine
  MOD_RES (96)..(96): Selenocysteine
  MOD_RES (103)..(103): Selenocysteine
  MOD_RES (109)..(109): Selenocysteine
XLXLIDLPGHESLRLQFLERFKSSARAIVFVVDSAAFQREVKDVAEFLYQVLIDSMGLKNXPSFLIACNKQDIAMAKSAKLIQQQLEKELNXLRVXRSAAPSXLDSSSXAPAQLGKKGKEFEFSQLPLKVEFLECSAKGGRGDVGSADIQDLEKWLAKIA

SEQ ID NO: 26406 - protein, 444 aa, Homo sapiens
  MOD_RES (34)..(34): Selenocysteine
  MOD_RES (59)..(59): Selenocysteine
  MOD_RES (63)..(63): Selenocysteine
  MOD_RES (102)..(102): Selenocysteine
  MOD_RES (132)..(132): Selenocysteine
  MOD_RES (138)..(138): Selenocysteine
  MOD_RES (140)..(140): Selenocysteine
  MOD_RES (178)..(178): Selenocysteine
  MOD_RES (185)..(185): Selenocysteine
  MOD_RES (191)..(191): Selenocysteine
  MOD_RES (197)..(197): Selenocysteine
  MOD_RES (220)..(220): Selenocysteine
  MOD_RES (230)..(230): Selenocysteine
  MOD_RES (265)..(265): Selenocysteine
  MOD_RES (293)..(293): Selenocysteine
  MOD_RES (296)..(296): Selenocysteine
  MOD_RES (308)..(308): Selenocysteine
  MOD_RES (327)..(327): Selenocysteine
  MOD_RES (329)..(329): Selenocysteine
  MOD_RES (355)..(355): Selenocysteine
  MOD_RES (365)..(365): Selenocysteine
  MOD_RES (424)..(424): Selenocysteine
  MOD_RES (441)..(441): Selenocysteine
  MOD_RES (444)..(444): Selenocysteine
MGSPAHRPALLLLLPPLLLLLLLRVPPSRSFPDXPWCSPIKVKYGDVYCRAPQGGYYKXALGXRCDIRCQKGYELHGSSLLICQSNKRWSDKVICKQKRCPXLAMPANGGFKCVDGAYFNSRCEYYCSPGYXLKGERXVXCMDNKAWSGRPASCVDMEPPRIKCPSVKERIAEPNKLXVRVSWEXPEGRDXADGILXDVILKGLPPGSNFPEGDHKIQYXVYDRAENKGXCKFRVKVRVKRCGKLNAPENGYMKCSSDGDNYGAXCEFSCIGGYELQGSPARVCQSNLAWSGXEPXCAAMNVNVGVRXAAALLDQFYEKRRLLIVSXPXARNLLYRLQLGMLQQAQCGLDLRHIXVVELVGVFPXLIGRIGAKIMPPALALQLRLLLRIPLYSFSMVLVDKHGMDKERYVSLVMPVALFNLIDXFPLRKEEMVLQAEMSQXCNX

SEQ ID NO: 26407 - protein, 405 aa, Homo sapiens
  MOD_RES (54)..(54): Selenocysteine
  MOD_RES (79)..(79): Selenocysteine
  MOD_RES (83)..(83): Selenocysteine
  MOD_RES (139)..(139): Selenocysteine
  MOD_RES (146)..(146): Selenocysteine
  MOD_RES (152)..(152): Selenocysteine
  MOD_RES (158)..(158): Selenocysteine
  MOD_RES (181)..(181): Selenocysteine
  MOD_RES (191)..(191): Selenocysteine
  MOD_RES (226)..(226): Selenocysteine
  MOD_RES (254)..(254): Selenocysteine
  MOD_RES (257)..(257): Selenocysteine
  MOD_RES (269)..(269): Selenocysteine
  MOD_RES (288)..(288): Selenocysteine
  MOD_RES (290)..(290): Selenocysteine
  MOD_RES (316)..(316): Selenocysteine
  MOD_RES (326)..(326): Selenocysteine
  MOD_RES (385)..(385): Selenocysteine
  MOD_RES (402)..(402): Selenocysteine
  MOD_RES (405)..(405): Selenocysteine
MGSPAHRPALLLLLPPLLLLLLLRVPPSRSFPGSGDSPLEDDEVGYSHPRYKDXPWCSPIKVKYGDVYCRAPQGGYYKXALGXRCDIRCQKGYELHGSSLLICQSNKRWSDKVICKHMEPPRIKCPSVKERIAEPNKLXVRVSWEXPEGRDXADGILXDVILKGLPPGSNFPEGDHKIQYXVYDRAENKGXCKFRVKVRVKRCGKLNAPENGYMKCSSDGDNYGAXCEFSCIGGYELQGSPARVCQSNLAWSGXEPXCAAMNVNVGVRXAAALLDQFYEKRRLLIVSXPXARNLLYRLQLGMLQQAQCGLDLRHIXVVELVGVFPXLIGRIGAKIMPPALALQLRLLLRIPLYSFSMVLVDKHGMDKERYVSLVMPVALFNLIDXFPLRKEEMVLQAEMSQXCNX

SEQ ID NO: 26408 - protein, 379 aa, Homo sapiens
  MOD_RES (54)..(54): Selenocysteine
  MOD_RES (79)..(79): Selenocysteine
  MOD_RES (83)..(83): Selenocysteine
  MOD_RES (122)..(122): Selenocysteine
  MOD_RES (152)..(152): Selenocysteine
  MOD_RES (158)..(158): Selenocysteine
  MOD_RES (160)..(160): Selenocysteine
  MOD_RES (198)..(198): Selenocysteine
  MOD_RES (205)..(205): Selenocysteine
  MOD_RES (211)..(211): Selenocysteine
  MOD_RES (217)..(217): Selenocysteine
  MOD_RES (240)..(240): Selenocysteine
  MOD_RES (250)..(250): Selenocysteine
  MOD_RES (285)..(285): Selenocysteine
  MOD_RES (313)..(313): Selenocysteine
  MOD_RES (316)..(316): Selenocysteine
  MOD_RES (328)..(328): Selenocysteine
  MOD_RES (347)..(347): Selenocysteine
  MOD_RES (349)..(349): Selenocysteine
  MOD_RES (370)..(370): Selenocysteine
MGSPAHRPALLLLLPPLLLLLLLRVPPSRSFPGSGDSPLEDDEVGYSHPRYKDXPWCSPIKVKYGDVYCRAPQGGYYKXALGXRCDIRCQKGYELHGSSLLICQSNKRWSDKVICKQKRCPXLAMPANGGFKCVDGAYFNSRCEYYCSPGYXLKGERXVXCMDNKAWSGRPASCVDMEPPRIKCPSVKERIAEPNKLXVRVSWEXPEGRDXADGILXDVILKGLPPGSNFPEGDHKIQYXVYDRAENKGXCKFRVKVRVKRCGKLNAPENGYMKCSSDGDNYGAXCEFSCIGGYELQGSPARVCQSNLAWSGXEPXCAAMNVNVGVRXAAALLDQFYEKRRLLIVSXPXARNLLYRLQLGMLQAVAANPXLLLQYGASG

SEQ ID NO: 26409 - protein, 464 aa, Homo sapiens
  MOD_RES (54)..(54): Selenocysteine
  MOD_RES (79)..(79): Selenocysteine
  MOD_RES (83)..(83): Selenocysteine
  MOD_RES (122)..(122): Selenocysteine
  MOD_RES (152)..(152): Selenocysteine
  MOD_RES (158)..(158): Selenocysteine
  MOD_RES (160)..(160): Selenocysteine
  MOD_RES (198)..(198): Selenocysteine
  MOD_RES (205)..(205): Selenocysteine
  MOD_RES (211)..(211): Selenocysteine
  MOD_RES (217)..(217): Selenocysteine
  MOD_RES (240)..(240): Selenocysteine
  MOD_RES (250)..(250): Selenocysteine
  MOD_RES (285)..(285): Selenocysteine
  MOD_RES (313)..(313): Selenocysteine
  MOD_RES (316)..(316): Selenocysteine
  MOD_RES (328)..(328): Selenocysteine
  MOD_RES (347)..(347): Selenocysteine
  MOD_RES (349)..(349): Selenocysteine
  MOD_RES (375)..(375): Selenocysteine
  MOD_RES (385)..(385): Selenocysteine
  MOD_RES (444)..(444): Selenocysteine
  MOD_RES (461)..(461): Selenocysteine
  MOD_RES (464)..(464): Selenocysteine
MGSPAHRPALLLLLPPLLLLLLLRVPPSRSFPGSGDSPLEDDEVGYSHPRYKDXPWCSPIKVKYGDVYCRAPQGGYYKXALGXRCDIRCQKGYELHGSSLLICQSNKRWSDKVICKQKRCPXLAMPANGGFKCVDGAYFNSRCEYYCSPGYXLKGERXVXCMDNKAWSGRPASCVDMEPPRIKCPSVKERIAEPNKLXVRVSWEXPEGRDXADGILXDVILKGLPPGSNFPEGDHKIQYXVYDRAENKGXCKFRVKVRVKRCGKLNAPENGYMKCSSDGDNYGAXCEFSCIGGYELQGSPARVCQSNLAWSGXEPXCAAMNVNVGVRXAAALLDQFYEKRRLLIVSXPXARNLLYRLQLGMLQQAQCGLDLRHIXVVELVGVFPXLIGRIGAKIMPPALALQLRLLLRIPLYSFSMVLVDKHGMDKERYVSLVMPVALFNLIDXFPLRKEEMVLQAEMSQXCNX

SEQ ID NO: 26410 - protein, 204 aa, Homo sapiens
  MOD_RES (37)..(37): Selenocysteine
  MOD_RES (48)..(48): Selenocysteine
  MOD_RES (102)..(102): Selenocysteine
  MOD_RES (169)..(169): Selenocysteine
  MOD_RES (172)..(172): Selenocysteine
  MOD_RES (202)..(202): Selenocysteine
MQSYASAMLSVFNSDDYSPAVQENIPALRRSSSFLCXESCNSKYQCEXGENSKGNVQDRVKRPMNAFIVWSRDQRRKMALENPRMRNSEISKQLGYQWKMLXEAEKWPFFQEAQKLQAMHREKYPNYKYRPRRKAKMLPKNCSLLPADPASVLCSEVQLDNRLYRDDCXKAXHSRMEHQLGHLPPINAASSPQQRDRYSHWXKL

SEQ ID NO: 26411 - protein, 45 aa, Homo sapiens
  MOD_RES (21)..(21): Selenocysteine
MLDDNNHLIQCIMDSQNKGKXSECSHWRLPIHCLLYMLCPDRWVV

SEQ ID NO: 26412 - protein, 35 aa, Homo sapiens
  MOD_RES (21)..(21): Selenocysteine
MLDDNNHLIQCIMDSQNKGKXSECSQVSPNYSRVA

SEQ ID NO: 26413 - protein, 70 aa, Homo sapiens
  MOD_RES (21)..(21): Selenocysteine
  MOD_RES (33)..(33): Selenocysteine
  MOD_RES (40)..(40): Selenocysteine
  MOD_RES (57)..(57): Selenocysteine
MLDDNNHLIQCIMDSQNKGKXSECSQYQQMLHXNLVYLAXIADSNQNMQSLLPAPPXQNMPMGPGGMNQS

SEQ ID NO: 26414 - protein, 130 aa, Homo sapiens
  MOD_RES (21)..(21): Selenocysteine
  MOD_RES (33)..(33): Selenocysteine
  MOD_RES (40)..(40): Selenocysteine
  MOD_RES (57)..(57): Selenocysteine
  MOD_RES (123)..(123): Selenocysteine
MLDDNNHLIQCIMDSQNKGKXSECSQYQQMLHXNLVYLAXIADSNQNMQSLLPAPPXQNMPMGPGGMNQSGPPPPPRSHNMPSDGMVGGGPPAPHMQNQMNGQMPGPNHMPMQGPGPNQLNMXNSSMNMP

SEQ ID NO: 26415 - protein, 152 aa, Homo sapiens
  MOD_RES (21)..(21): Selenocysteine
  MOD_RES (33)..(33): Selenocysteine
  MOD_RES (40)..(40): Selenocysteine
  MOD_RES (57)..(57): Selenocysteine
  MOD_RES (123)..(123): Selenocysteine
MLDDNNHLIQCIMDSQNKGKXSECSQYQQMLHXNLVYLAXIADSNQNMQSLLPAPPXQNMPMGPGGMNQSGPPPPPRSHNMPSDGMVGGGPPAPHMQNQMNGQMPGPNHMPMQGPGPNQLNMXNSSMNMPSSSHGSMGGYNHSVPSSQSMPV

SEQ ID NO: 26416 - protein, 395 aa, Homo sapiens
  MOD_RES (21)..(21): Selenocysteine
  MOD_RES (33)..(33): Selenocysteine
  MOD_RES (40)..(40): Selenocysteine
  MOD_RES (57)..(57): Selenocysteine
  MOD_RES (123)..(123): Selenocysteine
  MOD_RES (157)..(157): Selenocysteine
  MOD_RES (370)..(370): Selenocysteine
MLDDNNHLIQCIMDSQNKGKXSECSQYQQMLHXNLVYLAXIADSNQNMQSLLPAPPXQNMPMGPGGMNQSGPPPPPRSHNMPSDGMVGGGPPAPHMQNQMNGQMPGPNHMPMQGPGPNQLNMXNSSMNMPSSSHGSMGGYNHSVPSSQSMPVQNQMXMSQGQPMGNYGPRPNMSMQPNQGPMMHQQPPSQQYNMPQGGGQHYQGQQPPMGMMGQVNQGNHMMGQRQIPPYRPPQQGPPQQYSGQEDYYGDQYSHGGQGPPEGMNQQYYPDGHNDYGYQQPSYPEQGYDRPYEDSSQHYYEGGNSQYGQQQDAYQGPPPQQGYPPQQQQYPGQQGYPGQQQGYGPSQGGPGPQYPNYPQGQGQQYGGYRPXQPGPPQPPQQRPYGYDQGQYGNYQQ

SEQ ID NO: 26417 - protein, 55 aa, Homo sapiens
  MOD_RES (21)..(21): Selenocysteine
  MOD_RES (33)..(33): Selenocysteine
  MOD_RES (40)..(40): Selenocysteine
MLDDNNHLIQCIMDSQNKGKXSECSQYQQMLHXNLVYLAXIADSNQNMQSLLPAV

SEQ ID NO: 26418 - protein, 61 aa, Homo sapiens
  MOD_RES (17)..(17): Selenocysteine
  MOD_RES (44)..(44): Selenocysteine
MSVAFAAPRQRGKGEIXPAAIQKMLDDNNHLIQCIMDSQNKGKXSECSHHPHRICLWVLEG

SEQ ID NO: 26419 - protein, 94 aa, Homo sapiens
  MOD_RES (17)..(17): Selenocysteine
  MOD_RES (44)..(44): Selenocysteine
  MOD_RES (50)..(50): Selenocysteine
  MOD_RES (55)..(55): Selenocysteine
  MOD_RES (64)..(64): Selenocysteine
  MOD_RES (88)..(89): Selenocysteine
MSVAFAAPRQRGKGEIXPAAIQKMLDDNNHLIQCIMDSQNKGKXSECSHXKIGWXWWWIPVIPXAWEAEAGESLEPGRRRLQVSQDRXXALQPS

SEQ ID NO: 26420 - protein, 68 aa, Homo sapiens
  MOD_RES (17)..(17): Selenocysteine
  MOD_RES (44)..(44): Selenocysteine
MSVAFAAPRQRGKGEIXPAAIQKMLDDNNHLIQCIMDSQNKGKXSECSHWRLPIHCLLYMLCPDRWVV

SEQ ID NO: 26421 - protein, 60 aa, Homo sapiens
  MOD_RES (17)..(17): Selenocysteine
  MOD_RES (44)..(44): Selenocysteine
MSVAFAAPRQRGKGEIXPAAIQKMLDDNNHLIQCIMDSQNKGKXSECSQSGQWEPLKLAS

SEQ ID NO: 26422 - protein, 84 aa, Homo sapiens
  MOD_RES (17)..(17): Selenocysteine
  MOD_RES (44)..(44): Selenocysteine
  MOD_RES (74)..(74): Selenocysteine
  MOD_RES (76)..(76): Selenocysteine
MSVAFAAPRQRGKGEIXPAAIQKMLDDNNHLIQCIMDSQNKGKXSECSQVMNKPHLLVWFGQWSSENLMSCNHXNXQAKENLKA

SEQ ID NO: 26423 - protein, 58 aa, Homo sapiens
  MOD_RES (17)..(17): Selenocysteine
  MOD_RES (44)..(44): Selenocysteine
MSVAFAAPRQRGKGEIXPAAIQKMLDDNNHLIQCIMDSQNKGKXSECSQVSPNYSRVA

SEQ ID NO: 26424 - protein, 387 aa, Homo sapiens
  MOD_RES (17)..(17): Selenocysteine
  MOD_RES (44)..(44): Selenocysteine
  MOD_RES (56)..(56): Selenocysteine
  MOD_RES (63)..(63): Selenocysteine
  MOD_RES (80)..(80): Selenocysteine
  MOD_RES (146)..(146): Selenocysteine
  MOD_RES (180)..(180): Selenocysteine
  MOD_RES (362)..(362): Selenocysteine
MSVAFAAPRQRGKGEIXPAAIQKMLDDNNHLIQCIMDSQNKGKXSECSQYQQMLHXNLVYLAXIADSNQNMQSLLPAPPXQNMPMGPGGMNQSGPPPPPRSHNMPSDGMVGGGPPAPHMQNQMNGQMPGPNHMPMQGPGPNQLNMXNSSMNMPSSSHGSMGGYNHSVPSSQSMPVQNQMXMSQGQPMGNYGPRPNMSMQPNQGPMMHQQPPSQQYNMPQGGGQHYQGQQPPMGMMGQVNQGNHMMGQRQIPPYRPPQQGPPQQYSGQEDYYGDQYSHGGQGPPEGMNQQYYPDGNSQYGQQQDAYQGPPPQQGYPPQQQQYPGQQGYPGQQQGYGPSQGGPGPQYPNYPQGQGQQYGGYRPXQPGPPQPPQQRPYGYDQGQYGNYQQ

SEQ ID NO: 26425 - protein, 418 aa, Homo sapiens
  MOD_RES (17)..(17): Selenocysteine
  MOD_RES (44)..(44): Selenocysteine
  MOD_RES (56)..(56): Selenocysteine
  MOD_RES (63)..(63): Selenocysteine
  MOD_RES (80)..(80): Selenocysteine
  MOD_RES (146)..(146): Selenocysteine
  MOD_RES (180)..(180): Selenocysteine
  MOD_RES (393)..(393): Selenocysteine
MSVAFAAPRQRGKGEIXPAAIQKMLDDNNHLIQCIMDSQNKGKXSECSQYQQMLHXNLVYLAXIADSNQNMQSLLPAPPXQNMPMGPGGMNQSGPPPPPRSHNMPSDGMVGGGPPAPHMQNQMNGQMPGPNHMPMQGPGPNQLNMXNSSMNMPSSSHGSMGGYNHSVPSSQSMPVQNQMXMSQGQPMGNYGPRPNMSMQPNQGPMMHQQPPSQQYNMPQGGGQHYQGQQPPMGMMGQVNQGNHMMGQRQIPPYRPPQQGPPQQYSGQEDYYGDQYSHGGQGPPEGMNQQYYPDGHNDYGYQQPSYPEQGYDRPYEDSSQHYYEGGNSQYGQQQDAYQGPPPQQGYPPQQQQYPGQQGYPGQQQGYGPSQGGPGPQYPNYPQGQGQQYGGYRPXQPGPPQPPQQRPYGYDQGQYGNYQQ

SEQ ID NO: 26426 - protein, 41 aa, Homo sapiens
  MOD_RES (17)..(17): Selenocysteine
MSVAFAAPRQRGKGEIXPAAIQKVSADVAHKLGIPCYNSRF

SEQ ID NO: 26427 - protein, 81 aa, Homo sapiens
  MOD_RES (2)..(2): Selenocysteine
  MOD_RES (53)..(53): Selenocysteine
  MOD_RES (66)..(66): Selenocysteine
  MOD_RES (69)..(69): Selenocysteine
MXQQGAALQNYNNELVKCIEELCQKREELCRQIQEEEDEKQRLQNEILESSQXLLSVLKREAGNLXKAXAPDQKSSGGRDS

SEQ ID NO: 26428 - protein, 119 aa, Homo sapiens
  MOD_RES (2)..(2): Selenocysteine
  MOD_RES (51)..(51): Selenocysteine
  MOD_RES (74)..(74): Selenocysteine
  MOD_RES (78)..(78): Selenocysteine
  MOD_RES (91)..(91): Selenocysteine
  MOD_RES (104)..(104): Selenocysteine
  MOD_RES (107)..(107): Selenocysteine
MXQQGAALQNYNNELVKCIEELCQKREELCRQIQEEEDEKQRLQNEVRQLXEKLARVNENLARKIASRNEFDRXIAEXEAAYLKILESSQXLLSVLKREAGNLXKAXAPDQKSSGGRDS

SEQ ID NO: 26429 - protein, 103 aa, Homo sapiens
  MOD_RES (30)..(30): Selenocysteine
  MOD_RES (32)..(32): Selenocysteine
  MOD_RES (44)..(44): Selenocysteine
  MOD_RES (82)..(82): Selenocysteine
  MOD_RES (97)..(97): Selenocysteine
MGGRPFGLVINLNYKDLNGNVFQDAVFNQXVXVIEREDGLDGEXIFMYMFLAGLGLLVIVGLHQLLESRKRKRPIQKVEMGXSSQNDVDMSWIPQEXLNQISK

SEQ ID NO: 26430 - protein, 266 aa, Homo sapiens
  MOD_RES (18)..(18): Selenocysteine
  MOD_RES (36)..(36): Selenocysteine
  MOD_RES (41)..(41): Selenocysteine
  MOD_RES (62)..(62): Selenocysteine
  MOD_RES (85)..(86): Selenocysteine
  MOD_RES (108)..(108): Selenocysteine
  MOD_RES (112)..(112): Selenocysteine
  MOD_RES (138)..(138): Selenocysteine
  MOD_RES (144)..(144): Selenocysteine
  MOD_RES (153)..(153): Selenocysteine
  MOD_RES (193)..(193): Selenocysteine
  MOD_RES (195)..(195): Selenocysteine
  MOD_RES (207)..(207): Selenocysteine
  MOD_RES (245)..(245): Selenocysteine
  MOD_RES (260)..(260): Selenocysteine
MRLLPRLLLLLLLVFPAXVLFRGGPRGLLAVAQDLXEDEEXVEDSIIEDEDDEAEVEEDEPXDLVEDKEEEDVSGEPEASPSADXXILFVKGEDFPANNIVKFLVGFXNKGXEDFIVESLDASFRYPQDYQFYIQNFXALPLNXVVPPQRQAXFEYSFIPAEPMGGRPFGLVINLNYKDLNGNVFQDAVFNQXVXVIEREDGLDGEXIFMYMFLAGLGLLVIVGLHQLLESRKRKRPIQKVEMGXSSQNDVDMSWIPQEXLNQISK

SEQ ID NO: 26431 - protein, 286 aa, Homo sapiens
  MOD_RES (18)..(18): Selenocysteine
  MOD_RES (36)..(36): Selenocysteine
  MOD_RES (41)..(41): Selenocysteine
  MOD_RES (62)..(62): Selenocysteine
  MOD_RES (85)..(86): Selenocysteine
  MOD_RES (108)..(108): Selenocysteine
  MOD_RES (112)..(112): Selenocysteine
  MOD_RES (138)..(138): Selenocysteine
  MOD_RES (144)..(144): Selenocysteine
  MOD_RES (153)..(153): Selenocysteine
  MOD_RES (193)..(193): Selenocysteine
  MOD_RES (195)..(195): Selenocysteine
  MOD_RES (207)..(207): Selenocysteine
  MOD_RES (245)..(245): Selenocysteine
  MOD_RES (260)..(260): Selenocysteine
MRLLPRLLLLLLLVFPAXVLFRGGPRGLLAVAQDLXEDEEXVEDSIIEDEDDEAEVEEDEPXDLVEDKEEEDVSGEPEASPSADXXILFVKGEDFPANNIVKFLVGFXNKGXEDFIVESLDASFRYPQDYQFYIQNFXALPLNXVVPPQRQAXFEYSFIPAEPMGGRPFGLVINLNYKDLNGNVFQDAVFNQXVXVIEREDGLDGEXIFMYMFLAGLGLLVIVGLHQLLESRKRKRPIQKVEMGXSSQNDVDMSWIPQEXLNQINKASPRRLPRKRAQKRSVGSDE

SEQ ID NO: 26432 - protein, 291 aa, Homo sapiens
  MOD_RES (18)..(18): Selenocysteine
  MOD_RES (36)..(36): Selenocysteine
  MOD_RES (41)..(41): Selenocysteine
  MOD_RES (62)..(62): Selenocysteine
  MOD_RES (85)..(86): Selenocysteine
  MOD_RES (108)..(108): Selenocysteine
  MOD_RES (112)..(112): Selenocysteine
  MOD_RES (138)..(138): Selenocysteine
  MOD_RES (144)..(144): Selenocysteine
  MOD_RES (153)..(153): Selenocysteine
  MOD_RES (193)..(193): Selenocysteine
  MOD_RES (195)..(195): Selenocysteine
  MOD_RES (207)..(207): Selenocysteine
  MOD_RES (245)..(245): Selenocysteine
  MOD_RES (260)..(260): Selenocysteine
MRLLPRLLLLLLLVFPAXVLFRGGPRGLLAVAQDLXEDEEXVEDSIIEDEDDEAEVEEDEPXDLVEDKEEEDVSGEPEASPSADXXILFVKGEDFPANNIVKFLVGFXNKGXEDFIVESLDASFRYPQDYQFYIQNFXALPLNXVVPPQRQAXFEYSFIPAEPMGGRPFGLVINLNYKDLNGNVFQDAVFNQXVXVIEREDGLDGEXIFMYMFLAGLGLLVIVGLHQLLESRKRKRPIQKVEMGXSSQNDVDMSWIPQEXLNQIMQSRRDKASPRRLPRKRAQKRSVGSDE

SEQ ID NO: 26433 - protein, 298 aa, Homo sapiens
  MOD_RES (18)..(18): Selenocysteine
  MOD_RES (36)..(36): Selenocysteine
  MOD_RES (41)..(41): Selenocysteine
  MOD_RES (62)..(62): Selenocysteine
  MOD_RES (85)..(86): Selenocysteine
  MOD_RES (108)..(108): Selenocysteine
  MOD_RES (112)..(112): Selenocysteine
  MOD_RES (138)..(138): Selenocysteine
  MOD_RES (144)..(144): Selenocysteine
  MOD_RES (153)..(153): Selenocysteine
  MOD_RES (193)..(193): Selenocysteine
  MOD_RES (195)..(195): Selenocysteine
  MOD_RES (207)..(207): Selenocysteine
  MOD_RES (245)..(245): Selenocysteine
  MOD_RES (260)..(260): Selenocysteine
  MOD_RES (297)..(297): Selenocysteine
MRLLPRLLLLLLLVFPAXVLFRGGPRGLLAVAQDLXEDEEXVEDSIIEDEDDEAEVEEDEPXDLVEDKEEEDVSGEPEASPSADXXILFVKGEDFPANNIVKFLVGFXNKGXEDFIVESLDASFRYPQDYQFYIQNFXALPLNXVVPPQRQAXFEYSFIPAEPMGGRPFGLVINLNYKDLNGNVFQDAVFNQXVXVIEREDGLDGEXIFMYMFLAGLGLLVIVGLHQLLESRKRKRPIQKVEMGXSSQNDVDMSWIPQEXLNQIMQSRRDKASPRRLPRKRAQKRSVGSDERRRREXH

SEQ ID NO: 26434 - protein, 265 aa, Homo sapiens
  MOD_RES (18)..(18): Selenocysteine
  MOD_RES (36)..(36): Selenocysteine
  MOD_RES (41)..(41): Selenocysteine
  MOD_RES (62)..(62): Selenocysteine
  MOD_RES (85)..(86): Selenocysteine
  MOD_RES (108)..(108): Selenocysteine
  MOD_RES (112)..(112): Selenocysteine
  MOD_RES (138)..(138): Selenocysteine
  MOD_RES (144)..(144): Selenocysteine
  MOD_RES (153)..(153): Selenocysteine
  MOD_RES (193)..(193): Selenocysteine
  MOD_RES (195)..(195): Selenocysteine
  MOD_RES (207)..(207): Selenocysteine
  MOD_RES (262)..(262): Selenocysteine
MRLLPRLLLLLLLVFPAXVLFRGGPRGLLAVAQDLXEDEEXVEDSIIEDEDDEAEVEEDEPXDLVEDKEEEDVSGEPEASPSADXXILFVKGEDFPANNIVKFLVGFXNKGXEDFIVESLDASFRYPQDYQFYIQNFXALPLNXVVPPQRQAXFEYSFIPAEPMGGRPFGLVINLNYKDLNGNVFQDAVFNQXVXVIEREDGLDGEXIFMYMFLAGLGLLVIVGLHQLLESRKSGSFIQDGVQWHNLAYCNLRLRGSSHPPXSAS

SEQ ID NO: 26435 - protein, 218 aa, Homo sapiens
  MOD_RES (18)..(18): Selenocysteine
  MOD_RES (36)..(36): Selenocysteine
  MOD_RES (41)..(41): Selenocysteine
  MOD_RES (62)..(62): Selenocysteine
  MOD_RES (85)..(86): Selenocysteine
  MOD_RES (125)..(125): Selenocysteine
  MOD_RES (127)..(127): Selenocysteine
  MOD_RES (139)..(139): Selenocysteine
  MOD_RES (177)..(177): Selenocysteine
  MOD_RES (192)..(192): Selenocysteine
MRLLPRLLLLLLLVFPAXVLFRGGPRGLLAVAQDLXEDEEXVEDSIIEDEDDEAEVEEDEPXDLVEDKEEEDVSGEPEASPSADXXILFVKGEEPMGGRPFGLVINLNYKDLNGNVFQDAVFNQXVXVIEREDGLDGEXIFMYMFLAGLGLLVIVGLHQLLESRKRKRPIQKVEMGXSSQNDVDMSWIPQEXLNQINKASPRRLPRKRAQKRSVGSDE

SEQ ID NO: 26436 - protein, 115 aa, Homo sapiens
  MOD_RES (3)..(3): Selenocysteine
  MOD_RES (13)..(13): Selenocysteine
  MOD_RES (45)..(45): Selenocysteine
  MOD_RES (71)..(71): Selenocysteine
MPXGEDGRRVWRXGLLWWLMDYSVEGAAVLMRLLSFVVLALFAVXQAEEGARLLASKSLLNRYAVEGRDLXLQYNIYNVGSSAALDVELSDDSFPPEDFGIVSGMLNVKWDRIAP

SEQ ID NO: 26437 - protein, 62 aa, Homo sapiens
  MOD_RES (15)..(15): Selenocysteine
  MOD_RES (41)..(41): Selenocysteine
MRLLSFVVLALFAVXQAEEGARLLASKSLLNRYAVEGRDLXLQYNIYNVGSRHVHEEKLRQG

SEQ ID NO: 26438 - protein, 86 aa, Homo sapiens
  MOD_RES (15)..(15): Selenocysteine
  MOD_RES (41)..(41): Selenocysteine
  MOD_RES (71)..(71): Selenocysteine
  MOD_RES (80)..(80): Selenocysteine
MRLLSFVVLALFAVXQAEEGARLLASKSLLNRYAVEGRDLXLQYNIYNVGSRLALPVHLDREESWLSGSLXGDSPLIFWXGQPLGS

SEQ ID NO: 26439 - protein, 147 aa, Homo sapiens
  MOD_RES (15)..(15): Selenocysteine
  MOD_RES (41)..(41): Selenocysteine
  MOD_RES (92)..(92): Selenocysteine
  MOD_RES (106)..(106): Selenocysteine
  MOD_RES (109)..(109): Selenocysteine
  MOD_RES (111)..(111): Selenocysteine
  MOD_RES (125)..(125): Selenocysteine
MRLLSFVVLALFAVXQAEEGARLLASKSLLNRYAVEGRDLXLQYNIYNVGSSAALDVELSDDSFPPEDFGIVSGMLNVKWDRIAPASNVSHXVVLRPLKAGYFNFXSAXIXYLAQEDGPVVIGSXSAPGQGGILAQREFDRRFSPHF

SEQ ID NO: 26440 - protein, 183 aa, Homo sapiens
  MOD_RES (15)..(15): Selenocysteine
  MOD_RES (41)..(41): Selenocysteine
  MOD_RES (92)..(92): Selenocysteine
  MOD_RES (106)..(106): Selenocysteine
  MOD_RES (109)..(109): Selenocysteine
  MOD_RES (111)..(111): Selenocysteine
  MOD_RES (125)..(125): Selenocysteine
  MOD_RES (157)..(157): Selenocysteine
  MOD_RES (177)..(177): Selenocysteine
  MOD_RES (180)..(180): Selenocysteine
MRLLSFVVLALFAVXQAEEGARLLASKSLLNRYAVEGRDLXLQYNIYNVGSSAALDVELSDDSFPPEDFGIVSGMLNVKWDRIAPASNVSHXVVLRPLKAGYFNFXSAXIXYLAQEDGPVVIGSXSAPGQGGILAQREFDRRFSPHFLDWAAFGVMXLPSIGIPLLLWYSSKRKYDXPKXKKN

SEQ ID NO: 26441 - protein, 133 aa, Homo sapiens
  MOD_RES (15)..(15): Selenocysteine
  MOD_RES (41)..(41): Selenocysteine
  MOD_RES (92)..(92): Selenocysteine
  MOD_RES (106)..(106): Selenocysteine
  MOD_RES (109)..(109): Selenocysteine
  MOD_RES (111)..(111): Selenocysteine
MRLLSFVVLALFAVXQAEEGARLLASKSLLNRYAVEGRDLXLQYNIYNVGSSAALDVELSDDSFPPEDFGIVSGMLNVKWDRIAPASNVSHXVVLRPLKAGYFNFXSAXIXYLAQEDGPVVNQPQDSLVLPGS

SEQ ID NO: 26442 - protein, 93 aa, Homo sapiens
  MOD_RES (15)..(15): Selenocysteine
  MOD_RES (41)..(41): Selenocysteine
  MOD_RES (87)..(87): Selenocysteine
MRLLSFVVLALFAVXQAEEGARLLASKSLLNRYAVEGRDLXLQYNIYNVGSSAALDVELSDDSFPPEDFGIVSGMLNVKWDRIAPWXGQPLGS

SEQ ID NO: 26443 - protein, 90 aa, Homo sapiens
  MOD_RES (15)..(15): Selenocysteine
  MOD_RES (41)..(41): Selenocysteine
  MOD_RES (90)..(90): Selenocysteine
MRLLSFVVLALFAVXQAEEGARLLASKSLLNRYAVEGRDLXLQYNIYNVGSSAALDVELSDDSFPPEDFGIVSGMLNVKWDRIAPYPLGX

SEQ ID NO: 26444 - protein, 198 aa, Homo sapiens
  MOD_RES (66)..(66): Selenocysteine
  MOD_RES (70)..(70): Selenocysteine
  MOD_RES (101)..(101): Selenocysteine
  MOD_RES (147)..(148): Selenocysteine
  MOD_RES (156)..(156): Selenocysteine
  MOD_RES (176)..(176): Selenocysteine
  MOD_RES (195)..(195): Selenocysteine
MAPKGSSKQQSEEDLLLQDFSRNLSAKSSALFFGNAFIVSAIPIWLYWRIWHMDLIQSAVLYSVMXLVSXYLVAFAYKNVKFVLKHKVAQKREDAVSKEVXRKLSEADNRKMSRKEKDERFDSCLKYGHHKRGILWKKNEVADYEAXXFSIFYNNXLFLVVVIVASFFILKNFNPXVNYILSISASSGLIALLSXGSK

SEQ ID NO: 26445 - protein, 185 aa, Homo sapiens
  MOD_RES (66)..(66): Selenocysteine
  MOD_RES (70)..(70): Selenocysteine
  MOD_RES (101)..(101): Selenocysteine
  MOD_RES (134)..(135): Selenocysteine
  MOD_RES (143)..(143): Selenocysteine
  MOD_RES (163)..(163): Selenocysteine
  MOD_RES (182)..(182): Selenocysteine
MAPKGSSKQQSEEDLLLQDFSRNLSAKSSALFFGNAFIVSAIPIWLYWRIWHMDLIQSAVLYSVMXLVSXYLVAFAYKNVKFVLKHKVAQKREDAVSKEVXRKLSEADNRKMSRKEKDERILWKKNEVADYEAXXFSIFYNNXLFLVVVIVASFFILKNFNPXVNYILSISASSGLIALLSXGSK

SEQ ID NO: 26446 - protein, 174 aa, Homo sapiens
  MOD_RES (66)..(66): Selenocysteine
  MOD_RES (70)..(70): Selenocysteine
  MOD_RES (101)..(101): Selenocysteine
  MOD_RES (134)..(135): Selenocysteine
  MOD_RES (143)..(143): Selenocysteine
  MOD_RES (163)..(163): Selenocysteine
  MOD_RES (170)..(171): Selenocysteine
MAPKGSSKQQSEEDLLLQDFSRNLSAKSSALFFGNAFIVSAIPIWLYWRIWHMDLIQSAVLYSVMXLVSXYLVAFAYKNVKFVLKHKVAQKREDAVSKEVXRKLSEADNRKMSRKEKDERILWKKNEVADYEAXXFSIFYNNXLFLVVVIVASFFILKNFNPXVYPFQGXXYCP

SEQ ID NO: 26447 - protein, 133 aa, Homo sapiens
  MOD_RES (14)..(14): Selenocysteine
  MOD_RES (18)..(18): Selenocysteine
  MOD_RES (49)..(49): Selenocysteine
  MOD_RES (82)..(83): Selenocysteine
  MOD_RES (91)..(91): Selenocysteine
  MOD_RES (111)..(111): Selenocysteine
  MOD_RES (130)..(130): Selenocysteine
MDLIQSAVLYSVMXLVSXYLVAFAYKNVKFVLKHKVAQKREDAVSKEVXRKLSEADNRKMSRKEKDERILWKKNEVADYEAXXFSIFYNNXLFLVVVIVASFFILKNFNPXVNYILSISASSGLIALLSXGSK

SEQ ID NO: 26448 - protein, 173 aa, Homo sapiens
  MOD_RES (32)..(32): Selenocysteine
  MOD_RES (37)..(38): Selenocysteine
  MOD_RES (45)..(45): Selenocysteine
  MOD_RES (47)..(47): Selenocysteine
  MOD_RES (56)..(56): Selenocysteine
  MOD_RES (78)..(78): Selenocysteine
  MOD_RES (101)..(101): Selenocysteine
  MOD_RES (133)..(133): Selenocysteine
  MOD_RES (141)..(141): Selenocysteine
  MOD_RES (149)..(149): Selenocysteine
MAAMASLGALALLLLSSLSRCSAEACLEPQIXPSYYXXSDAVISXEXVFIVEISLXCKNRVQNMALYADVGGKQFPVXRGQDVGRYQVSWSLDHKSAHAGXYEVRFFDEESYSLLRKAQRNNEDISIIPPLFXVSVDHRGXWNGPWVSXEVLAAAIGLVIYYLAFSAKSHIQA

SEQ ID NO: 26449 - protein, 148 aa, Homo sapiens
  MOD_RES (32)..(32): Selenocysteine
  MOD_RES (37)..(38): Selenocysteine
  MOD_RES (45)..(45): Selenocysteine
  MOD_RES (47)..(47): Selenocysteine
  MOD_RES (56)..(56): Selenocysteine
  MOD_RES (76)..(76): Selenocysteine
  MOD_RES (108)..(108): Selenocysteine
  MOD_RES (116)..(116): Selenocysteine
  MOD_RES (124)..(124): Selenocysteine
MAAMASLGALALLLLSSLSRCSAEACLEPQIXPSYYXXSDAVISXEXVFIVEISLXCKNRVQVSWSLDHKSAHAGXYEVRFFDEESYSLLRKAQRNNEDISIIPPLFXVSVDHRGXWNGPWVSXEVLAAAIGLVIYYLAFSAKSHIQA

SEQ ID NO: 26450 - protein, 709 aa, Homo sapiens
  MOD_RES (4)..(4): Selenocysteine
  MOD_RES (37)..(37): Selenocysteine
  MOD_RES (49)..(49): Selenocysteine
  MOD_RES (66)..(66): Selenocysteine
  MOD_RES (91)..(91): Selenocysteine
  MOD_RES (111)..(111): Selenocysteine
  MOD_RES (140)..(141): Selenocysteine
  MOD_RES (147)..(147): Selenocysteine
  MOD_RES (170)..(170): Selenocysteine
  MOD_RES (195)..(195): Selenocysteine
  MOD_RES (209)..(209): Selenocysteine
  MOD_RES (221)..(221): Selenocysteine
  MOD_RES (229)..(229): Selenocysteine
  MOD_RES (237)..(238): Selenocysteine
  MOD_RES (268)..(268): Selenocysteine
  MOD_RES (286)..(286): Selenocysteine
  MOD_RES (303)..(303): Selenocysteine
  MOD_RES (327)..(327): Selenocysteine
  MOD_RES (342)..(342): Selenocysteine
  MOD_RES (383)..(386): Selenocysteine
  MOD_RES (395)..(395): Selenocysteine
  MOD_RES (399)..(399): Selenocysteine
  MOD_RES (402)..(402): Selenocysteine
  MOD_RES (478)..(478): Selenocysteine
  MOD_RES (575)..(575): Selenocysteine
  MOD_RES (642)..(642): Selenocysteine
  MOD_RES (696)..(696): Selenocysteine
MAEXLEFNDVYQEVKGSMNDGRLRLSRQGIIFKNSKXGKVDNIQAGELXEGIWRRVALGHGLKLLXKNGHVYKYDGFRESEFEKLSDFFKXHYRLELMEKDLCVKGWNWGXVKFGGQLLSFDIGDQPVFEIPLSNVSQCXXGKNEVXLEFHQNDDAEVSLMEVRFYVPPXQEDGVDPVEAFAQNVLSKADVIQAXGDAICIFRELQCLXPRGRYDIRIYPXFLHLHGKXFDYKIPYXXVLRLFLLPHKDQRQMFFVISLDPPIKQGQXRYHFLILLFSKDEDISLXLNMNEEEVEKRFEGRLXKNMSGSLYEMVSRVMKALVNRKIXVPGNFQGHSGAQCIXCSYKASSGLLYPLERGFIYVHKPPVHIRFDEISFVNFARGXXXXRSFDFEIEXKQGXQYXFSSIEREEYGKLFDFVNAKKLNIKNRGLKEGMNPSYDEYADSDEDQHDAYLERMKEEGKIREENANDSSDDSGEEXDESFNPGEEEEDVAEEFDSNASASSSSNEGDSDRDEKKRKQLKKAKMAKDRKSRKKPVEVKKGKDPNAPKRPMSAYMLWLNASREKIKSDHPGISIXDLSKKAGEIWKGMSKEKKEEWDRKAEDARRDYEKAMKEYEGGRGESSKRDKSKKKKKVKVKMEKKSXPSRGSSSKSSSRQLSESFKSKEFVSSDESSSGENKSKKKRRRSEDSEEEELASXPPSSEDSASGSDE

SEQ ID NO: 26451 - protein, 89 aa, Homo sapiens
  MOD_RES (14)..(14): Selenocysteine
  MOD_RES (43)..(44): Selenocysteine
  MOD_RES (50)..(50): Selenocysteine
  MOD_RES (73)..(73): Selenocysteine
MEKDLCVKGWNWGXVKFGGQLLSFDIGDQPVFEIPLSNVSQCXXGKNEVXLEFHQNDDAEVSLMEVRFYVPPXQEDGVDPVEAFAQNVL

SEQ ID NO: 26452 - protein, 173 aa, Homo sapiens
  MOD_RES (14)..(14): Selenocysteine
  MOD_RES (43)..(44): Selenocysteine
  MOD_RES (50)..(50): Selenocysteine
  MOD_RES (73)..(73): Selenocysteine
  MOD_RES (98)..(98): Selenocysteine
  MOD_RES (112)..(112): Selenocysteine
  MOD_RES (124)..(124): Selenocysteine
  MOD_RES (132)..(132): Selenocysteine
  MOD_RES (140)..(141): Selenocysteine
  MOD_RES (171)..(171): Selenocysteine
MEKDLCVKGWNWGXVKFGGQLLSFDIGDQPVFEIPLSNVSQCXXGKNEVXLEFHQNDDAEVSLMEVRFYVPPXQEDGVDPVEAFAQNVLSKADVIQAXGDAICIFRELQCLXPRGRYDIRIYPXFLHLHGKXFDYKIPYXXVLRLFLLPHKDQRQMFFVISLDPPIKQGQXRY

SEQ ID NO: 26453 - protein, 225 aa, Homo sapiens
  MOD_RES (1)..(1): Any amino acid
  MOD_RES (74)..(74): Selenocysteine
  MOD_RES (171)..(171): Selenocysteine
XEEYGKLFDFVNAKKLNIKNRGLKEKKEGMNPSYDEYADSDEDQHDAYLERMKEEGKIREENANDSSDDSGEEXDESFNPGEEEEDVAEEFDSNASASSSSNEGDSDRDEKKRKQLKKAKMAKDRKSRKKPVEVKKGKDPNAPKRPMSAYMLWLNASREKIKSDHPGISIXDLSKKAGEIWKGMSKEKKEEWDRKAEDARRDYEKAMKEYEGGRGESSKRDKSKK

SEQ ID NO: 26454 - protein, 116 aa, Homo sapiens
  MOD_RES (23)..(23): Selenocysteine
  MOD_RES (63)..(63): Selenocysteine
  MOD_RES (112)..(112): Selenocysteine
  MOD_RES (114)..(114): Selenocysteine
MLSCRLQCALAALSIVLALGCVXGAPSDPRLRQFLQKSLAAAAGKQELAKYFLAELLSEPNQXENDALEPEDLSQAAEQDEMRLELQRSANSNPAMAPRERKAGCKNFFWKXFXSC

SEQ ID NO: 26455 - protein, 391 aa, Homo sapiens
  MOD_RES (6)..(6): Selenocysteine
  MOD_RES (50)..(50): Selenocysteine
  MOD_RES (91)..(91): Selenocysteine
  MOD_RES (93)..(93): Selenocysteine
  MOD_RES (116)..(116): Selenocysteine
  MOD_RES (118)..(118): Selenocysteine
  MOD_RES (143)..(143): Selenocysteine
  MOD_RES (149)..(149): Selenocysteine
  MOD_RES (172)..(172): Selenocysteine
  MOD_RES (198)..(198): Selenocysteine
  MOD_RES (205)..(205): Selenocysteine
  MOD_RES (227)..(227): Selenocysteine
  MOD_RES (270)..(270): Selenocysteine
  MOD_RES (303)..(303): Selenocysteine
  MOD_RES (356)..(356): Selenocysteine
  MOD_RES (383)..(383): Selenocysteine
  MOD_RES (385)..(385): Selenocysteine
  MOD_RES (389)..(390): Selenocysteine
MFPNGXASSPSSSPSPSPGSCGEGGGSRGPGAGAADGMEEPGRNASQNGXLSEGQGSAILISFIYSVVCLVGLCGNSMVIYVILRYAKMKXAXNIYILNLAIADELLMLSVPFLVXSXLLRHWPFGALLCRLVLSVDAVNMFXSIYCLXVLSVDRYVAVVHPIKAARYRRPXVAKVVNLGVWVLSLLVILPIVVFSRXAANSDGXVACNMLMPEPAQRWLVGFVLYXFLMGFLLPVGAICLCYVLIIAKMRMVALKAGWQQRKRSERKIXLMVMMVVMVFVICWMPFYVVQLVNVFAEQDDAXVSQLSVILGYANSCANPILYGFLSDNFKRSFQRILCLSWMDNAAEEPVDYYAXALKSRAYSVEDFQPENLESGGVFRNGXCXSRIXXL

SEQ ID NO: 26456 - protein, 369 aa, Homo sapiens
  MOD_RES (13)..(13): Selenocysteine
  MOD_RES (28)..(28): Selenocysteine
  MOD_RES (30)..(30): Selenocysteine
  MOD_RES (34)..(34): Selenocysteine
  MOD_RES (41)..(41): Selenocysteine
  MOD_RES (47)..(47): Selenocysteine
  MOD_RES (62)..(62): Selenocysteine
  MOD_RES (76)..(76): Selenocysteine
  MOD_RES (78)..(78): Selenocysteine
  MOD_RES (120)..(120): Selenocysteine
  MOD_RES (128)..(128): Selenocysteine
  MOD_RES (134)..(134): Selenocysteine
  MOD_RES (158)..(158): Selenocysteine
  MOD_RES (163)..(163): Selenocysteine
  MOD_RES (194)..(194): Selenocysteine
  MOD_RES (206)..(206): Selenocysteine
  MOD_RES (212)..(212): Selenocysteine
  MOD_RES (222)..(222): Selenocysteine
  MOD_RES (255)..(255): Selenocysteine
  MOD_RES (287)..(287): Selenocysteine
  MOD_RES (301)..(301): Selenocysteine
  MOD_RES (335)..(335): Selenocysteine
  MOD_RES (353)..(354): Selenocysteine
  MOD_RES (356)..(356): Selenocysteine
  MOD_RES (359)..(359): Selenocysteine
  MOD_RES (367)..(367): Selenocysteine
MDMADEPLNGSHXWLSIPFDLNGSVVSXNXSNQXEPYYDLXSNAVLXFIYFVVCIIGLCGNXLVIYVILRYAKMKXIXNIYILNLAIADELFMLGLPFLAMQVALVHWPFGKAICRVVMXVDGINQFXSIFCLXVMSIDRYLAVVHPIKSAKWRRPRXAKMIXMAVWGVSLLVILPIMIYAGLRSNQWGRSSCXINWPGESGAWYXGFIIYXFILGFLVPLXIICLCYLFIIIKVKSSGIRVGSSKRKKSEKKVXRMVSIVVAVFIFCWLPFYIFNVSSVSMAISPXPALKGMFDFVVVLXYANSCANPILYAFLSDNFKKSFQNVLCLVKVSGXDDGERSDSKQDKSRLNEXXEXQRXLLNGDLQXSI

SEQ ID NO: 26457 - protein, 418 aa, Homo sapiens
  MOD_RES (11)..(12): Selenocysteine
  MOD_RES (27)..(27): Selenocysteine
  MOD_RES (73)..(73): Selenocysteine
  MOD_RES (79)..(79): Selenocysteine
  MOD_RES (129)..(129): Selenocysteine
  MOD_RES (135)..(135): Selenocysteine
  MOD_RES (149)..(149): Selenocysteine
  MOD_RES (156)..(156): Selenocysteine
  MOD_RES (162)..(162): Selenocysteine
  MOD_RES (190)..(190): Selenocysteine
  MOD_RES (210)..(210): Selenocysteine
  MOD_RES (256)..(256): Selenocysteine
  MOD_RES (341)..(341): Selenocysteine
  MOD_RES (348)..(348): Selenocysteine
  MOD_RES (378)..(378): Selenocysteine
  MOD_RES (382)..(382): Selenocysteine
  MOD_RES (406)..(406): Selenocysteine
  MOD_RES (412)..(412): Selenocysteine
MDMLHPSSVSXXSEPENASSAWPPDAXLGNVSAGPSPAGLAVSGVLIPLVYLVVCVVGLLGNSLVIYVVLRHXASPSVXNVYILNLALADELFMLGLPFLAAQNALSYWPFGSLMCRLVMAVDGINQFXSIFCLXVMSVDRYLAVVHPXRSARWRXAPVARXVSAAVWVASAVVVLPVVVFSGVPRGMSXCHMQWPEPAAAWRAGFIIYXAALGFFGPLLVICLCYLLIVVKVRSAGRRVWAPSCQRRRRSERRVXRMVVAVVALFVLCWMPFYVLNIVNVVCPLPEEPAFFGLYFLVVALPYANSCANPILYGFLSYRFKQGFRRVLLRPSRRVRSQEPXVGPPEKXEEEDEEEEDGEESREGGKGKEMNGRVSQIXQPGXSGQERPPSRVASKEQQLLPQEASXGEKSSXMRISYL

SEQ ID NO: 26458 - protein, 388 aa, Homo sapiens
  MOD_RES (6)..(6): Selenocysteine
  MOD_RES (17)..(17): Selenocysteine
  MOD_RES (80)..(80): Selenocysteine
  MOD_RES (82)..(82): Selenocysteine
  MOD_RES (132)..(132): Selenocysteine
  MOD_RES (138)..(138): Selenocysteine
  MOD_RES (156)..(156): Selenocysteine
  MOD_RES (178)..(178): Selenocysteine
  MOD_RES (187)..(187): Selenocysteine
  MOD_RES (215)..(215): Selenocysteine
  MOD_RES (258)..(258): Selenocysteine
  MOD_RES (286)..(286): Selenocysteine
  MOD_RES (291)..(291): Selenocysteine
  MOD_RES (349)..(349): Selenocysteine
  MOD_RES (383)..(383): Selenocysteine
  MOD_RES (385)..(387): Selenocysteine
MSAPSXLPPGGEEGLGXAWPSAANASSAPAEAEEAVAGPGDARAAGMVAIQCIYALVCLVGLVGNALVIFVILRYAKMKXAXNIYLLNLAVADELFMLSVPFVASSAALRHWPFGSVLCRAVLSVDGLNMFXSVFCLXVLSVDRYVAVVHPLRAAXYRRPSVAKLINLGVWLASLLVXLPIAIFADXRPARGGQAVACNLQWPHPAWSAVFVVYXFLLGFLLPVLAIGLCYLLIVGKMRAVALRAGWQQRRRSEKKIXRLVLMVVVVFVLCWMPFYVVQLLNLFVXSLDAXVNHVSLILSYANSCANPILYGFLSDNFRRFFQRVLCLRCCLLEGAGGAEEEPLDYYAXALKSKGGAGCMCPPLPCQQEALQPEPGRKRIPLXRXXXF

SEQ ID NO: 26459 - protein, 364 aa, Homo sapiens
  MOD_RES (9)..(9): Selenocysteine
  MOD_RES (28)..(28): Selenocysteine
  MOD_RES (59)..(59): Selenocysteine
  MOD_RES (73)..(73): Selenocysteine
  MOD_RES (75)..(75): Selenocysteine
  MOD_RES (98)..(98): Selenocysteine
  MOD_RES (117)..(117): Selenocysteine
  MOD_RES (125)..(125): Selenocysteine
  MOD_RES (131)..(131): Selenocysteine
  MOD_RES (185)..(185): Selenocysteine
  MOD_RES (205)..(205): Selenocysteine
  MOD_RES (247)..(247): Selenocysteine
  MOD_RES (266)..(266): Selenocysteine
  MOD_RES (333)..(333): Selenocysteine
  MOD_RES (347)..(347): Selenocysteine
  MOD_RES (361)..(361): Selenocysteine
MEPLFPASXPSWNASSPGAASGGGDNRXLVGPAPSAGARAVLVPVLYLLVCAAGLGGNXLVIYVVLRFAKMKXVXNIYILNLAVADVLYMLGLPFLAXQNAASFWPFGPVLCRLVMXLDGVNQFXSVFCLXVMSVDRYLAVVHPLSSARWRRPRVAKLASAAAWVLSLCMSLPLLVFADVQEGGXCNASWPEPVGLWGAVFIIYXAVLGFFAPLLVICLCYLLIVVKVRAAGVRVGCVRRRSERKVXRMVLVVVLVFAGCWLPFFXVNIVNLAVALPQEPASAGLYFFVVILSYANSCANPVLYGFLSDNFRQSFQKVLCLRKGSGAKDADAXEPRPDRIRQQQEAXPPAHRAAANGLMQXSKL

SEQ ID NO: 26460 - protein, 504 aa, Homo sapiens
  MOD_RES (6)..(6): Selenocysteine
  MOD_RES (8)..(8): Selenocysteine
  MOD_RES (14)..(14): Selenocysteine
  MOD_RES (19)..(19): Selenocysteine
  MOD_RES (22)..(22): Selenocysteine
  MOD_RES (54)..(54): Selenocysteine
  MOD_RES (70)..(71): Selenocysteine
  MOD_RES (86)..(86): Selenocysteine
  MOD_RES (118)..(118): Selenocysteine
  MOD_RES (143)..(143): Selenocysteine
  MOD_RES (188)..(188): Selenocysteine
  MOD_RES (240)..(240): Selenocysteine
  MOD_RES (243)..(243): Selenocysteine
  MOD_RES (303)..(303): Selenocysteine
  MOD_RES (305)..(305): Selenocysteine
  MOD_RES (329)..(329): Selenocysteine
  MOD_RES (335)..(335): Selenocysteine
  MOD_RES (379)..(379): Selenocysteine
  MOD_RES (395)..(395): Selenocysteine
  MOD_RES (406)..(406): Selenocysteine
  MOD_RES (412)..(413): Selenocysteine
  MOD_RES (450)..(450): Selenocysteine
  MOD_RES (481)..(481): Selenocysteine
MGDWMXVXDPESKXISQYXSEXKMSPSSLYSQQVLCSSIPLSKNVHSFFSAFCXEDNIEQSISYLDQELXXFGFPSLYEESKGKEXKRELNIVAVLNCMNELLVLQRKNLLAQENVEXQNLKLGSDMDHLQSCYSKLKEQLEXSRREMIGLQERDRQLQCKNRNLHQLLKNEKDEVQKLQNIIASRAXQYNHDMKRKEREYNKLKERLHQLVMNKKDKKIAMDILNYVGRADGKRGSWRXGKXEARNEDEMYKILLNDYEYRQKQILMENAELKKVLQQMKKEMISLLSPQKKKPRERVDDSXGXVISDVEEDAGELSRESMWDLSCEXVREQLXNSIRKQWRILKSHVEKLDNQVSKVHLEGFNDEDVISRQDHEQEXEKLELEIQQCKEMIKXQQQLLQQQLAXAYDDDXXSLLRDCYLLEEKERLKEEWSLFKEQKKNFERERRSFXEAAIRLGLEIGFLLLSVLHKKSLLGIHHSSXVSRCGVRRQCNQDYICCLKKKGI

SEQ ID NO: 26461 - protein, 180 aa, Homo sapiens
  MOD_RES (6)..(6): Selenocysteine
  MOD_RES (8)..(8): Selenocysteine
  MOD_RES (18)..(18): Selenocysteine
  MOD_RES (23)..(23): Selenocysteine
  MOD_RES (26)..(26): Selenocysteine
  MOD_RES (58)..(58): Selenocysteine
  MOD_RES (74)..(75): Selenocysteine
  MOD_RES (90)..(90): Selenocysteine
  MOD_RES (122)..(122): Selenocysteine
  MOD_RES (147)..(147): Selenocysteine
MGDWMXVXDPGLSSESKXISQYXSEXKMSPSSLYSQQVLCSSIPLSKNVHSFFSAFCXEDNIEQSISYLDQELXXFGFPSLYEESKGKEXKRELNIVAVLNCMNELLVLQRKNLLAQENVEXQNLKLGSDMDHLQSCYSKLKEQLEXSRREMIGLQERDRQLQCKNRNLHQLLKNEKDEV

SEQ ID NO: 26462 - protein, 560 aa, Homo sapiens
  MOD_RES (6)..(6): Selenocysteine
  MOD_RES (8)..(8): Selenocysteine
  MOD_RES (18)..(18): Selenocysteine
  MOD_RES (23)..(23): Selenocysteine
  MOD_RES (26)..(26): Selenocysteine
  MOD_RES (58)..(58): Selenocysteine
  MOD_RES (74)..(75): Selenocysteine
  MOD_RES (90)..(90): Selenocysteine
  MOD_RES (122)..(122): Selenocysteine
  MOD_RES (147)..(147): Selenocysteine
  MOD_RES (192)..(192): Selenocysteine
  MOD_RES (244)..(244): Selenocysteine
  MOD_RES (247)..(247): Selenocysteine
  MOD_RES (307)..(307): Selenocysteine
  MOD_RES (309)..(309): Selenocysteine
  MOD_RES (333)..(333): Selenocysteine
  MOD_RES (339)..(339): Selenocysteine
  MOD_RES (383)..(383): Selenocysteine
  MOD_RES (399)..(399): Selenocysteine
  MOD_RES (410)..(410): Selenocysteine
  MOD_RES (416)..(417): Selenocysteine
  MOD_RES (454)..(454): Selenocysteine
  MOD_RES (483)..(484): Selenocysteine
  MOD_RES (534)..(534): Selenocysteine
  MOD_RES (543)..(543): Selenocysteine
  MOD_RES (549)..(549): Selenocysteine
MGDWMXVXDPGLSSESKXISQYXSEXKMSPSSLYSQQVLCSSIPLSKNVHSFFSAFCXEDNIEQSISYLDQELXXFGFPSLYEESKGKEXKRELNIVAVLNCMNELLVLQRKNLLAQENVEXQNLKLGSDMDHLQSCYSKLKEQLEXSRREMIGLQERDRQLQCKNRNLHQLLKNEKDEVQKLQNIIASRAXQYNHDMKRKEREYNKLKERLHQLVMNKKDKKIAMDILNYVGRADGKRGSWRXGKXEARNEDEMYKILLNDYEYRQKQILMENAELKKVLQQMKKEMISLLSPQKKKPRERVDDSXGXVISDVEEDAGELSRESMWDLSCEXVREQLXNSIRKQWRILKSHVEKLDNQVSKVHLEGFNDEDVISRQDHEQEXEKLELEIQQCKEMIKXQQQLLQQQLAXAYDDDXXSLLRDCYLLEEKERLKEEWSLFKEQKKNFERERRSFXEAAIRLGLERKAFEEERASWLKQQFLNMXXFDHQNSENVKLFSAFSGSSDWDNLIVHSRQPQKKPHSVSNGSPVCMSKLXKSLPASPSXSDFCQXRSCISEHRAKN

SEQ ID NO: 26463 - protein, 614 aa, Homo sapiens
  MOD_RES (6)..(6): Selenocysteine
  MOD_RES (8)..(8): Selenocysteine
  MOD_RES (18)..(18): Selenocysteine
  MOD_RES (23)..(23): Selenocysteine
  MOD_RES (26)..(26): Selenocysteine
  MOD_RES (58)..(58): Selenocysteine
  MOD_RES (74)..(75): Selenocysteine
  MOD_RES (90)..(90): Selenocysteine
  MOD_RES (122)..(122): Selenocysteine
  MOD_RES (147)..(147): Selenocysteine
  MOD_RES (192)..(192): Selenocysteine
  MOD_RES (244)..(244): Selenocysteine
  MOD_RES (247)..(247): Selenocysteine
  MOD_RES (307)..(307): Selenocysteine
  MOD_RES (309)..(309): Selenocysteine
  MOD_RES (333)..(333): Selenocysteine
  MOD_RES (339)..(339): Selenocysteine
  MOD_RES (383)..(383): Selenocysteine
  MOD_RES (399)..(399): Selenocysteine
  MOD_RES (410)..(410): Selenocysteine
  MOD_RES (416)..(417): Selenocysteine
  MOD_RES (454)..(454): Selenocysteine
  MOD_RES (483)..(484): Selenocysteine
  MOD_RES (534)..(534): Selenocysteine
  MOD_RES (543)..(543): Selenocysteine
  MOD_RES (549)..(549): Selenocysteine
  MOD_RES (565)..(565): Selenocysteine
  MOD_RES (579)..(579): Selenocysteine
  MOD_RES (604)..(604): Selenocysteine
MGDWMXVXDPGLSSESKXISQYXSEXKMSPSSLYSQQVLCSSIPLSKNVHSFFSAFCXEDNIEQSISYLDQELXXFGFPSLYEESKGKEXKRELNIVAVLNCMNELLVLQRKNLLAQENVEXQNLKLGSDMDHLQSCYSKLKEQLEXSRREMIGLQERDRQLQCKNRNLHQLLKNEKDEVQKLQNIIASRAXQYNHDMKRKEREYNKLKERLHQLVMNKKDKKIAMDILNYVGRADGKRGSWRXGKXEARNEDEMYKILLNDYEYRQKQILMENAELKKVLQQMKKEMISLLSPQKKKPRERVDDSXGXVISDVEEDAGELSRESMWDLSCEXVREQLXNSIRKQWRILKSHVEKLDNQVSKVHLEGFNDEDVISRQDHEQEXEKLELEIQQCKEMIKXQQQLLQQQLAXAYDDDXXSLLRDCYLLEEKERLKEEWSLFKEQKKNFERERRSFXEAAIRLGLERKAFEEERASWLKQQFLNMXXFDHQNSENVKLFSAFSGSSDWDNLIVHSRQPQKKPHSVSNGSPVCMSKLXKSLPASPSXSDFCQXRSCISEHSSINVLNIXAEEIKPNQVGGECXNQKWSVASRPGSQEGCYSGCSLSYXNSHVEKDDLP

SEQ ID NO: 26464 - protein, 587 aa, Homo sapiens
  MOD_RES (31)..(31): Selenocysteine
  MOD_RES (47)..(48): Selenocysteine
  MOD_RES (63)..(63): Selenocysteine
  MOD_RES (95)..(95): Selenocysteine
  MOD_RES (120)..(120): Selenocysteine
  MOD_RES (165)..(165): Selenocysteine
  MOD_RES (217)..(217): Selenocysteine
  MOD_RES (220)..(220): Selenocysteine
  MOD_RES (280)..(280): Selenocysteine
  MOD_RES (282)..(282): Selenocysteine
  MOD_RES (306)..(306): Selenocysteine
  MOD_RES (312)..(312): Selenocysteine
  MOD_RES (356)..(356): Selenocysteine
  MOD_RES (372)..(372): Selenocysteine
  MOD_RES (383)..(383): Selenocysteine
  MOD_RES (389)..(390): Selenocysteine
  MOD_RES (427)..(427): Selenocysteine
  MOD_RES (456)..(457): Selenocysteine
  MOD_RES (507)..(507): Selenocysteine
  MOD_RES (516)..(516): Selenocysteine
  MOD_RES (522)..(522): Selenocysteine
  MOD_RES (538)..(538): Selenocysteine
  MOD_RES (552)..(552): Selenocysteine
  MOD_RES (577)..(577): Selenocysteine
MSPSSLYSQQVLCSSIPLSKNVHSFFSAFCXEDNIEQSISYLDQELXXFGFPSLYEESKGKEXKRELNIVAVLNCMNELLVLQRKNLLAQENVEXQNLKLGSDMDHLQSCYSKLKEQLEXSRREMIGLQERDRQLQCKNRNLHQLLKNEKDEVQKLQNIIASRAXQYNHDMKRKEREYNKLKERLHQLVMNKKDKKIAMDILNYVGRADGKRGSWRXGKXEARNEDEMYKILLNDYEYRQKQILMENAELKKVLQQMKKEMISLLSPQKKKPRERVDDSXGXVISDVEEDAGELSRESMWDLSCEXVREQLXNSIRKQWRILKSHVEKLDNQVSKVHLEGFNDEDVISRQDHEQEXEKLELEIQQCKEMIKXQQQLLQQQLAXAYDDDXXSLLRDCYLLEEKERLKEEWSLFKEQKKNFERERRSFXEAAIRLGLERKAFEEERASWLKQQFLNMXXFDHQNSENVKLFSAFSGSSDWDNLIVHSRQPQKKPHSVSNGSPVCMSKLXKSLPASPSXSDFCQXRSCISEHSSINVLNIXAEEIKPNQVGGECXNQKWSVASRPGSQEGCYSGCSLSYXNSHVEKDDLP

SEQ ID NO: 26465 - protein, 87 aa, Homo sapiens
  MOD_RES (2)..(3): Selenocysteine
  MOD_RES (53)..(53): Selenocysteine
  MOD_RES (62)..(62): Selenocysteine
  MOD_RES (68)..(68): Selenocysteine
  MOD_RES (85)..(85): Selenocysteine
MXXFDHQNSENVKLFSAFSGSSDWDNLIVHSRQPQKKPHSVSNGSPVCMSKLXKSLPASPSXSDFCQXRSCISEHRYLSIGDLFXCF

SEQ ID NO: 26466 - protein, 13 aa, Homo sapiens
  MOD_RES (9)..(9): Selenocysteine
  MOD_RES (12)..(12): Selenocysteine
MDAEAEDKXLRXR

SEQ ID NO: 26467 - protein, 41 aa, Homo sapiens
  MOD_RES (9)..(9): Selenocysteine
  MOD_RES (12)..(12): Selenocysteine
  MOD_RES (17)..(17): Selenocysteine
  MOD_RES (40)..(40): Selenocysteine
MDAEAEDKXLRXRSKGXEVPMDSLIQELRISVPVDMRPLXW

SEQ ID NO: 26468 - protein, 364 aa, Homo sapiens
  MOD_RES (9)..(9): Selenocysteine
  MOD_RES (12)..(12): Selenocysteine
  MOD_RES (17)..(17): Selenocysteine
  MOD_RES (41)..(41): Selenocysteine
  MOD_RES (78)..(78): Selenocysteine
  MOD_RES (86)..(86): Selenocysteine
  MOD_RES (91)..(91): Selenocysteine
  MOD_RES (107)..(107): Selenocysteine
  MOD_RES (144)..(144): Selenocysteine
  MOD_RES (213)..(213): Selenocysteine
  MOD_RES (224)..(224): Selenocysteine
  MOD_RES (238)..(238): Selenocysteine
  MOD_RES (254)..(254): Selenocysteine
  MOD_RES (290)..(290): Selenocysteine
  MOD_RES (323)..(323): Selenocysteine
  MOD_RES (342)..(342): Selenocysteine
MDAEAEDKXLRXRSKGXEVPMDSLIQELSVAYDCSMAKKRXAEDQALGVPVNKRKSLLMKPRHYSPKADCQEDRSDRXEDDGPLEXHGHSXAEEIMIKPMDESLLSXAQENSSRKEDRYSCYQELMVKSLMHLGKFEKNVSVQXVSENLNDSGIQSLKAESDEADECFLIHSDDGRDKIDDSQPPFCSSDDNESNSESAENGWDSGSNFSEEXKPPRVPKYVLXDHKKDLLEVPEIKXEGDKFIPCENRCDSEXERKDPQNALAEPLDGNAQPSFPDVEEEDSESLAVMXEEGSDLEKAKGNLSLLEQAIALQAERGCVFHNXYKELDRFLLEHLAGERRQXKVIDMGGRQIFNNKHYPPIKLC

SEQ ID NO: 26469 - protein, 620 aa, Homo sapiens
  MOD_RES (9)..(9): Selenocysteine
  MOD_RES (12)..(12): Selenocysteine
  MOD_RES (17)..(17): Selenocysteine
  MOD_RES (41)..(41): Selenocysteine
  MOD_RES (78)..(78): Selenocysteine
  MOD_RES (86)..(86): Selenocysteine
  MOD_RES (91)..(91): Selenocysteine
  MOD_RES (107)..(107): Selenocysteine
  MOD_RES (144)..(144): Selenocysteine
  MOD_RES (213)..(213): Selenocysteine
  MOD_RES (224)..(224): Selenocysteine
  MOD_RES (238)..(238): Selenocysteine
  MOD_RES (254)..(254): Selenocysteine
  MOD_RES (290)..(290): Selenocysteine
  MOD_RES (323)..(323): Selenocysteine
  MOD_RES (342)..(342): Selenocysteine
  MOD_RES (366)..(366): Selenocysteine
  MOD_RES (376)..(376): Selenocysteine
  MOD_RES (380)..(380): Selenocysteine
  MOD_RES (414)..(414): Selenocysteine
  MOD_RES (418)..(418): Selenocysteine
  MOD_RES (429)..(429): Selenocysteine
  MOD_RES (458)..(458): Selenocysteine
  MOD_RES (468)..(468): Selenocysteine
  MOD_RES (484)..(484): Selenocysteine
  MOD_RES (489)..(489): Selenocysteine
  MOD_RES (520)..(520): Selenocysteine
  MOD_RES (526)..(526): Selenocysteine
  MOD_RES (552)..(552): Selenocysteine
  MOD_RES (570)..(570): Selenocysteine
  MOD_RES (583)..(583): Selenocysteine
  MOD_RES (589)..(589): Selenocysteine
  MOD_RES (613)..(613): Selenocysteine
MDAEAEDKXLRXRSKGXEVPMDSLIQELSVAYDCSMAKKRXAEDQALGVPVNKRKSLLMKPRHYSPKADCQEDRSDRXEDDGPLEXHGHSXAEEIMIKPMDESLLSXAQENSSRKEDRYSCYQELMVKSLMHLGKFEKNVSVQXVSENLNDSGIQSLKAESDEADECFLIHSDDGRDKIDDSQPPFCSSDDNESNSESAENGWDSGSNFSEEXKPPRVPKYVLXDHKKDLLEVPEIKXEGDKFIPCENRCDSEXERKDPQNALAEPLDGNAQPSFPDVEEEDSESLAVMXEEGSDLEKAKGNLSLLEQAIALQAERGCVFHNXYKELDRFLLEHLAGERRQXKVIDMGGRQIFNNKHSPRPEKREXKCPIPGCDGXGHVXGLYPHHRSLSGCPHKVRVPLEILAMHENVLKCPXPGCXGRGHVNSNRNXHRSLSGCPIAAAEKLAMSQDKNQLDSPQXGQCPDQAHRXSLVKQIEFNFPSQAIXSPRAXVSKEQEKFGKVPFDYASFDAQVFGKRPLIQXVQGRKXPPFPESKHFPNPVKFPNRLPSAGAHXQSPGRASSYSYGQCSEDXHIAAAAAILNLSXRCREAXDILSNKPQSLHAKGAEIEVDENGXLDLSMKK

SEQ ID NO: 26470 - protein, 1047 aa, Homo sapiens
  MOD_RES (9)..(9): Selenocysteine
  MOD_RES (12)..(12): Selenocysteine
  MOD_RES (17)..(17): Selenocysteine
  MOD_RES (41)..(41): Selenocysteine
  MOD_RES (78)..(78): Selenocysteine
  MOD_RES (86)..(86): Selenocysteine
  MOD_RES (91)..(91): Selenocysteine
  MOD_RES (107)..(107): Selenocysteine
  MOD_RES (144)..(144): Selenocysteine
  MOD_RES (213)..(213): Selenocysteine
  MOD_RES (224)..(224): Selenocysteine
  MOD_RES (238)..(238): Selenocysteine
  MOD_RES (254)..(254): Selenocysteine
  MOD_RES (290)..(290): Selenocysteine
  MOD_RES (323)..(323): Selenocysteine
  MOD_RES (342)..(342): Selenocysteine
  MOD_RES (366)..(366): Selenocysteine
  MOD_RES (376)..(376): Selenocysteine
  MOD_RES (380)..(380): Selenocysteine
  MOD_RES (414)..(414): Selenocysteine
  MOD_RES (418)..(418): Selenocysteine
  MOD_RES (429)..(429): Selenocysteine
  MOD_RES (458)..(458): Selenocysteine
  MOD_RES (468)..(468): Selenocysteine
  MOD_RES (484)..(484): Selenocysteine
  MOD_RES (489)..(489): Selenocysteine
  MOD_RES (520)..(520): Selenocysteine
  MOD_RES (526)..(526): Selenocysteine
  MOD_RES (552)..(552): Selenocysteine
  MOD_RES (570)..(570): Selenocysteine
  MOD_RES (583)..(583): Selenocysteine
  MOD_RES (589)..(589): Selenocysteine
  MOD_RES (613)..(613): Selenocysteine
  MOD_RES (631)..(631): Selenocysteine
  MOD_RES (635)..(635): Selenocysteine
  MOD_RES (639)..(639): Selenocysteine
  MOD_RES (647)..(647): Selenocysteine
  MOD_RES (668)..(668): Selenocysteine
  MOD_RES (675)..(675): Selenocysteine
  MOD_RES (679)..(679): Selenocysteine
  MOD_RES (723)..(723): Selenocysteine
  MOD_RES (726)..(726): Selenocysteine
  MOD_RES (736)..(736): Selenocysteine
  MOD_RES (754)..(754): Selenocysteine
  MOD_RES (770)..(770): Selenocysteine
  MOD_RES (780)..(780): Selenocysteine
  MOD_RES (803)..(803): Selenocysteine
  MOD_RES (805)..(805): Selenocysteine
  MOD_RES (832)..(832): Selenocysteine
  MOD_RES (836)..(836): Selenocysteine
  MOD_RES (886)..(886): Selenocysteine
  MOD_RES (911)..(911): Selenocysteine
  MOD_RES (917)..(917): Selenocysteine
  MOD_RES (952)..(952): Selenocysteine
  MOD_RES (955)..(955): Selenocysteine
  MOD_RES (963)..(963): Selenocysteine
  MOD_RES (1015)..(1015): Selenocysteine
  MOD_RES (1017)..(1017): Selenocysteine
MDAEAEDKXLRXRSKGXEVPMDSLIQELSVAYDCSMAKKRXAEDQALGVPVNKRKSLLMKPRHYSPKADCQEDRSDRXEDDGPLEXHGHSXAEEIMIKPMDESLLSXAQENSSRKEDRYSCYQELMVKSLMHLGKFEKNVSVQXVSENLNDSGIQSLKAESDEADECFLIHSDDGRDKIDDSQPPFCSSDDNESNSESAENGWDSGSNFSEEXKPPRVPKYVLXDHKKDLLEVPEIKXEGDKFIPCENRCDSEXERKDPQNALAEPLDGNAQPSFPDVEEEDSESLAVMXEEGSDLEKAKGNLSLLEQAIALQAERGCVFHNXYKELDRFLLEHLAGERRQXKVIDMGGRQIFNNKHSPRPEKREXKCPIPGCDGXGHVXGLYPHHRSLSGCPHKVRVPLEILAMHENVLKCPXPGCXGRGHVNSNRNXHRSLSGCPIAAAEKLAMSQDKNQLDSPQXGQCPDQAHRXSLVKQIEFNFPSQAIXSPRAXVSKEQEKFGKVPFDYASFDAQVFGKRPLIQXVQGRKXPPFPESKHFPNPVKFPNRLPSAGAHXQSPGRASSYSYGQCSEDXHIAAAAAILNLSXRCREAXDILSNKPQSLHAKGAEIEVDENGXLDLSMKKNRILDKSAPLXSSNXSIPXPSSSPFKXSSILVNAAFYQALCDQEGWDXPINYSKXHGKXEEEKEKDPVSSLENLEEKKFPGEASIPSPKPKLHARDLKKELIXCPXPGCDGSGHVXGNYASHRSVSGCPLADKXLKSLMAANSQELKCPXPGCDGSGHVXGNYASHRSLSGCPRARKGGVKMXPXKEEKEDPELKCPVIGCDGQGHISGKYXSHRXASGCPLAAKRQKENPLNGASLSWKLNKQELPHCPLPGCNGLGHVNNVFVXHRSLSGCPLNAQVIKKGKVSEELMXIKLKAXGGIESDEEIRHLDEEIKELNESNLKIEADMMKLQXQIXSMESNLKXIEEENKLIEQNNESLLKELAGLSQALISSLADIQLPQMGPISEQNFEAYVNXLXDMYSNLERDYSPECKALLESIKQAVKGIHV

SEQ ID NO: 26471 - protein, 94 aa, Homo sapiens
  MOD_RES (9)..(9): Selenocysteine
  MOD_RES (12)..(12): Selenocysteine
  MOD_RES (17)..(17): Selenocysteine
  MOD_RES (41)..(41): Selenocysteine
  MOD_RES (78)..(78): Selenocysteine
  MOD_RES (86)..(86): Selenocysteine
  MOD_RES (91)..(91): Selenocysteine
MDAEAEDKXLRXRSKGXEVPMDSLIQELSVAYDCSMAKKRXAEDQALGVPVNKRKSLLMKPRHYSPKADCQEDRSDRXEDDGPLEXHGHSXRKS

SEQ ID NO: 26472 - protein, 79 aa, Homo sapiens
  MOD_RES (7)..(7): Selenocysteine
  MOD_RES (9)..(9): Selenocysteine
  MOD_RES (31)..(31): Selenocysteine
  MOD_RES (36)..(36): Selenocysteine
  MOD_RES (52)..(52): Selenocysteine
  MOD_RES (56)..(56): Selenocysteine
  MOD_RES (61)..(61): Selenocysteine
  MOD_RES (67)..(67): Selenocysteine
  MOD_RES (69)..(69): Selenocysteine
  MOD_RES (71)..(71): Selenocysteine
  MOD_RES (75)..(75): Selenocysteine
MARSRLXAXSVSQVQENGFVKKLEPKSGWMXFLEVXGKICEMLFCPEAILLXRKDXPYCEXGLIFLXLXKXIANXYFYF

SEQ ID NO: 26473 - protein, 2570 aa, Homo sapiens
  MOD_RES (36)..(37): Selenocysteine
  MOD_RES (40)..(40): Selenocysteine
  MOD_RES (45)..(45): Selenocysteine
  MOD_RES (54)..(54): Selenocysteine
  MOD_RES (68)..(68): Selenocysteine
  MOD_RES (118)..(118): Selenocysteine
  MOD_RES (125)..(125): Selenocysteine
  MOD_RES (135)..(135): Selenocysteine
  MOD_RES (188)..(188): Selenocysteine
  MOD_RES (208)..(208): Selenocysteine
  MOD_RES (224)..(224): Selenocysteine
  MOD_RES (277)..(277): Selenocysteine
  MOD_RES (288)..(288): Selenocysteine
  MOD_RES (301)..(301): Selenocysteine
  MOD_RES (331)..(331): Selenocysteine
  MOD_RES (335)..(335): Selenocysteine
  MOD_RES (340)..(340): Selenocysteine
  MOD_RES (367)..(367): Selenocysteine
  MOD_RES (369)..(369): Selenocysteine
  MOD_RES (392)..(393): Selenocysteine
  MOD_RES (398)..(398): Selenocysteine
  MOD_RES (411)..(411): Selenocysteine
  MOD_RES (435)..(435): Selenocysteine
  MOD_RES (437)..(437): Selenocysteine
  MOD_RES (440)..(440): Selenocysteine
  MOD_RES (445)..(445): Selenocysteine
  MOD_RES (452)..(452): Selenocysteine
  MOD_RES (454)..(454): Selenocysteine
  MOD_RES (459)..(459): Selenocysteine
  MOD_RES (472)..(472): Selenocysteine
  MOD_RES (491)..(491): Selenocysteine
  MOD_RES (501)..(501): Selenocysteine
  MOD_RES (508)..(508): Selenocysteine
  MOD_RES (516)..(516): Selenocysteine
  MOD_RES (524)..(524): Selenocysteine
  MOD_RES (542)..(542): Selenocysteine
  MOD_RES (564)..(564): Selenocysteine
  MOD_RES (585)..(585): Selenocysteine
  MOD_RES (597)..(597): Selenocysteine
  MOD_RES (645)..(645): Selenocysteine
  MOD_RES (674)..(674): Selenocysteine
  MOD_RES (676)..(676): Selenocysteine
  MOD_RES (698)..(698): Selenocysteine
  MOD_RES (714)..(714): Selenocysteine
  MOD_RES (730)..(730): Selenocysteine
  MOD_RES (805)..(805): Selenocysteine
  MOD_RES (825)..(825): Selenocysteine
  MOD_RES (860)..(860): Selenocysteine
  MOD_RES (886)..(886): Selenocysteine
  MOD_RES (890)..(890): Selenocysteine
  MOD_RES (918)..(918): Selenocysteine
  MOD_RES (933)..(933): Selenocysteine
  MOD_RES (963)..(963): Selenocysteine
  MOD_RES (975)..(975): Selenocysteine
  MOD_RES (1014)..(1014): Selenocysteine
  MOD_RES (1022)..(1022): Selenocysteine
  MOD_RES (1047)..(1047): Selenocysteine
  MOD_RES (1076)..(1076): Selenocysteine
  MOD_RES (1080)..(1081): Selenocysteine
  MOD_RES (1107)..(1107): Selenocysteine
  MOD_RES (1161)..(1161): Selenocysteine
  MOD_RES (1164)..(1164): Selenocysteine
  MOD_RES (1169)..(1169): Selenocysteine
  MOD_RES (1186)..(1186): Selenocysteine
  MOD_RES (1201)..(1201): Selenocysteine
  MOD_RES (1254)..(1254): Selenocysteine
  MOD_RES (1276)..(1276): Selenocysteine
  MOD_RES (1282)..(1282): Selenocysteine
  MOD_RES (1290)..(1290): Selenocysteine
  MOD_RES (1310)..(1310): Selenocysteine
  MOD_RES (1327)..(1327): Selenocysteine
  MOD_RES (1365)..(1365): Selenocysteine
  MOD_RES (1380)..(1380): Selenocysteine
  MOD_RES (1416)..(1416): Selenocysteine
  MOD_RES (1439)..(1439): Selenocysteine
  MOD_RES (1473)..(1473): Selenocysteine
  MOD_RES (1481)..(1481): Selenocysteine
  MOD_RES (1483)..(1483): Selenocysteine
  MOD_RES (1517)..(1517): Selenocysteine
  MOD_RES (1537)..(1537): Selenocysteine
  MOD_RES (1556)..(1556): Selenocysteine
  MOD_RES (1560)..(1560): Selenocysteine
  MOD_RES (1566)..(1566): Selenocysteine
  MOD_RES (1568)..(1568): Selenocysteine
  MOD_RES (1571)..(1571): Selenocysteine
  MOD_RES (1574)..(1574): Selenocysteine
  MOD_RES (1580)..(1580): Selenocysteine
  MOD_RES (1615)..(1615): Selenocysteine
  MOD_RES (1665)..(1665): Selenocysteine
  MOD_RES (1729)..(1729): Selenocysteine
  MOD_RES (1762)..(1762): Selenocysteine
  MOD_RES (1767)..(1767): Selenocysteine
  MOD_RES (1818)..(1818): Selenocysteine
  MOD_RES (1822)..(1822): Selenocysteine
  MOD_RES (1831)..(1831): Selenocysteine
  MOD_RES (1878)..(1878): Selenocysteine
  MOD_RES (1885)..(1885): Selenocysteine
  MOD_RES (1917)..(1917): Selenocysteine
  MOD_RES (1952)..(1954): Selenocysteine
  MOD_RES (2004)..(2004): Selenocysteine
  MOD_RES (2024)..(2024): Selenocysteine
  MOD_RES (2046)..(2046): Selenocysteine
  MOD_RES (2061)..(2061): Selenocysteine
  MOD_RES (2090)..(2090): Selenocysteine
  MOD_RES (2113)..(2113): Selenocysteine
  MOD_RES (2116)..(2116): Selenocysteine
  MOD_RES (2118)..(2118): Selenocysteine
  MOD_RES (2137)..(2137): Selenocysteine
  MOD_RES (2153)..(2153): Selenocysteine
  MOD_RES (2157)..(2157): Selenocysteine
  MOD_RES (2198)..(2198): Selenocysteine
  MOD_RES (2215)..(2215): Selenocysteine
  MOD_RES (2264)..(2264): Selenocysteine
  MOD_RES (2320)..(2320): Selenocysteine
  MOD_RES (2332)..(2332): Selenocysteine
  MOD_RES (2337)..(2337): Selenocysteine
  MOD_RES (2349)..(2349): Selenocysteine
  MOD_RES (2364)..(2364): Selenocysteine
  MOD_RES (2367)..(2367): Selenocysteine
  MOD_RES (2381)..(2381): Selenocysteine
  MOD_RES (2395)..(2395): Selenocysteine
  MOD_RES (2434)..(2434): Selenocysteine
  MOD_RES (2530)..(2530): Selenocysteine
  MOD_RES (2533)..(2533): Selenocysteine
  MOD_RES (2546)..(2546): Selenocysteine
  MOD_RES (2563)..(2563): Selenocysteine
  MOD_RES (2568)..(2568): Selenocysteine
MAGPRGLLPLCLLAFCLAGFSFVRGQVLFKGCDVKXXFVXHVPCXSCAAIKKQXCPSGWLRELPDQIXQDCRYEVQLGGSMVSMSGCRRKCRKQVVQKACCPGYWGSRCHECPGGAEXPCNGHGXCLDGMDRNGXCVCQENFRGSACQECQDPNRFGPDCQSVCSCVHGVCNHGPRGDGSCLCFAGYXGPHCDQELPVCQELRCPQNXQCSAEAPSCRCLPGYXQQGSECRAPNPCWPSPCSLLAQCSVSPKGQAQCHCPENYHGDGMVCLPKDPCXDNLGGCPSNSXLCVYQKPGQAFCXCRPGLVSINSNASAGCFAFCSPFSCDRSAXCQVXADGKXSCVCRESEVGDGRACYGHLLHEVQKAXQXGRVFLQLRVAVAMMDQGCREILXXAGPFXVLVPSVSSFSSRXMNASLAQQLCRQHIIAGQHILEDXRXQQXRRWWXLAGQEIXVXFNQFXKYSYKYKDQPQQXFNIYKANNIAANGVFHVVXGLRWQAPSGXPGDPKRXIGQILASXEAFSRFEXILENCGLPSILDGPGPFXVFAPSNEAVDSLRDGRLIYLFXAGLSKLQELVRYHIYNHGQLXVEKLISKGRILXMANQVLAVNISEEGRILLGPEGVPLQRVDVMAANGVIHMLDGILLPPXILPILPKHCSEEQHKIVAGSCVDCQALNXSXCPPNSVKLDIFPKECVYIHDPXGLNVLKKGCASYCNQXIMEQGCCKGFFGPDCXQCPGGFSNPCYGKGNCSDGIQGNGACLCFPDYKGIACHICSNPNKHGEQCQEDCGCVHGLCDNRPGSGGVCQQGXCAPGFSGRFCNESMGDCGPXGLAQHCHLHARCVSQEGVARCRCLDGFEGDGFSCXPSNPCSHPDRGGCSENAECVPGSLGXHHCXCHKGWSGDGRVCVAIDECELDMRGGCHXDALCSYVGPGQSRCXCKLGFAGDGYQCSPIDPCRAGNGGCHGLAXCRAVGGGQRVCXCPPGFGGDGFSCYGDIFRELEANAHFSIFYQWLKSAGIXLPADRRVXALVPSEAAVRQLSPEDRAFWLQPRXLPNLVRAHFLQGALFEEELARLGGQEVAXLNPXXRWEIRNISGRVWVQNASVDVADLLAXNGVLHILSQVLLPPRGDVPGGQGLLQQLDLVPAFSLFRELLQHHGLVPQIEAAXAYXIFVPXNRSLEAQGNSSHLDADXVRHHVVLGEALSMEXLRKGGHRNSLLGPAHWIVFYNHSGQPEVNHVPLEGPMLEAPGRSLIGLSGVLXVGSSRCLHSHAEALREKCVNCXRRFRCXQGFQLQDXPRKSCVYRSGFSFSRGCSYXCAKKIQVPDCCPGFFGXLCEPCPGGLGGVCSGHGQCQDRFLGSGECHCHEGFHGXACEVCELGRYGPNCXGVCDCAHGLCQEGLQGDGSCVCNVGWQGLRCDQKIXSPQCPRKCDPNANCVQDSAGASXCACAAGYSGNGIFCSEVDPCAHGHGGCSPHANCXKVAPGQRXCXCQDGYMGDGELCQEINSCLIHHGGCHIHAECIPXGPQQVSCSCREGYSGDGIRXCELLDPCSKNNGGCSPYAXCKSXGDGQRXCXCDXAHXVGDGLXCRARVGLELLRDKHASFFSLRLLEYKELKGDGPFXIFVPHADLMSNLSQDELARIRAHRQLVFRYHVVGCRRLRSEDLLEQGYAXALSGHPLRFSEREGSIYLNDFARVVSSDHEAVNGILHFIDRVLLPPEALHWEPDDAPIPRRNVXAAAQGFGYKIFSGLLKVAGLLPLLREASHRPFXMLWPXDAAFRALPPDRQAWLYHEDHRDKLAAILRGHMIRNVEALASDLPNLGPLRXMHGXPISFSCSRXRAGELMVGEDDARIVQRHLPFEGGLAYGIDQLLEPPGLGARCDHFEXRPLRLNXCSICGLEPPCPEGSQEQGSPEACWRFYPKFWXSPPLHSLGLRSVWVHPSLWGRPQGLGRGCHRNCVXXXWKPSCCPGHYGSECQACPGGPSSPCSDRGVCMDGMSGSGQCLCRSGFAGXACELCAPGAFGPHCQACRCXVHGRCDEGLGGSGSCFCDEGWXGPRCEVQLELQPVCXPPCAPEAVCRAGNSCECSLGYEGDGRVCXVADLCQDGHGGCSEHANCSQVGXMVXCXCLPDYEGDGWSCRARNPCXDGHRGGCSEHANCLSXGLNXRRCECHAGYVGDGLQCLEESEPPVDRCLGQPPPCHSDAMCXDLHFQEKRAGVFHLQAXSGPYGLNFSEAEAACEAQGAVLASFPQLSAAQQLGFHLCLMGWLANGSXAHPVVFPVADCGNGRVGIVSLGARKNLSERWDAYCFRVQDVACRCRNGFVGDGISXCNGKLLDVLAAXANFSXFYGMLLGYANAXQRGLDFLDFLDDELXYKXLFVPVNEGFVDNMXLSGPDLELHASNAXLLSANASQGKLLPAHSGLSLIISDAGPDNSSWAPVAPGXVVVSRIIVWDIMAFNGIIHALASPLLAPPQPQAVLAPEAPPVAAGVGAVLAAGALLGLVAGALYLRARGKPMGFGFSAFQAEDDADDDFSPWQEGXNPXLVSVPNPVFGSDXFCEPFDDSLLEEDFPDXQRILXVK

SEQ ID NO: 26474 - protein, 177 aa, Homo sapiens
  MOD_RES (1)..(1): Any amino acid
  MOD_RES (6)..(6): Selenocysteine
  MOD_RES (9)..(9): Selenocysteine
  MOD_RES (23)..(23): Selenocysteine
  MOD_RES (37)..(37): Selenocysteine
  MOD_RES (137)..(137): Selenocysteine
  MOD_RES (140)..(140): Selenocysteine
  MOD_RES (153)..(153): Selenocysteine
  MOD_RES (170)..(170): Selenocysteine
  MOD_RES (175)..(175): Selenocysteine
XDDELXYKXLFVPVNEGFVDNMXLSGPDLELHASNAXLLSANASQGKLLPAHSGLSLIISDAGPDNSSWAPVQAVLAPEAPPVAAGVGAVLAAGALLGLVAGALYLRARGKPMGFGFSAFQAEDDADDDFSPWQEGXNPXLVSVPNPVFGSDXFCEPFDDSLLEEDFPDXQRILXVK

SEQ ID NO: 26475 - protein, 51 aa, Homo sapiens
  MOD_RES (31)..(31): Selenocysteine
MIPPSSPREDGVDGLPKEAVGAEQPPSPASXSSQESKEQMLSMDCAAKPVR

SEQ ID NO: 26476 - protein, 341 aa, Homo sapiens
  MOD_RES (31)..(31): Selenocysteine
  MOD_RES (49)..(49): Selenocysteine
  MOD_RES (64)..(64): Selenocysteine
  MOD_RES (93)..(93): Selenocysteine
  MOD_RES (95)..(95): Selenocysteine
  MOD_RES (119)..(119): Selenocysteine
  MOD_RES (141)..(141): Selenocysteine
  MOD_RES (146)..(146): Selenocysteine
  MOD_RES (152)..(152): Selenocysteine
  MOD_RES (167)..(167): Selenocysteine
  MOD_RES (169)..(169): Selenocysteine
  MOD_RES (197)..(197): Selenocysteine
  MOD_RES (203)..(203): Selenocysteine
  MOD_RES (228)..(228): Selenocysteine
  MOD_RES (252)..(252): Selenocysteine
  MOD_RES (293)..(293): Selenocysteine
  MOD_RES (304)..(304): Selenocysteine
MIPPSSPREDGVDGLPKEAVGAEQPPSPASXSSQESKLQKLKRSLSFKXKSLRSKSADNFFQRXNSEDMKLQAHMVAEISPSSSPLPAPGSLXSXPARAGLHPGGKAHAFQEYIFKKPXFCDVCNHMIVACGNKVDPVYEXLRFGXSLAQRXKKGSSGSGSDSPHRXSXSDLVEVPEEANGPGGGYDLRKRSNSVFXYPENGXDDFRDPAKNINHQGSLSKDPLQMNXYVALYKFVPQENEDLEMRPGDIIXLLEDSNEDWWKGKIQDRIGFFPANFVQRLQQNEKIFRCVRXFIGCKEQGQIXLKENQICVSSEEEQDGFIRVLSGKKKGLIPLDVLENI

SEQ ID NO: 26477 - protein, 402 aa, Homo sapiens
  MOD_RES (31)..(31): Selenocysteine
  MOD_RES (49)..(49): Selenocysteine
  MOD_RES (64)..(64): Selenocysteine
  MOD_RES (93)..(93): Selenocysteine
  MOD_RES (95)..(95): Selenocysteine
  MOD_RES (119)..(119): Selenocysteine
  MOD_RES (131)..(131): Selenocysteine
  MOD_RES (151)..(151): Selenocysteine
  MOD_RES (202)..(202): Selenocysteine
  MOD_RES (207)..(207): Selenocysteine
  MOD_RES (213)..(213): Selenocysteine
  MOD_RES (228)..(228): Selenocysteine
  MOD_RES (230)..(230): Selenocysteine
  MOD_RES (258)..(258): Selenocysteine
  MOD_RES (264)..(264): Selenocysteine
  MOD_RES (289)..(289): Selenocysteine
  MOD_RES (313)..(313): Selenocysteine
  MOD_RES (354)..(354): Selenocysteine
  MOD_RES (365)..(365): Selenocysteine
MIPPSSPREDGVDGLPKEAVGAEQPPSPASXSSQESKLQKLKRSLSFKXKSLRSKSADNFFQRXNSEDMKLQAHMVAEISPSSSPLPAPGSLXSXPARAGLHPGGKAHAFQEYIFKKPXFCDVCNHMIVGXNAKHGLRCKACKMSIHHKCXDGLAPQRCMGKLPKGFRRYYSSPLLIHEQFGCIKEVMPIACGNKVDPVYEXLRFGXSLAQRXKKGSSGSGSDSPHRXSXSDLVEVPEEANGPGGGYDLRKRSNSVFXYPENGXDDFRDPAKNINHQGSLSKDPLQMNXYVALYKFVPQENEDLEMRPGDIIXLLEDSNEDWWKGKIQDRIGFFPANFVQRLQQNEKIFRCVRXFIGCKEQGQIXLKENQICVSSEEEQDGFIRVLSGKKKGLIPLDVLENI

SEQ ID NO: 26478 - protein, 252 aa, Homo sapiens
  MOD_RES (31)..(31): Selenocysteine
  MOD_RES (38)..(38): Selenocysteine
  MOD_RES (53)..(53): Selenocysteine
  MOD_RES (82)..(82): Selenocysteine
  MOD_RES (84)..(84): Selenocysteine
  MOD_RES (108)..(108): Selenocysteine
  MOD_RES (130)..(130): Selenocysteine
  MOD_RES (135)..(135): Selenocysteine
  MOD_RES (141)..(141): Selenocysteine
  MOD_RES (156)..(156): Selenocysteine
  MOD_RES (158)..(158): Selenocysteine
  MOD_RES (186)..(186): Selenocysteine
  MOD_RES (192)..(192): Selenocysteine
  MOD_RES (217)..(217): Selenocysteine
  MOD_RES (241)..(241): Selenocysteine
MIPPSSPREDGVDGLPKEAVGAEQPPSPASXSSQESKXKSLRSKSADNFFQRXNSEDMKLQAHMVAEISPSSSPLPAPGSLXSXPARAGLHPGGKAHAFQEYIFKKPXFCDVCNHMIVACGNKVDPVYEXLRFGXSLAQRXKKGSSGSGSDSPHRXSXSDLVEVPEEANGPGGGYDLRKRSNSVFXYPENGXDDFRDPAKNINHQGSLSKDPLQMNXYVALYKFVPQENEDLEMRPGDIIXLLEDSNEDWWK

SEQ ID NO: 26479 - protein, 148 aa, Homo sapiens
  MOD_RES (2)..(2): Selenocysteine
  MOD_RES (16)..(16): Selenocysteine
  MOD_RES (22)..(22): Selenocysteine
  MOD_RES (29)..(29): Selenocysteine
  MOD_RES (42)..(42): Selenocysteine
  MOD_RES (64)..(64): Selenocysteine
  MOD_RES (67)..(67): Selenocysteine
  MOD_RES (82)..(82): Selenocysteine
  MOD_RES (91)..(91): Selenocysteine
  MOD_RES (105)..(105): Selenocysteine
  MOD_RES (130)..(130): Selenocysteine
  MOD_RES (135)..(135): Selenocysteine
  MOD_RES (138)..(138): Selenocysteine
MXEMSEKENEPDDAAXHSPPGXVSALQEXKLQRFKRSLSLKXILRSKSLENFFLRSGSELKCPXEEXPNRACDVRCAKSASXSGALRRSPXSNAQARRPPPSAAXSVPLSWCMSRHQSVPQAKSPHPLGXVGRWXLSXRPCAMAPPWH

SEQ ID NO: 26480 - protein, 411 aa, Homo sapiens
  MOD_RES (2)..(2): Selenocysteine
  MOD_RES (16)..(16): Selenocysteine
  MOD_RES (22)..(22): Selenocysteine
  MOD_RES (29)..(29): Selenocysteine
  MOD_RES (42)..(42): Selenocysteine
  MOD_RES (64)..(64): Selenocysteine
  MOD_RES (69)..(69): Selenocysteine
  MOD_RES (72)..(72): Selenocysteine
  MOD_RES (82)..(82): Selenocysteine
  MOD_RES (90)..(90): Selenocysteine
  MOD_RES (165)..(165): Selenocysteine
  MOD_RES (167)..(167): Selenocysteine
  MOD_RES (188)..(188): Selenocysteine
  MOD_RES (195)..(195): Selenocysteine
  MOD_RES (207)..(207): Selenocysteine
  MOD_RES (212)..(212): Selenocysteine
  MOD_RES (225)..(225): Selenocysteine
  MOD_RES (230)..(230): Selenocysteine
  MOD_RES (240)..(240): Selenocysteine
  MOD_RES (263)..(263): Selenocysteine
  MOD_RES (286)..(286): Selenocysteine
  MOD_RES (409)..(409): Selenocysteine
MXEMSEKENEPDDAAXHSPPGXVSALQEXKLQRFKRSLSLKXILRSKSLENFFLRSGSELKCPXEVLLXPPXPLPPPSPPPXASDRGLAXPSPSPCPVPRPLAALKPVRLHSFQEHVFKRASPCELCHQLIVGNSKQGLRCKMCKVSVHLWCSEEISHQQCPGKXSXSFRRNFSSPLLVHEPPPVCAXSKESPPXGDSGKVDPVYEXLRYGXSLALMNRSSFSSXSESPXRSLSERDELXEDGEGSIRSSEEGPGDSASPVFXAPAESEGPGPEEKSPGQQLPKAXLRKDVGPMYSYVALYKFLPQENNDLALQPGDRIMLVDDSNEDWWKGKIGDRVGFFPANFVQRVRPGENVWRCCQPFSGNKEQGYMSLKENQICVGVGRSKDADGFIRVSSGKKRGLVPVDALXEI

SEQ ID NO: 26481 - protein, 104 aa, Homo sapiens
  MOD_RES (17)..(17): Selenocysteine
  MOD_RES (31)..(31): Selenocysteine
  MOD_RES (33)..(33): Selenocysteine
  MOD_RES (43)..(43): Selenocysteine
  MOD_RES (56)..(56): Selenocysteine
  MOD_RES (71)..(71): Selenocysteine
  MOD_RES (91)..(91): Selenocysteine
  MOD_RES (103)..(103): Selenocysteine
MANKERKKGQADKKNEXLKGIRRLRRRHLMXSXSSLASSSLIXLWLSIGSKPWRRXIWISRQERRSQSLMXPMKNGGGGKSGRRSDFSLQXSSFGSGLENVCXA

SEQ ID NO: 26482 - protein, 178 aa, Homo sapiens
  MOD_RES (50)..(50): Selenocysteine
  MOD_RES (89)..(89): Selenocysteine
  MOD_RES (128)..(128): Selenocysteine
  MOD_RES (141)..(141): Selenocysteine
  MOD_RES (163)..(163): Selenocysteine
  MOD_RES (172)..(172): Selenocysteine
MANKERKKGQADKKNPVAAMMEEEPESARPEEGKPQDGNPEGDKKAEKKXPDDKHKQPGFQQSHYFVALYRFKALEKDDLDFPPGEKIXVIDDSNEEWWRGKIGEKVGFFPPNFIIRVRAGERVHRVXRSFVGNREIGQIXLKKDQIVVQKGDEAGGYVKVYXGRKVGLFPXDFLEEI

SEQ ID NO: 26483 - protein, 325 aa, Homo sapiens
  MOD_RES (86)..(86): Selenocysteine
  MOD_RES (141)..(141): Selenocysteine
  MOD_RES (144)..(144): Selenocysteine
  MOD_RES (197)..(197): Selenocysteine
  MOD_RES (236)..(236): Selenocysteine
  MOD_RES (275)..(275): Selenocysteine
  MOD_RES (288)..(288): Selenocysteine
  MOD_RES (310)..(310): Selenocysteine
  MOD_RES (319)..(319): Selenocysteine
MELPPEPQANGEAVGAGGGPIYYIYEEEEEEEEEEEEPPPEPPKLVNDKPHKFKDHFFKKPKFCDVCARMIVLNNKFGLRCKNCKXNIHEHCQSYVEMQRCFGKIPPGFHRAYSSPLYSNQQYACVKDLSAANRNDPVFEXLRXGVIMANKERKKGQADKKNPVAAMMEEEPESARPEEGKPQDGNPEGDKKAEKKXPDDKHKQPGFQQSHYFVALYRFKALEKDDLDFPPGEKIXVIDDSNEEWWRGKIGEKVGFFPPNFIIRVRAGERVHRVXRSFVGNREIGQIXLKKDQIVVQKGDEAGGYVKVYXGRKVGLFPXDFLEEI

SEQ ID NO: 26484 - protein, 168 aa, Homo sapiens
  MOD_RES (2)..(2): Selenocysteine
  MOD_RES (18)..(18): Selenocysteine
  MOD_RES (35)..(35): Selenocysteine
  MOD_RES (37)..(37): Selenocysteine
  MOD_RES (125)..(125): Selenocysteine
MXEKEVLESPKPSFPAEXRQSGLQRLKQLLRKGSXGXKEMELPPEPQANGEAVGAGGGPIYYIYEEEEEEEEEEEEPPPEPPKLVNDKPHKFKDHFFKKPKFCDVCARMIVLNNKFGLRCKNCKXNIHEHCQSYVEMQRCFGKIPPGFHRAYSSPLYSNQQYACVKDL

SEQ ID NO: 26485 - protein, 364 aa, Homo sapiens
  MOD_RES (2)..(2): Selenocysteine
  MOD_RES (18)..(18): Selenocysteine
  MOD_RES (35)..(35): Selenocysteine
  MOD_RES (37)..(37): Selenocysteine
  MOD_RES (125)..(125): Selenocysteine
  MOD_RES (180)..(180): Selenocysteine
  MOD_RES (183)..(183): Selenocysteine
  MOD_RES (236)..(236): Selenocysteine
  MOD_RES (275)..(275): Selenocysteine
  MOD_RES (314)..(314): Selenocysteine
  MOD_RES (327)..(327): Selenocysteine
  MOD_RES (349)..(349): Selenocysteine
  MOD_RES (358)..(358): Selenocysteine
MXEKEVLESPKPSFPAEXRQSGLQRLKQLLRKGSXGXKEMELPPEPQANGEAVGAGGGPIYYIYEEEEEEEEEEEEPPPEPPKLVNDKPHKFKDHFFKKPKFCDVCARMIVLNNKFGLRCKNCKXNIHEHCQSYVEMQRCFGKIPPGFHRAYSSPLYSNQQYACVKDLSAANRNDPVFEXLRXGVIMANKERKKGQADKKNPVAAMMEEEPESARPEEGKPQDGNPEGDKKAEKKXPDDKHKQPGFQQSHYFVALYRFKALEKDDLDFPPGEKIXVIDDSNEEWWRGKIGEKVGFFPPNFIIRVRAGERVHRVXRSFVGNREIGQIXLKKDQIVVQKGDEAGGYVKVYXGRKVGLFPXDFLEEI

SEQ ID NO: 26486 - protein, 42 aa, Homo sapiens
  MOD_RES (6)..(6): Selenocysteine
  MOD_RES (17)..(17): Selenocysteine
  MOD_RES (22)..(22): Selenocysteine
  MOD_RES (41)..(41): Selenocysteine
MPLFAXNPFDQDVEKAXSEMNXAEDWGLILDICDKVGQSRXG

SEQ ID NO: 26487 - protein, 540 aa, Homo sapiens
  MOD_RES (6)..(6): Selenocysteine
  MOD_RES (17)..(17): Selenocysteine
  MOD_RES (22)..(22): Selenocysteine
  MOD_RES (41)..(41): Selenocysteine
  MOD_RES (67)..(67): Selenocysteine
  MOD_RES (116)..(116): Selenocysteine
  MOD_RES (141)..(141): Selenocysteine
  MOD_RES (166)..(166): Selenocysteine
  MOD_RES (192)..(193): Selenocysteine
  MOD_RES (196)..(196): Selenocysteine
  MOD_RES (201)..(201): Selenocysteine
  MOD_RES (206)..(206): Selenocysteine
  MOD_RES (230)..(230): Selenocysteine
  MOD_RES (238)..(238): Selenocysteine
  MOD_RES (252)..(252): Selenocysteine
  MOD_RES (265)..(265): Selenocysteine
  MOD_RES (269)..(269): Selenocysteine
  MOD_RES (277)..(277): Selenocysteine
  MOD_RES (281)..(281): Selenocysteine
  MOD_RES (292)..(292): Selenocysteine
  MOD_RES (317)..(317): Selenocysteine
  MOD_RES (372)..(372): Selenocysteine
  MOD_RES (456)..(456): Selenocysteine
  MOD_RES (463)..(463): Selenocysteine
  MOD_RES (472)..(472): Selenocysteine
  MOD_RES (487)..(487): Selenocysteine
  MOD_RES (492)..(492): Selenocysteine
  MOD_RES (496)..(496): Selenocysteine
  MOD_RES (514)..(514): Selenocysteine
  MOD_RES (517)..(517): Selenocysteine
MPLFAXNPFDQDVEKAXSEMNXAEDWGLILDICDKVGQSRXGPKDCLRSIMRRVNHKDPHVAMQALXLLGACVSNCGKIFHLEVCSRDFASEVSNVLNKGHPKVCEKLKALMVEWXDEFKNDPQLSLISAMIKNLKEQGVXFPAIGSQAAEQAKASPALVAKDPGXVANKKEEEDLAKAIELSLKEQRQQSXXLSXLYPSXSSLLXNHQHEGRKVRAIYDFEAAEDNELXFKAGEIIXVLDDSDPNWWKGEXHQGIGLFPSNFVXADLXAEPEMIKXEKKXVQFSDDVQVEXIEPEPEPAFIDEDKMDQLLQMLQSXDPSDDQPDLPELLHLEAMCHQMGPLIDEKLEDIDRKHSELSELNVKVMEALSLYXKLMNEDPMYSMYAKLQNQPYYMQSSGVSGSQVYAGPPPSGAYLVAGNAQMSHLQSYSLPPEQLSSLSQAVVPPSANPALPSQQXQAAYPNXMVSSVQGNXYPSQAPVYSPPPAAXAAAAXADVXLYQNAGPNMPQVPNYNLXSSXLPQPGGSQQPPQPQQPYSQKALL

SEQ ID NO: 26488 - protein, 173 aa, Homo sapiens
  MOD_RES (5)..(5): Selenocysteine
  MOD_RES (30)..(30): Selenocysteine
  MOD_RES (55)..(55): Selenocysteine
  MOD_RES (81)..(82): Selenocysteine
  MOD_RES (85)..(85): Selenocysteine
  MOD_RES (90)..(90): Selenocysteine
  MOD_RES (95)..(95): Selenocysteine
  MOD_RES (119)..(119): Selenocysteine
  MOD_RES (127)..(127): Selenocysteine
  MOD_RES (141)..(141): Selenocysteine
  MOD_RES (154)..(154): Selenocysteine
  MOD_RES (158)..(158): Selenocysteine
  MOD_RES (166)..(166): Selenocysteine
  MOD_RES (170)..(170): Selenocysteine
MVEWXDEFKNDPQLSLISAMIKNLKEQGVXFPAIGSQAAEQAKASPALVAKDPGXVANKKEEEDLAKAIELSLKEQRQQSXXLSXLYPSXSSLLXNHQHEGRKVRAIYDFEAAEDNELXFKAGEIIXVLDDSDPNWWKGEXHQGIGLFPSNFVXADLXAEPEMIKXEKKXVQF

SEQ ID NO: 26489 - protein, 525 aa, Homo sapiens
  MOD_RES (5)..(5): Selenocysteine
  MOD_RES (17)..(17): Selenocysteine
  MOD_RES (22)..(23): Selenocysteine
  MOD_RES (39)..(39): Selenocysteine
  MOD_RES (67)..(67): Selenocysteine
  MOD_RES (91)..(91): Selenocysteine
  MOD_RES (132)..(132): Selenocysteine
  MOD_RES (142)..(142): Selenocysteine
  MOD_RES (150)..(150): Selenocysteine
  MOD_RES (159)..(159): Selenocysteine
  MOD_RES (186)..(186): Selenocysteine
  MOD_RES (188)..(188): Selenocysteine
  MOD_RES (222)..(222): Selenocysteine
  MOD_RES (257)..(258): Selenocysteine
  MOD_RES (264)..(264): Selenocysteine
  MOD_RES (310)..(310): Selenocysteine
  MOD_RES (394)..(394): Selenocysteine
  MOD_RES (413)..(413): Selenocysteine
  MOD_RES (440)..(440): Selenocysteine
  MOD_RES (446)..(446): Selenocysteine
  MOD_RES (451)..(451): Selenocysteine
  MOD_RES (455)..(455): Selenocysteine
  MOD_RES (460)..(460): Selenocysteine
  MOD_RES (472)..(472): Selenocysteine
  MOD_RES (474)..(475): Selenocysteine
  MOD_RES (478)..(478): Selenocysteine
  MOD_RES (493)..(494): Selenocysteine
  MOD_RES (506)..(506): Selenocysteine
  MOD_RES (517)..(517): Selenocysteine
MPLFXANPFEQDVEKAXNEYNXXEDWSLIMDICDKVGSXPNGAKDCLKAIMKRVNHKVPHVALQALXLLGACVANCGKIFHLEVCSRDFAXEVRAVIKNKAHPKVCEKLKSLMVEWSEEFQKDPQFSLISAXIKSMKEEGIXFPPAGSQXVSAAAKNGXSSNKNKEDEDIAKAIELSLQEQKQQHXEXKSLYPSSEIQLNNKVARKVRALYDFEAVEDNELXFKHGEIIIVLDDSDANWWKGENHRGIGLFPSNFVXXNLNIEXEAAAVDKLNVIDDDVEEIKKSEPEPVYIDEDKMDRALQVLQSIDPXDSKPDSQDLLDLEDICQQMGPMIDEKLEEIDRKHSELSELNVKVLEALELYNKLVNEAPVYSVYSKLHPPAHYPPASSGVPMQXYPVQSHGGNYMGQSIHQVXVAQSYSLGPDQIGPLRSLPPNVNSSVXAQPAQXSYLSXGQDXVSNPXYMNQNSNLQSAXGXXAYXQQMGMSVDMSSYQNXXSNLPQLAGFPVXVPAHPVAQQHXNYHQQPLL

SEQ ID NO: 26490 - protein, 137 aa, Homo sapiens
  MOD_RES (68)..(68): Selenocysteine
  MOD_RES (91)..(91): Selenocysteine
  MOD_RES (115)..(115): Selenocysteine
  MOD_RES (119)..(119): Selenocysteine
MSDHGDVSLPPEDRVRALSQLGSAVEVNEDIPPRRYFRSGVEIIRMASIYSEEGNIEHAFILYNKYIXLFIEKLPKHRDYKSAVIPEKKDXVKKLKEIAFPKAEELKAELLKRYXKEYXEYNEEKKKEAEELARNMA

SEQ ID NO: 26491 - protein, 163 aa, Homo sapiens
  MOD_RES (68)..(68): Selenocysteine
  MOD_RES (91)..(91): Selenocysteine
  MOD_RES (115)..(115): Selenocysteine
  MOD_RES (119)..(119): Selenocysteine
MSDHGDVSLPPEDRVRALSQLGSAVEVNEDIPPRRYFRSGVEIIRMASIYSEEGNIEHAFILYNKYIXLFIEKLPKHRDYKSAVIPEKKDXVKKLKEIAFPKAEELKAELLKRYXKEYXEYNEEKKKEAEELARNMAIQQELEKEKQRVAQQKQQQLEQEQFH

SEQ ID NO: 26492 - protein, 209 aa, Homo sapiens
  MOD_RES (68)..(68): Selenocysteine
  MOD_RES (91)..(91): Selenocysteine
  MOD_RES (115)..(115): Selenocysteine
  MOD_RES (119)..(119): Selenocysteine
MSDHGDVSLPPEDRVRALSQLGSAVEVNEDIPPRRYFRSGVEIIRMASIYSEEGNIEHAFILYNKYIXLFIEKLPKHRDYKSAVIPEKKDXVKKLKEIAFPKAEELKAELLKRYXKEYXEYNEEKKKEAEELARNMAIQQELEKEKQRVAQQKQQQLEQEQFHAFEEMIRNQELEKERLKIVQEFGKFPQSMDCAMWWCLGGCAHSFSS

SEQ ID NO: 26493 - protein, 318 aa, Homo sapiens
  MOD_RES (68)..(68): Selenocysteine
  MOD_RES (91)..(91): Selenocysteine
  MOD_RES (115)..(115): Selenocysteine
  MOD_RES (119)..(119): Selenocysteine
  MOD_RES (210)..(210): Selenocysteine
  MOD_RES (212)..(212): Selenocysteine
  MOD_RES (223)..(224): Selenocysteine
  MOD_RES (250)..(250): Selenocysteine
  MOD_RES (275)..(275): Selenocysteine
  MOD_RES (281)..(281): Selenocysteine
  MOD_RES (295)..(295): Selenocysteine
  MOD_RES (297)..(297): Selenocysteine
  MOD_RES (313)..(313): Selenocysteine
MSDHGDVSLPPEDRVRALSQLGSAVEVNEDIPPRRYFRSGVEIIRMASIYSEEGNIEHAFILYNKYIXLFIEKLPKHRDYKSAVIPEKKDXVKKLKEIAFPKAEELKAELLKRYXKEYXEYNEEKKKEAEELARNMAIQQELEKEKQRVAQQKQQQLEQEQFHAFEEMIRNQELEKERLKIVQEFGKVDPGLGGPLVPDLEKPSLDVFPXLXVSSIQPSDCHXXVRPAKPPVVDRSLKPGALSNSESIPXIDGLRHVVVPGRLCPQFLQLASANXARGVEXCGILCGKLMRNEFXIXHVLIPKQSAGSDYCNXENEEE

SEQ ID NO: 26494 - protein, 424 aa, Homo sapiens
  MOD_RES (68)..(68): Selenocysteine
  MOD_RES (91)..(91): Selenocysteine
  MOD_RES (115)..(115): Selenocysteine
  MOD_RES (119)..(119): Selenocysteine
  MOD_RES (210)..(210): Selenocysteine
  MOD_RES (212)..(212): Selenocysteine
  MOD_RES (223)..(224): Selenocysteine
  MOD_RES (250)..(250): Selenocysteine
  MOD_RES (275)..(275): Selenocysteine
  MOD_RES (281)..(281): Selenocysteine
  MOD_RES (295)..(295): Selenocysteine
  MOD_RES (297)..(297): Selenocysteine
  MOD_RES (313)..(313): Selenocysteine
  MOD_RES (330)..(330): Selenocysteine
  MOD_RES (336)..(336): Selenocysteine
  MOD_RES (339)..(339): Selenocysteine
  MOD_RES (341)..(341): Selenocysteine
  MOD_RES (351)..(351): Selenocysteine
  MOD_RES (374)..(374): Selenocysteine
  MOD_RES (380)..(380): Selenocysteine
  MOD_RES (412)..(412): Selenocysteine
  MOD_RES (419)..(419): Selenocysteine
  MOD_RES (421)..(421): Selenocysteine
MSDHGDVSLPPEDRVRALSQLGSAVEVNEDIPPRRYFRSGVEIIRMASIYSEEGNIEHAFILYNKYIXLFIEKLPKHRDYKSAVIPEKKDXVKKLKEIAFPKAEELKAELLKRYXKEYXEYNEEKKKEAEELARNMAIQQELEKEKQRVAQQKQQQLEQEQFHAFEEMIRNQELEKERLKIVQEFGKVDPGLGGPLVPDLEKPSLDVFPXLXVSSIQPSDCHXXVRPAKPPVVDRSLKPGALSNSESIPXIDGLRHVVVPGRLCPQFLQLASANXARGVEXCGILCGKLMRNEFXIXHVLIPKQSAGSDYCNXENEEELFLIQDQQGLIXLGWIHXHPXQXAFLSSVDLHXHCSYQMMLPESVAIVCSPKFQEXGFFKLXDHGLEEISSCRQKGFHPHSKDPPLFCSCSHVXVVDRAVXIXDLR

SEQ ID NO: 26495 - protein, 295 aa, Homo sapiens
  MOD_RES (22)..(22): Selenocysteine
  MOD_RES (47)..(47): Selenocysteine
  MOD_RES (52)..(53): Selenocysteine
  MOD_RES (58)..(58): Selenocysteine
  MOD_RES (75)..(75): Selenocysteine
  MOD_RES (78)..(78): Selenocysteine
  MOD_RES (83)..(83): Selenocysteine
  MOD_RES (91)..(91): Selenocysteine
  MOD_RES (103)..(103): Selenocysteine
  MOD_RES (106)..(106): Selenocysteine
  MOD_RES (118)..(118): Selenocysteine
  MOD_RES (120)..(120): Selenocysteine
  MOD_RES (152)..(152): Selenocysteine
  MOD_RES (156)..(156): Selenocysteine
  MOD_RES (165)..(165): Selenocysteine
  MOD_RES (181)..(181): Selenocysteine
  MOD_RES (188)..(188): Selenocysteine
  MOD_RES (214)..(214): Selenocysteine
  MOD_RES (237)..(237): Selenocysteine
  MOD_RES (245)..(245): Selenocysteine
  MOD_RES (260)..(260): Selenocysteine
  MOD_RES (271)..(271): Selenocysteine
  MOD_RES (275)..(275): Selenocysteine
MMAKKPPKPAPRRIFQERLKIXALPLYFEGFLLIKRSGYREYEHYWXELRGXXLFFYXDKKSIIYVDKLDIVDLXCLXEQNSXEKNCAKFXLVLPKEEVQLKXENXESGEEWRGFILXVXELSVPQNVSLLPGQVIKLHEVLEREKKRRIEXEQSXSVEKEKEPXEDYVDVLNPMPACFYXVSRKEAXEMLQKNPSLGNMILRPGSDSRNYSIXIRQEIDIPRIKHYKVMSVGQNYXIELEKPVXLPNLFSVIDYFVKEXRGNLRPFICSXDENXGQEPSMEGRSEKLKKNPHIA

SEQ ID NO: 26496 - protein, 150 aa, Homo sapiens
  MOD_RES (12)..(12): Selenocysteine
  MOD_RES (33)..(33): Selenocysteine
  MOD_RES (40)..(40): Selenocysteine
  MOD_RES (63)..(63): Selenocysteine
  MOD_RES (100)..(100): Selenocysteine
  MOD_RES (107)..(107): Selenocysteine
  MOD_RES (115)..(115): Selenocysteine
  MOD_RES (140)..(140): Selenocysteine
CRMECCDVPAEXLYDVLHDIEYRKKWDSNVIEXFDIARLXVNADVGYYSWRCPKPLKNRDVIXLRSWLPMGADYIIMNYSVKHPKYPPRKDLVRAVSIQXGYLIQSXGPKSCVIXYLAQVDPKGHEEDVQGVPQVPRVEXEAPASLQAVA

SEQ ID NO: 26497 - protein, 169 aa, Homo sapiens
  MOD_RES (12)..(12): Selenocysteine
  MOD_RES (33)..(33): Selenocysteine
  MOD_RES (40)..(40): Selenocysteine
  MOD_RES (63)..(63): Selenocysteine
  MOD_RES (100)..(100): Selenocysteine
  MOD_RES (107)..(107): Selenocysteine
  MOD_RES (115)..(115): Selenocysteine
CRMECCDVPAEXLYDVLHDIEYRKKWDSNVIEXFDIARLXVNADVGYYSWRCPKPLKNRDVIXLRSWLPMGADYIIMNYSVKHPKYPPRKDLVRAVSIQXGYLIQSXGPKSCVIXYLAQVDPKGSLPKWVVNKSSQFLAPKPWLHPEQSPLPSLALSELSVQHADSLEN

SEQ ID NO: 26498 - protein, 142 aa, Homo sapiens
  MOD_RES (9)..(9): Selenocysteine
  MOD_RES (16)..(16): Selenocysteine
  MOD_RES (39)..(39): Selenocysteine
  MOD_RES (76)..(76): Selenocysteine
  MOD_RES (83)..(83): Selenocysteine
  MOD_RES (91)..(91): Selenocysteine
  MOD_RES (140)..(140): Selenocysteine
KWDSNVIEXFDIARLXVNADVGYYSWRCPKPLKNRDVIXLRSWLPMGADYIIMNYSVKHPKYPPRKDLVRAVSIQXGYLIQSXGPKSCVIXYLAQVDPKGSLPKWVVNKSSQFLAPKAMKKMYKAGAAAWLDRAPINDPXAS

SEQ ID NO: 26499 - protein, 12 aa, Homo sapiens
  MOD_RES (8)..(8): Selenocysteine
MEKLAASXEPQG

SEQ ID NO: 26500 - protein, 58 aa, Homo sapiens
  MOD_RES (8)..(8): Selenocysteine
  MOD_RES (35)..(35): Selenocysteine
  MOD_RES (56)..(56): Selenocysteine
MEKLAASXEPQGPRPVLGRESVQCRMECCDVPAEXLYDVLHDIEYRKKWDSNVIEXFD

SEQ ID NO: 26501 - protein, 245 aa, Homo sapiens
  MOD_RES (8)..(8): Selenocysteine
  MOD_RES (35)..(35): Selenocysteine
  MOD_RES (56)..(56): Selenocysteine
  MOD_RES (63)..(63): Selenocysteine
  MOD_RES (86)..(86): Selenocysteine
  MOD_RES (123)..(123): Selenocysteine
  MOD_RES (130)..(130): Selenocysteine
  MOD_RES (138)..(138): Selenocysteine
  MOD_RES (242)..(242): Selenocysteine
  MOD_RES (245)..(245): Selenocysteine
MEKLAASXEPQGPRPVLGRESVQCRMECCDVPAEXLYDVLHDIEYRKKWDSNVIEXFDIARLXVNADVGYYSWRCPKPLKNRDVIXLRSWLPMGADYIIMNYSVKHPKYPPRKDLVRAVSIQXGYLIQSXGPKSCVIXYLAQVDPKGSLPKWVVNKSSQFLAPKAMKKMYKACLKYPEWKQKHLPHFKPWLHPEQSPLPSLALSELSVQHADSLENIDESAVAESREERMGGAGGEGSDDDXSLX

SEQ ID NO: 26502 - protein, 82 aa, Homo sapiens
  MOD_RES (8)..(8): Selenocysteine
  MOD_RES (52)..(52): Selenocysteine
  MOD_RES (73)..(73): Selenocysteine
  MOD_RES (80)..(80): Selenocysteine
MEKLAASXEPQGPRPVLGRESVQVPDDQDFRSFRSECEAECRMECCDVPAEXLYDVLHDIEYRKKWDSNVIEXFDIARLXVN

SEQ ID NO: 26503 - protein, 262 aa, Homo sapiens
  MOD_RES (8)..(8): Selenocysteine
  MOD_RES (52)..(52): Selenocysteine
  MOD_RES (73)..(73): Selenocysteine
  MOD_RES (80)..(80): Selenocysteine
  MOD_RES (103)..(103): Selenocysteine
  MOD_RES (140)..(140): Selenocysteine
  MOD_RES (147)..(147): Selenocysteine
  MOD_RES (155)..(155): Selenocysteine
  MOD_RES (259)..(259): Selenocysteine
  MOD_RES (262)..(262): Selenocysteine
MEKLAASXEPQGPRPVLGRESVQVPDDQDFRSFRSECEAECRMECCDVPAEXLYDVLHDIEYRKKWDSNVIEXFDIARLXVNADVGYYSWRCPKPLKNRDVIXLRSWLPMGADYIIMNYSVKHPKYPPRKDLVRAVSIQXGYLIQSXGPKSCVIXYLAQVDPKGSLPKWVVNKSSQFLAPKAMKKMYKACLKYPEWKQKHLPHFKPWLHPEQSPLPSLALSELSVQHADSLENIDESAVAESREERMGGAGGEGSDDDXSLX

SEQ ID NO: 26504 - protein, 89 aa, Homo sapiens
  MOD_RES (8)..(8): Selenocysteine
  MOD_RES (46)..(46): Selenocysteine
  MOD_RES (64)..(64): Selenocysteine
  MOD_RES (81)..(81): Selenocysteine
MEKLAASXEPQGPRPVLGRESVQVPDDQDFRSFRSECEAEVGWNLXYSRAGVSVWVQAVEMDRXLHKIKCRMECCDVPAEXLYDVLHDI

SEQ ID NO: 26505 - protein, 138 aa, Homo sapiens
  MOD_RES (8)..(8): Selenocysteine
  MOD_RES (46)..(46): Selenocysteine
  MOD_RES (64)..(64): Selenocysteine
  MOD_RES (81)..(81): Selenocysteine
  MOD_RES (102)..(102): Selenocysteine
  MOD_RES (109)..(109): Selenocysteine
  MOD_RES (132)..(132): Selenocysteine
MEKLAASXEPQGPRPVLGRESVQVPDDQDFRSFRSECEAEVGWNLXYSRAGVSVWVQAVEMDRXLHKIKCRMECCDVPAEXLYDVLHDIEYRKKWDSNVIEXFDIARLXVNADVGYYSWRCPKPLKNRDVIXLRSWLP

SEQ ID NO: 26506 - protein, 191 aa, Homo sapiens
  MOD_RES (8)..(8): Selenocysteine
  MOD_RES (46)..(46): Selenocysteine
  MOD_RES (64)..(64): Selenocysteine
  MOD_RES (81)..(81): Selenocysteine
  MOD_RES (102)..(102): Selenocysteine
  MOD_RES (109)..(109): Selenocysteine
  MOD_RES (132)..(132): Selenocysteine
  MOD_RES (169)..(169): Selenocysteine
  MOD_RES (176)..(176): Selenocysteine
  MOD_RES (184)..(184): Selenocysteine
MEKLAASXEPQGPRPVLGRESVQVPDDQDFRSFRSECEAEVGWNLXYSRAGVSVWVQAVEMDRXLHKIKCRMECCDVPAEXLYDVLHDIEYRKKWDSNVIEXFDIARLXVNADVGYYSWRCPKPLKNRDVIXLRSWLPMGADYIIMNYSVKHPKYPPRKDLVRAVSIQXGYLIQSXGPKSCVIXYLAQVDP

SEQ ID NO: 26507 - protein, 252 aa, Homo sapiens
  MOD_RES (8)..(8): Selenocysteine
  MOD_RES (46)..(46): Selenocysteine
  MOD_RES (64)..(64): Selenocysteine
  MOD_RES (81)..(81): Selenocysteine
  MOD_RES (102)..(102): Selenocysteine
  MOD_RES (109)..(109): Selenocysteine
  MOD_RES (132)..(132): Selenocysteine
  MOD_RES (169)..(169): Selenocysteine
  MOD_RES (176)..(176): Selenocysteine
  MOD_RES (184)..(184): Selenocysteine
MEKLAASXEPQGPRPVLGRESVQVPDDQDFRSFRSECEAEVGWNLXYSRAGVSVWVQAVEMDRXLHKIKCRMECCDVPAEXLYDVLHDIEYRKKWDSNVIEXFDIARLXVNADVGYYSWRCPKPLKNRDVIXLRSWLPMGADYIIMNYSVKHPKYPPRKDLVRAVSIQXGYLIQSXGPKSCVIXYLAQVDPKGSLPKWVVNKSSQFLAPKAMKKMYKACLKYPEWKQKHLPHFKPWLHPEQSPLPSLALSEL

SEQ ID NO: 26508 - protein, 291 aa, Homo sapiens
  MOD_RES (8)..(8): Selenocysteine
  MOD_RES (46)..(46): Selenocysteine
  MOD_RES (64)..(64): Selenocysteine
  MOD_RES (81)..(81): Selenocysteine
  MOD_RES (102)..(102): Selenocysteine
  MOD_RES (109)..(109): Selenocysteine
  MOD_RES (132)..(132): Selenocysteine
  MOD_RES (169)..(169): Selenocysteine
  MOD_RES (176)..(176): Selenocysteine
  MOD_RES (184)..(184): Selenocysteine
  MOD_RES (288)..(288): Selenocysteine
  MOD_RES (291)..(291): Selenocysteine
MEKLAASXEPQGPRPVLGRESVQVPDDQDFRSFRSECEAEVGWNLXYSRAGVSVWVQAVEMDRXLHKIKCRMECCDVPAEXLYDVLHDIEYRKKWDSNVIEXFDIARLXVNADVGYYSWRCPKPLKNRDVIXLRSWLPMGADYIIMNYSVKHPKYPPRKDLVRAVSIQXGYLIQSXGPKSCVIXYLAQVDPKGSLPKWVVNKSSQFLAPKAMKKMYKACLKYPEWKQKHLPHFKPWLHPEQSPLPSLALSELSVQHADSLENIDESAVAESREERMGGAGGEGSDDDXSLX

SEQ ID NO: 26509 - protein, 131 aa, Homo sapiens
  MOD_RES (8)..(8): Selenocysteine
  MOD_RES (46)..(46): Selenocysteine
  MOD_RES (64)..(64): Selenocysteine
  MOD_RES (74)..(74): Selenocysteine
  MOD_RES (97)..(97): Selenocysteine
MEKLAASXEPQGPRPVLGRESVQVPDDQDFRSFRSECEAEVGWNLXYSRAGVSVWVQAVEMDRXLHKIKPPAGXQDCGWQILKAGLQYPCLAQSQAXGQAWGLGPWERISPRGPDGAGAREDSGLRASIAA

SEQ ID NO: 26510 - protein, 121 aa, Homo sapiens
  MOD_RES (1)..(1): Any amino acid
  MOD_RES (16)..(16): Selenocysteine
  MOD_RES (23)..(23): Selenocysteine
  MOD_RES (31)..(31): Selenocysteine
  MOD_RES (120)..(120): Selenocysteine
XYPPRKDLVRAVSIQXGYLIQSXGPKSCVIXYLAQVDPKGSLPKWVVNKSSQFLAPKVSGLGILGRGVEDWKEDYGMRWVESSLEPEGQAWWLMPVIPALWEALAGGLPEVGSSRPAWPXW

SEQ ID NO: 26511 - protein, 1113 aa, Homo sapiens
  MOD_RES (8)..(8): Selenocysteine
  MOD_RES (20)..(20): Selenocysteine
  MOD_RES (33)..(34): Selenocysteine
  MOD_RES (52)..(52): Selenocysteine
  MOD_RES (112)..(112): Selenocysteine
  MOD_RES (145)..(145): Selenocysteine
  MOD_RES (149)..(149): Selenocysteine
  MOD_RES (161)..(161): Selenocysteine
  MOD_RES (175)..(175): Selenocysteine
  MOD_RES (180)..(181): Selenocysteine
  MOD_RES (188)..(188): Selenocysteine
  MOD_RES (217)..(217): Selenocysteine
  MOD_RES (252)..(252): Selenocysteine
  MOD_RES (265)..(265): Selenocysteine
  MOD_RES (281)..(281): Selenocysteine
  MOD_RES (345)..(345): Selenocysteine
  MOD_RES (373)..(373): Selenocysteine
  MOD_RES (405)..(405): Selenocysteine
  MOD_RES (418)..(418): Selenocysteine
  MOD_RES (428)..(428): Selenocysteine
  MOD_RES (471)..(471): Selenocysteine
  MOD_RES (513)..(513): Selenocysteine
  MOD_RES (516)..(516): Selenocysteine
  MOD_RES (525)..(525): Selenocysteine
  MOD_RES (533)..(533): Selenocysteine
  MOD_RES (546)..(547): Selenocysteine
  MOD_RES (556)..(556): Selenocysteine
  MOD_RES (579)..(579): Selenocysteine
  MOD_RES (609)..(609): Selenocysteine
  MOD_RES (625)..(625): Selenocysteine
  MOD_RES (640)..(640): Selenocysteine
  MOD_RES (672)..(672): Selenocysteine
  MOD_RES (748)..(748): Selenocysteine
  MOD_RES (754)..(754): Selenocysteine
  MOD_RES (788)..(788): Selenocysteine
  MOD_RES (806)..(806): Selenocysteine
  MOD_RES (839)..(839): Selenocysteine
  MOD_RES (891)..(891): Selenocysteine
  MOD_RES (897)..(897): Selenocysteine
  MOD_RES (905)..(905): Selenocysteine
  MOD_RES (908)..(908): Selenocysteine
  MOD_RES (930)..(930): Selenocysteine
  MOD_RES (934)..(934): Selenocysteine
  MOD_RES (937)..(937): Selenocysteine
  MOD_RES (989)..(989): Selenocysteine
  MOD_RES (994)..(994): Selenocysteine
  MOD_RES (1017)..(1017): Selenocysteine
  MOD_RES (1020)..(1020): Selenocysteine
  MOD_RES (1028)..(1028): Selenocysteine
  MOD_RES (1067)..(1067): Selenocysteine
  MOD_RES (1111)..(1111): Selenocysteine
MFSQVPRXPASGCYYLNSMXPEGQEMYLRFDQXXRRSPYRMSRILARHQLVXKIQQEIEAKEACDWLRAAGFPQYAQLYEDSQFPINIVAVKNDHDFLEKDLVEPLCRRLNXLNKCASMKLDVNFQRKKGDDSDEEDLCISNKWXFQRXSRRWSRVDDLYXLLPRGDRNGSPGGXGMRNXXSSESVLXDLSEPEVCSIHSESSGGSDSRSQPGQCCXDNPVMLDAPLVSSSLPQPPRDVLNHPFHPKNEKPXRARAKSFLKRMEXLRGKGAHGRHKGSGRXGGLVISGPMLQQEPESFKAMQCIQIPNGDLQNSPPPACRKGLPCSGKSSGESSPSEHSSSGVSXPCLKERKCHEANKRGGMYLEDLDVLAGXALPDAGDQSRMHEFHSQENLVVHIPKDHKPGXFPKALSIESLSPXDSSNGVNWRXGSISLGREQVPGAREPRLMASCHRASRVSIYDNVPGSHLYASXGDLLDLEKDDLFPHLDDILQHVNGLQEVVDDWSKDVLPELQXHDXLVGEPGLSXFPSPNQIXLDFEGNSVSEGRXXPSDVERDVXSLNESEPPGVRDRRDSGVGASLXRPNRRLRWNSFQLSHQPRPAPASPHISSQXASQLSLLQRFSLLRLXAIMEKHSMSNKHGWXWSVPKFMKRMKVPDYKDKAVFGVPLIVHVQRXGQPLPQSIQQALRYLRSNCLDQVGLFRKSGVKSRIHALRQMNENFPENVNYEDQSAYDVADMVKQFFRDLPEPLFXNKLSEXFLHIYQYVSKEQRLQAVQAAILLLADENREVLQXLLCFLNDVVNLVEENQMXPMNLAVCLAPSLFHLNLLKKESSPRVIQKKYAXGKPDQKDLNENLAAAQGLAHMIMECDRLFEVPHELVAQSRNSYVEAEIHVPXLEELGXQLEESGAXFHXYLNHLIQGLQKEAKEKFKGWVXCSSXDNXDLAFKKVGDGNPLKLWKASVEVEAPPSVVLNRVLRERHLWDEDFVQWKVVEXLDRQXEIYQYVLNSMAPHPSRDFVVLRXWKXDLPKGMCXLVSLSVEHEEAQLLGGVRAVVMDSQYLIEPCGSGKSRLXHICRIDLKGHSPEWYSKGFGHLCAAEVARIRNSFQPLIAEGPEXKI

SEQ ID NO: 26512 - protein, 995 aa, Homo sapiens
  MOD_RES (27)..(27): Selenocysteine
  MOD_RES (31)..(31): Selenocysteine
  MOD_RES (43)..(43): Selenocysteine
  MOD_RES (57)..(57): Selenocysteine
  MOD_RES (62)..(63): Selenocysteine
  MOD_RES (70)..(70): Selenocysteine
  MOD_RES (99)..(99): Selenocysteine
  MOD_RES (134)..(134): Selenocysteine
  MOD_RES (147)..(147): Selenocysteine
  MOD_RES (163)..(163): Selenocysteine
  MOD_RES (227)..(227): Selenocysteine
  MOD_RES (255)..(255): Selenocysteine
  MOD_RES (287)..(287): Selenocysteine
  MOD_RES (300)..(300): Selenocysteine
  MOD_RES (310)..(310): Selenocysteine
  MOD_RES (353)..(353): Selenocysteine
  MOD_RES (395)..(395): Selenocysteine
  MOD_RES (398)..(398): Selenocysteine
  MOD_RES (407)..(407): Selenocysteine
  MOD_RES (415)..(415): Selenocysteine
  MOD_RES (428)..(429): Selenocysteine
  MOD_RES (438)..(438): Selenocysteine
  MOD_RES (461)..(461): Selenocysteine
  MOD_RES (491)..(491): Selenocysteine
  MOD_RES (507)..(507): Selenocysteine
  MOD_RES (522)..(522): Selenocysteine
  MOD_RES (554)..(554): Selenocysteine
  MOD_RES (630)..(630): Selenocysteine
  MOD_RES (636)..(636): Selenocysteine
  MOD_RES (670)..(670): Selenocysteine
  MOD_RES (688)..(688): Selenocysteine
  MOD_RES (721)..(721): Selenocysteine
  MOD_RES (773)..(773): Selenocysteine
  MOD_RES (779)..(779): Selenocysteine
  MOD_RES (787)..(787): Selenocysteine
  MOD_RES (790)..(790): Selenocysteine
  MOD_RES (812)..(812): Selenocysteine
  MOD_RES (816)..(816): Selenocysteine
  MOD_RES (819)..(819): Selenocysteine
  MOD_RES (871)..(871): Selenocysteine
  MOD_RES (876)..(876): Selenocysteine
  MOD_RES (899)..(899): Selenocysteine
  MOD_RES (902)..(902): Selenocysteine
  MOD_RES (910)..(910): Selenocysteine
  MOD_RES (949)..(949): Selenocysteine
  MOD_RES (993)..(993): Selenocysteine
MKLDVNFQRKKGDDSDEEDLCISNKWXFQRXSRRWSRVDDLYXLLPRGDRNGSPGGXGMRNXXSSESVLXDLSEPEVCSIHSESSGGSDSRSQPGQCCXDNPVMLDAPLVSSSLPQPPRDVLNHPFHPKNEKPXRARAKSFLKRMEXLRGKGAHGRHKGSGRXGGLVISGPMLQQEPESFKAMQCIQIPNGDLQNSPPPACRKGLPCSGKSSGESSPSEHSSSGVSXPCLKERKCHEANKRGGMYLEDLDVLAGXALPDAGDQSRMHEFHSQENLVVHIPKDHKPGXFPKALSIESLSPXDSSNGVNWRXGSISLGREQVPGAREPRLMASCHRASRVSIYDNVPGSHLYASXGDLLDLEKDDLFPHLDDILQHVNGLQEVVDDWSKDVLPELQXHDXLVGEPGLSXFPSPNQIXLDFEGNSVSEGRXXPSDVERDVXSLNESEPPGVRDRRDSGVGASLXRPNRRLRWNSFQLSHQPRPAPASPHISSQXASQLSLLQRFSLLRLXAIMEKHSMSNKHGWXWSVPKFMKRMKVPDYKDKAVFGVPLIVHVQRXGQPLPQSIQQALRYLRSNCLDQVGLFRKSGVKSRIHALRQMNENFPENVNYEDQSAYDVADMVKQFFRDLPEPLFXNKLSEXFLHIYQYVSKEQRLQAVQAAILLLADENREVLQXLLCFLNDVVNLVEENQMXPMNLAVCLAPSLFHLNLLKKESSPRVIQKKYAXGKPDQKDLNENLAAAQGLAHMIMECDRLFEVPHELVAQSRNSYVEAEIHVPXLEELGXQLEESGAXFHXYLNHLIQGLQKEAKEKFKGWVXCSSXDNXDLAFKKVGDGNPLKLWKASVEVEAPPSVVLNRVLRERHLWDEDFVQWKVVEXLDRQXEIYQYVLNSMAPHPSRDFVVLRXWKXDLPKGMCXLVSLSVEHEEAQLLGGVRAVVMDSQYLIEPCGSGKSRLXHICRIDLKGHSPEWYSKGFGHLCAAEVARIRNSFQPLIAEGPEXKI

SEQ ID NO: 26513 - protein, 1105 aa, Homo sapiens
  MOD_RES (31)..(31): Selenocysteine
  MOD_RES (44)..(44): Selenocysteine
  MOD_RES (104)..(104): Selenocysteine
  MOD_RES (137)..(137): Selenocysteine
  MOD_RES (141)..(141): Selenocysteine
  MOD_RES (153)..(153): Selenocysteine
  MOD_RES (167)..(167): Selenocysteine
  MOD_RES (172)..(173): Selenocysteine
  MOD_RES (180)..(180): Selenocysteine
  MOD_RES (209)..(209): Selenocysteine
  MOD_RES (244)..(244): Selenocysteine
  MOD_RES (257)..(257): Selenocysteine
  MOD_RES (273)..(273): Selenocysteine
  MOD_RES (337)..(337): Selenocysteine
  MOD_RES (365)..(365): Selenocysteine
  MOD_RES (397)..(397): Selenocysteine
  MOD_RES (410)..(410): Selenocysteine
  MOD_RES (420)..(420): Selenocysteine
  MOD_RES (463)..(463): Selenocysteine
  MOD_RES (505)..(505): Selenocysteine
  MOD_RES (508)..(508): Selenocysteine
  MOD_RES (517)..(517): Selenocysteine
  MOD_RES (525)..(525): Selenocysteine
  MOD_RES (538)..(539): Selenocysteine
  MOD_RES (548)..(548): Selenocysteine
  MOD_RES (571)..(571): Selenocysteine
  MOD_RES (601)..(601): Selenocysteine
  MOD_RES (617)..(617): Selenocysteine
  MOD_RES (632)..(632): Selenocysteine
  MOD_RES (664)..(664): Selenocysteine
  MOD_RES (740)..(740): Selenocysteine
  MOD_RES (746)..(746): Selenocysteine
  MOD_RES (780)..(780): Selenocysteine
  MOD_RES (798)..(798): Selenocysteine
  MOD_RES (831)..(831): Selenocysteine
  MOD_RES (883)..(883): Selenocysteine
  MOD_RES (889)..(889): Selenocysteine
  MOD_RES (897)..(897): Selenocysteine
  MOD_RES (900)..(900): Selenocysteine
  MOD_RES (922)..(922): Selenocysteine
  MOD_RES (926)..(926): Selenocysteine
  MOD_RES (929)..(929): Selenocysteine
  MOD_RES (981)..(981): Selenocysteine
  MOD_RES (986)..(986): Selenocysteine
  MOD_RES (1009)..(1009): Selenocysteine
  MOD_RES (1012)..(1012): Selenocysteine
  MOD_RES (1020)..(1020): Selenocysteine
  MOD_RES (1059)..(1059): Selenocysteine
  MOD_RES (1103)..(1103): Selenocysteine
MLEPSSVLHANVNQAPLWCLVLRWCRECKDXVCGGKQKSRVNHXFQRREIEAKEACDWLRAAGFPQYAQLYEDSQFPINIVAVKNDHDFLEKDLVEPLCRRLNXLNKCASMKLDVNFQRKKGDDSDEEDLCISNKWXFQRXSRRWSRVDDLYXLLPRGDRNGSPGGXGMRNXXSSESVLXDLSEPEVCSIHSESSGGSDSRSQPGQCCXDNPVMLDAPLVSSSLPQPPRDVLNHPFHPKNEKPXRARAKSFLKRMEXLRGKGAHGRHKGSGRXGGLVISGPMLQQEPESFKAMQCIQIPNGDLQNSPPPACRKGLPCSGKSSGESSPSEHSSSGVSXPCLKERKCHEANKRGGMYLEDLDVLAGXALPDAGDQSRMHEFHSQENLVVHIPKDHKPGXFPKALSIESLSPXDSSNGVNWRXGSISLGREQVPGAREPRLMASCHRASRVSIYDNVPGSHLYASXGDLLDLEKDDLFPHLDDILQHVNGLQEVVDDWSKDVLPELQXHDXLVGEPGLSXFPSPNQIXLDFEGNSVSEGRXXPSDVERDVXSLNESEPPGVRDRRDSGVGASLXRPNRRLRWNSFQLSHQPRPAPASPHISSQXASQLSLLQRFSLLRLXAIMEKHSMSNKHGWXWSVPKFMKRMKVPDYKDKAVFGVPLIVHVQRXGQPLPQSIQQALRYLRSNCLDQVGLFRKSGVKSRIHALRQMNENFPENVNYEDQSAYDVADMVKQFFRDLPEPLFXNKLSEXFLHIYQYVSKEQRLQAVQAAILLLADENREVLQXLLCFLNDVVNLVEENQMXPMNLAVCLAPSLFHLNLLKKESSPRVIQKKYAXGKPDQKDLNENLAAAQGLAHMIMECDRLFEVPHELVAQSRNSYVEAEIHVPXLEELGXQLEESGAXFHXYLNHLIQGLQKEAKEKFKGWVXCSSXDNXDLAFKKVGDGNPLKLWKASVEVEAPPSVVLNRVLRERHLWDEDFVQWKVVEXLDRQXEIYQYVLNSMAPHPSRDFVVLRXWKXDLPKGMCXLVSLSVEHEEAQLLGGVRAVVMDSQYLIEPCGSGKSRLXHICRIDLKGHSPEWYSKGFGHLCAAEVARIRNSFQPLIAEGPEXKI

SEQ ID NO: 26514 - protein, 607 aa, Homo sapiens
  MOD_RES (2)..(2): Selenocysteine
  MOD_RES (10)..(10): Selenocysteine
  MOD_RES (24)..(24): Selenocysteine
  MOD_RES (97)..(97): Selenocysteine
  MOD_RES (130)..(130): Selenocysteine
  MOD_RES (134)..(134): Selenocysteine
  MOD_RES (146)..(146): Selenocysteine
  MOD_RES (160)..(160): Selenocysteine
  MOD_RES (165)..(166): Selenocysteine
  MOD_RES (173)..(173): Selenocysteine
  MOD_RES (202)..(202): Selenocysteine
  MOD_RES (237)..(237): Selenocysteine
  MOD_RES (250)..(250): Selenocysteine
  MOD_RES (266)..(266): Selenocysteine
  MOD_RES (330)..(330): Selenocysteine
  MOD_RES (358)..(358): Selenocysteine
  MOD_RES (390)..(390): Selenocysteine
  MOD_RES (403)..(403): Selenocysteine
  MOD_RES (413)..(413): Selenocysteine
  MOD_RES (456)..(456): Selenocysteine
  MOD_RES (498)..(498): Selenocysteine
  MOD_RES (501)..(501): Selenocysteine
  MOD_RES (510)..(510): Selenocysteine
  MOD_RES (518)..(518): Selenocysteine
  MOD_RES (531)..(532): Selenocysteine
  MOD_RES (541)..(541): Selenocysteine
  MOD_RES (564)..(564): Selenocysteine
  MOD_RES (594)..(594): Selenocysteine
MXSKRKPCQXQLRRSISEQLRDSXARAWDLLWKNVRERRLAEIEAKEACDWLRAAGFPQYAQLYEDSQFPINIVAVKNDHDFLEKDLVEPLCRRLNXLNKCASMKLDVNFQRKKGDDSDEEDLCISNKWXFQRXSRRWSRVDDLYXLLPRGDRNGSPGGXGMRNXXSSESVLXDLSEPEVCSIHSESSGGSDSRSQPGQCCXDNPVMLDAPLVSSSLPQPPRDVLNHPFHPKNEKPXRARAKSFLKRMEXLRGKGAHGRHKGSGRXGGLVISGPMLQQEPESFKAMQCIQIPNGDLQNSPPPACRKGLPCSGKSSGESSPSEHSSSGVSXPCLKERKCHEANKRGGMYLEDLDVLAGXALPDAGDQSRMHEFHSQENLVVHIPKDHKPGXFPKALSIESLSPXDSSNGVNWRXGSISLGREQVPGAREPRLMASCHRASRVSIYDNVPGSHLYASXGDLLDLEKDDLFPHLDDILQHVNGLQEVVDDWSKDVLPELQXHDXLVGEPGLSXFPSPNQIXLDFEGNSVSEGRXXPSDVERDVXSLNESEPPGVRDRRDSGVGASLXRPNRRLRWNSFQLSHQPRPAPASPHISSQXASQLSLLQRFSLL

SEQ ID NO: 26515 - protein, 63 aa, Homo sapiens
  MOD_RES (2)..(2): Selenocysteine
  MOD_RES (10)..(10): Selenocysteine
  MOD_RES (24)..(24): Selenocysteine
MXSKRKPCQXQLRRSISEQLRDSXARAWDLLWKNVRERRLAGLSLELGSDHHMGQKKVLEKKV

SEQ ID NO: 26516 - protein, 1103 aa, Homo sapiens
  MOD_RES (40)..(40): Selenocysteine
  MOD_RES (82)..(82): Selenocysteine
  MOD_RES (110)..(110): Selenocysteine
  MOD_RES (143)..(143): Selenocysteine
  MOD_RES (151)..(151): Selenocysteine
  MOD_RES (156)..(156): Selenocysteine
  MOD_RES (162)..(162): Selenocysteine
  MOD_RES (190)..(190): Selenocysteine
  MOD_RES (235)..(235): Selenocysteine
  MOD_RES (265)..(265): Selenocysteine
  MOD_RES (274)..(274): Selenocysteine
  MOD_RES (292)..(292): Selenocysteine
  MOD_RES (309)..(309): Selenocysteine
  MOD_RES (348)..(348): Selenocysteine
  MOD_RES (354)..(354): Selenocysteine
  MOD_RES (424)..(424): Selenocysteine
  MOD_RES (431)..(431): Selenocysteine
  MOD_RES (508)..(508): Selenocysteine
  MOD_RES (524)..(524): Selenocysteine
  MOD_RES (568)..(568): Selenocysteine
  MOD_RES (614)..(614): Selenocysteine
  MOD_RES (621)..(621): Selenocysteine
  MOD_RES (641)..(641): Selenocysteine
  MOD_RES (661)..(661): Selenocysteine
  MOD_RES (705)..(705): Selenocysteine
  MOD_RES (737)..(737): Selenocysteine
  MOD_RES (741)..(743): Selenocysteine
  MOD_RES (764)..(764): Selenocysteine
  MOD_RES (777)..(777): Selenocysteine
  MOD_RES (794)..(794): Selenocysteine
  MOD_RES (843)..(843): Selenocysteine
  MOD_RES (927)..(927): Selenocysteine
  MOD_RES (947)..(947): Selenocysteine
  MOD_RES (991)..(991): Selenocysteine
  MOD_RES (1041)..(1041): Selenocysteine
  MOD_RES (1057)..(1057): Selenocysteine
  MOD_RES (1093)..(1093): Selenocysteine
  MOD_RES (1101)..(1101): Selenocysteine
MPLLDVFWSCFRKVKCFPLLQVKKNAEAEAKRACEWLQAXGFPQYVQLFEEGSFPLDIGSVKKNHGFLDEDSLGALCRRLMXLNNCASMKLEVHFQSKQNEDSEEEEQCXISSHWAFQQESKCWSPMGSSDLLAPPSPGLPAXSSCESVLXELSAXSLPVIXVSLPPEPADLPLPGRAPSSSDRPLLSPXQGQEGPQDKAKKRHRNRSFLKHLESLRRKEKSGSQQAEPKHSPAXSEKVSKASSFRSCRGFLSAGFYRAKNWAAXSAGGSGANXRKAWEAWPVASFRHPQWXHRGDCLVHVPGDHKPGXFPRSLSIESLCPEDGHRLADWQPGRRWGCEGRRGSCGSXGSHASXYDNLPELYPAEPVMVGAEAEDEDDEESGGSYAHLDDILQHVWGLQQRVELWSRAMYPDLGPGDEEEEEAXSSVEIAXVEVKCQAEALSQMEVPAHGESPAWAQAEVQPAVLAPAQAPAEAEPVAQEEAEAPAPAPAPAPAQDSEQEAHSGGEPXFASSLSVEEGHSISDXVASSSELDSSGNSMNEAEAAGPLAGLQASMPRERRDSGVGASLXRPCRKLRWHSFQNSHRPSLNSESLEINRQFAGQINLLHKGSLLRLXAFMEKYXVPHKQGWVWSMPKFMRRNKXPDYRGQHVFGVPPLIHVQRXGQPLPQSIQQAMRYLRSQCLDQVGIFRKSGVKSRIQNLRQMNEXSPDNVCYEGQSAYDVADLLKQYFRDLPEPIFXSKLXXXFLQIYQLLPKDQWLAAAQAAXLLLPDENREVLQXLLYFLSDIASAEENQMXAGNLAVCLAPSIFHLNVSKKDSPSPRIKSKRSLIGRPGPRDLSDNMAAXQGLSHMISDCKKLFQVPQDMVLQLCSSYSAAELSPPGPALAELRQAQAAGVSLSLYMEENIQDLLRDAAERFKGWMSVPGPQHXELACRKAPDGHPLRLWKASXEVAAPPAVVLHRVLRERALWDEDLLRAQVLEALMPGVELYHYVXDSMAPHPCRDFVVLRMWRSDLPRGGCLLVSQSLDPEQPVPESGVRALMLXSQYLMEPCGLGRSRLXHICRADLRGRSPDWYNKVFGHLCAMEVAKIRDSFPXLQAAGPEXKL

SEQ ID NO: 26517 - protein, 52 aa, Homo sapiens
  MOD_RES (40)..(40): Selenocysteine
MPLLDVFWSCFRKVKCFPLLQVKKNAEAEAKRACEWLQAXGFPQYVQLFEGG

SEQ ID NO: 26518 - protein, 1023 aa, Homo sapiens
  MOD_RES (2)..(2): Selenocysteine
  MOD_RES (30)..(30): Selenocysteine
  MOD_RES (63)..(63): Selenocysteine
  MOD_RES (71)..(71): Selenocysteine
  MOD_RES (76)..(76): Selenocysteine
  MOD_RES (82)..(82): Selenocysteine
  MOD_RES (110)..(110): Selenocysteine
  MOD_RES (155)..(155): Selenocysteine
  MOD_RES (185)..(185): Selenocysteine
  MOD_RES (194)..(194): Selenocysteine
  MOD_RES (212)..(212): Selenocysteine
  MOD_RES (229)..(229): Selenocysteine
  MOD_RES (268)..(268): Selenocysteine
  MOD_RES (274)..(274): Selenocysteine
  MOD_RES (344)..(344): Selenocysteine
  MOD_RES (351)..(351): Selenocysteine
  MOD_RES (428)..(428): Selenocysteine
  MOD_RES (444)..(444): Selenocysteine
  MOD_RES (488)..(488): Selenocysteine
  MOD_RES (534)..(534): Selenocysteine
  MOD_RES (541)..(541): Selenocysteine
  MOD_RES (561)..(561): Selenocysteine
  MOD_RES (581)..(581): Selenocysteine
  MOD_RES (625)..(625): Selenocysteine
  MOD_RES (657)..(657): Selenocysteine
  MOD_RES (661)..(663): Selenocysteine
  MOD_RES (684)..(684): Selenocysteine
  MOD_RES (697)..(697): Selenocysteine
  MOD_RES (714)..(714): Selenocysteine
  MOD_RES (763)..(763): Selenocysteine
  MOD_RES (847)..(847): Selenocysteine
  MOD_RES (867)..(867): Selenocysteine
  MOD_RES (911)..(911): Selenocysteine
  MOD_RES (961)..(961): Selenocysteine
  MOD_RES (977)..(977): Selenocysteine
  MOD_RES (1013)..(1013): Selenocysteine
  MOD_RES (1021)..(1021): Selenocysteine
MXLNNCASMKLEVHFQSKQNEDSEEEEQCXISSHWAFQQESKCWSPMGSSDLLAPPSPGLPAXSSCESVLXELSAXSLPVIXVSLPPEPADLPLPGRAPSSSDRPLLSPXQGQEGPQDKAKKRHRNRSFLKHLESLRRKEKSGSQQAEPKHSPAXSEKVSKASSFRSCRGFLSAGFYRAKNWAAXSAGGSGANXRKAWEAWPVASFRHPQWXHRGDCLVHVPGDHKPGXFPRSLSIESLCPEDGHRLADWQPGRRWGCEGRRGSCGSXGSHASXYDNLPELYPAEPVMVGAEAEDEDDEESGGSYAHLDDILQHVWGLQQRVELWSRAMYPDLGPGDEEEEEAXSSVEIAXVEVKCQAEALSQMEVPAHGESPAWAQAEVQPAVLAPAQAPAEAEPVAQEEAEAPAPAPAPAPAQDSEQEAHSGGEPXFASSLSVEEGHSISDXVASSSELDSSGNSMNEAEAAGPLAGLQASMPRERRDSGVGASLXRPCRKLRWHSFQNSHRPSLNSESLEINRQFAGQINLLHKGSLLRLXAFMEKYXVPHKQGWVWSMPKFMRRNKXPDYRGQHVFGVPPLIHVQRXGQPLPQSIQQAMRYLRSQCLDQVGIFRKSGVKSRIQNLRQMNEXSPDNVCYEGQSAYDVADLLKQYFRDLPEPIFXSKLXXXFLQIYQLLPKDQWLAAAQAAXLLLPDENREVLQXLLYFLSDIASAEENQMXAGNLAVCLAPSIFHLNVSKKDSPSPRIKSKRSLIGRPGPRDLSDNMAAXQGLSHMISDCKKLFQVPQDMVLQLCSSYSAAELSPPGPALAELRQAQAAGVSLSLYMEENIQDLLRDAAERFKGWMSVPGPQHXELACRKAPDGHPLRLWKASXEVAAPPAVVLHRVLRERALWDEDLLRAQVLEALMPGVELYHYVXDSMAPHPCRDFVVLRMWRSDLPRGGCLLVSQSLDPEQPVPESGVRALMLXSQYLMEPCGLGRSRLXHICRADLRGRSPDWYNKVFGHLCAMEVAKIRDSFPXLQAAGPEXKL

SEQ ID NO: 26519 - protein, 70 aa, Homo sapiens
  MOD_RES (54)..(54): Selenocysteine
MSQWYELQQLDSKFLEQVHQLYDDSFPMEIRQYLAQWLEKQDWEHAANDVSFAXIRFHDLLSQLDDQYSR

SEQ ID NO: 26520 - protein, 150 aa, Homo sapiens
  MOD_RES (54)..(54): Selenocysteine
  MOD_RES (133)..(133): Selenocysteine
MSQWYELQQLDSKFLEQVHQLYDDSFPMEIRQYLAQWLEKQDWEHAANDVSFAXIRFHDLLSQLDDQYSRFSLENNFLLQHNIRKSKRNLQDNFQEDPIQMSMIIYSCLKEERKILENAQRFNQAQSGNIQSXVMLDKQKELDSKVRNVK

SEQ ID NO: 26521 - protein, 180 aa, Homo sapiens
  MOD_RES (54)..(54): Selenocysteine
  MOD_RES (133)..(133): Selenocysteine
  MOD_RES (176)..(176): Selenocysteine
MSQWYELQQLDSKFLEQVHQLYDDSFPMEIRQYLAQWLEKQDWEHAANDVSFAXIRFHDLLSQLDDQYSRFSLENNFLLQHNIRKSKRNLQDNFQEDPIQMSMIIYSCLKEERKILENAQRFNQAQSGNIQSXVMLDKQKELDSKVRNVKDKVMCIEHEIKSLEDLQDEYDFKCKXLQNR

SEQ ID NO: 26522 - protein, 712 aa, Homo sapiens
  MOD_RES (54)..(54): Selenocysteine
  MOD_RES (133)..(133): Selenocysteine
  MOD_RES (176)..(176): Selenocysteine
  MOD_RES (184)..(184): Selenocysteine
  MOD_RES (224)..(224): Selenocysteine
  MOD_RES (227)..(227): Selenocysteine
  MOD_RES (264)..(264): Selenocysteine
  MOD_RES (288)..(288): Selenocysteine
  MOD_RES (295)..(295): Selenocysteine
  MOD_RES (305)..(305): Selenocysteine
  MOD_RES (327)..(327): Selenocysteine
  MOD_RES (337)..(337): Selenocysteine
  MOD_RES (342)..(342): Selenocysteine
  MOD_RES (373)..(373): Selenocysteine
  MOD_RES (385)..(385): Selenocysteine
  MOD_RES (387)..(387): Selenocysteine
  MOD_RES (396)..(396): Selenocysteine
  MOD_RES (417)..(417): Selenocysteine
  MOD_RES (419)..(419): Selenocysteine
  MOD_RES (427)..(427): Selenocysteine
  MOD_RES (437)..(437): Selenocysteine
  MOD_RES (450)..(451): Selenocysteine
  MOD_RES (489)..(489): Selenocysteine
  MOD_RES (510)..(510): Selenocysteine
  MOD_RES (540)..(540): Selenocysteine
  MOD_RES (598)..(598): Selenocysteine
  MOD_RES (613)..(613): Selenocysteine
  MOD_RES (615)..(615): Selenocysteine
  MOD_RES (635)..(635): Selenocysteine
  MOD_RES (643)..(643): Selenocysteine
  MOD_RES (699)..(699): Selenocysteine
  MOD_RES (704)..(704): Selenocysteine
MSQWYELQQLDSKFLEQVHQLYDDSFPMEIRQYLAQWLEKQDWEHAANDVSFAXIRFHDLLSQLDDQYSRFSLENNFLLQHNIRKSKRNLQDNFQEDPIQMSMIIYSCLKEERKILENAQRFNQAQSGNIQSXVMLDKQKELDSKVRNVKDKVMCIEHEIKSLEDLQDEYDFKCKXLQNREHEXNGVAKSDQKQEQLLLKKMYLMLDNKRKEVVHKIIELLNVXELXQNALINDELVEWKRRQQSACIGGPPNACLDQLQNWFXIVAESLQQVRQQLKKLEELEQKYXYEHDPIXKNKQVLWDRXFSLFQQLIQSSFVVERQPCMPXHPQRPLVLKXGVQFXVKLRLLVKLQELNYNLKVKVLFDKDVNERNXVKGFRKFNILGXHXKVMNMEESXNGSLAAEFRHLQLKEQKNAGXRXNEGPLIVXEELHSLSFEXQLCQPGLVIDLEXXSLPVVVISNVSQLPSGWASILWYNMLVAEPRNLSFFLXPPCARWAQLSEVLSWQFSSVXKRGLNVDQLNMLGEKLLGPNASPDGLIPWXRFCKENINDKNFPFWLWIESILELIKKHLLPLWNDGCIMGFISKERERALLKDQQPGXFLLRFSESSREGAIXFXWVERSQNGGEPDFHAVEPYXKKELSAVXFPDIIRNYKVMAAENIPENPLKYLYPNIDKDHAFGKYYSRPKEAPEPMELDGPKGXGYIKXELISVSEV

SEQ ID NO: 26523 - protein, 750 aa, Homo sapiens
  MOD_RES (54)..(54): Selenocysteine
  MOD_RES (133)..(133): Selenocysteine
  MOD_RES (176)..(176): Selenocysteine
  MOD_RES (184)..(184): Selenocysteine
  MOD_RES (224)..(224): Selenocysteine
  MOD_RES (227)..(227): Selenocysteine
  MOD_RES (264)..(264): Selenocysteine
  MOD_RES (288)..(288): Selenocysteine
  MOD_RES (295)..(295): Selenocysteine
  MOD_RES (305)..(305): Selenocysteine
  MOD_RES (327)..(327): Selenocysteine
  MOD_RES (337)..(337): Selenocysteine
  MOD_RES (342)..(342): Selenocysteine
  MOD_RES (373)..(373): Selenocysteine
  MOD_RES (385)..(385): Selenocysteine
  MOD_RES (387)..(387): Selenocysteine
  MOD_RES (396)..(396): Selenocysteine
  MOD_RES (417)..(417): Selenocysteine
  MOD_RES (419)..(419): Selenocysteine
  MOD_RES (427)..(427): Selenocysteine
  MOD_RES (437)..(437): Selenocysteine
  MOD_RES (450)..(451): Selenocysteine
  MOD_RES (489)..(489): Selenocysteine
  MOD_RES (510)..(510): Selenocysteine
  MOD_RES (540)..(540): Selenocysteine
  MOD_RES (598)..(598): Selenocysteine
  MOD_RES (613)..(613): Selenocysteine
  MOD_RES (615)..(615): Selenocysteine
  MOD_RES (635)..(635): Selenocysteine
  MOD_RES (643)..(643): Selenocysteine
  MOD_RES (699)..(699): Selenocysteine
  MOD_RES (704)..(704): Selenocysteine
  MOD_RES (719)..(720): Selenocysteine
  MOD_RES (749)..(749): Selenocysteine
MSQWYELQQLDSKFLEQVHQLYDDSFPMEIRQYLAQWLEKQDWEHAANDVSFAXIRFHDLLSQLDDQYSRFSLENNFLLQHNIRKSKRNLQDNFQEDPIQMSMIIYSCLKEERKILENAQRFNQAQSGNIQSXVMLDKQKELDSKVRNVKDKVMCIEHEIKSLEDLQDEYDFKCKXLQNREHEXNGVAKSDQKQEQLLLKKMYLMLDNKRKEVVHKIIELLNVXELXQNALINDELVEWKRRQQSACIGGPPNACLDQLQNWFXIVAESLQQVRQQLKKLEELEQKYXYEHDPIXKNKQVLWDRXFSLFQQLIQSSFVVERQPCMPXHPQRPLVLKXGVQFXVKLRLLVKLQELNYNLKVKVLFDKDVNERNXVKGFRKFNILGXHXKVMNMEESXNGSLAAEFRHLQLKEQKNAGXRXNEGPLIVXEELHSLSFEXQLCQPGLVIDLEXXSLPVVVISNVSQLPSGWASILWYNMLVAEPRNLSFFLXPPCARWAQLSEVLSWQFSSVXKRGLNVDQLNMLGEKLLGPNASPDGLIPWXRFCKENINDKNFPFWLWIESILELIKKHLLPLWNDGCIMGFISKERERALLKDQQPGXFLLRFSESSREGAIXFXWVERSQNGGEPDFHAVEPYXKKELSAVXFPDIIRNYKVMAAENIPENPLKYLYPNIDKDHAFGKYYSRPKEAPEPMELDGPKGXGYIKXELISVSEVHPSRLQXXDNLLPMSPEEFDEVSRIVGSVEFDSMMNXV

SEQ ID NO: 26524 - protein, 193 aa, Homo sapiens
  MOD_RES (54)..(54): Selenocysteine
  MOD_RES (133)..(133): Selenocysteine
  MOD_RES (176)..(176): Selenocysteine
MSQWYELQQLDSKFLEQVHQLYDDSFPMEIRQYLAQWLEKQDWEHAANDVSFAXIRFHDLLSQLDDQYSRFSLENNFLLQHNIRKSKRNLQDNFQEDPIQMSMIIYSCLKEERKILENAQRFNQAQSGNIQSXVMLDKQKELDSKVRNVKDKVMCIEHEIKSLEDLQDEYDFKCKXLQNRGSSSQNNRVAECH

SEQ ID NO: 26525 - protein, 714 aa, Homo sapiens
  MOD_RES (56)..(56): Selenocysteine
  MOD_RES (135)..(135): Selenocysteine
  MOD_RES (178)..(178): Selenocysteine
  MOD_RES (186)..(186): Selenocysteine
  MOD_RES (226)..(226): Selenocysteine
  MOD_RES (229)..(229): Selenocysteine
  MOD_RES (266)..(266): Selenocysteine
  MOD_RES (290)..(290): Selenocysteine
  MOD_RES (297)..(297): Selenocysteine
  MOD_RES (307)..(307): Selenocysteine
  MOD_RES (329)..(329): Selenocysteine
  MOD_RES (339)..(339): Selenocysteine
  MOD_RES (344)..(344): Selenocysteine
  MOD_RES (375)..(375): Selenocysteine
  MOD_RES (387)..(387): Selenocysteine
  MOD_RES (389)..(389): Selenocysteine
  MOD_RES (398)..(398): Selenocysteine
  MOD_RES (419)..(419): Selenocysteine
  MOD_RES (421)..(421): Selenocysteine
  MOD_RES (429)..(429): Selenocysteine
  MOD_RES (439)..(439): Selenocysteine
  MOD_RES (452)..(453): Selenocysteine
  MOD_RES (491)..(491): Selenocysteine
  MOD_RES (512)..(512): Selenocysteine
  MOD_RES (542)..(542): Selenocysteine
  MOD_RES (600)..(600): Selenocysteine
  MOD_RES (615)..(615): Selenocysteine
  MOD_RES (617)..(617): Selenocysteine
  MOD_RES (637)..(637): Selenocysteine
  MOD_RES (645)..(645): Selenocysteine
  MOD_RES (701)..(701): Selenocysteine
  MOD_RES (706)..(706): Selenocysteine
MWMSQWYELQQLDSKFLEQVHQLYDDSFPMEIRQYLAQWLEKQDWEHAANDVSFAXIRFHDLLSQLDDQYSRFSLENNFLLQHNIRKSKRNLQDNFQEDPIQMSMIIYSCLKEERKILENAQRFNQAQSGNIQSXVMLDKQKELDSKVRNVKDKVMCIEHEIKSLEDLQDEYDFKCKXLQNREHEXNGVAKSDQKQEQLLLKKMYLMLDNKRKEVVHKIIELLNVXELXQNALINDELVEWKRRQQSACIGGPPNACLDQLQNWFXIVAESLQQVRQQLKKLEELEQKYXYEHDPIXKNKQVLWDRXFSLFQQLIQSSFVVERQPCMPXHPQRPLVLKXGVQFXVKLRLLVKLQELNYNLKVKVLFDKDVNERNXVKGFRKFNILGXHXKVMNMEESXNGSLAAEFRHLQLKEQKNAGXRXNEGPLIVXEELHSLSFEXQLCQPGLVIDLEXXSLPVVVISNVSQLPSGWASILWYNMLVAEPRNLSFFLXPPCARWAQLSEVLSWQFSSVXKRGLNVDQLNMLGEKLLGPNASPDGLIPWXRFCKENINDKNFPFWLWIESILELIKKHLLPLWNDGCIMGFISKERERALLKDQQPGXFLLRFSESSREGAIXFXWVERSQNGGEPDFHAVEPYXKKELSAVXFPDIIRNYKVMAAENIPENPLKYLYPNIDKDHAFGKYYSRPKEAPEPMELDGPKGXGYIKXELISVSEV

SEQ ID NO: 26526 - protein, 58 aa, Homo sapiens
  MOD_RES (1)..(1): Any amino acid
  MOD_RES (41)..(41): Selenocysteine
  MOD_RES (46)..(46): Selenocysteine
  MOD_RES (55)..(55): Selenocysteine
XPENPLKYLYPNIDKDHAFGKYYSRPKEAPEPMELDGPKGXGYIKXELISVSEVXVLG

SEQ ID NO: 26527 - protein, 40 aa, Homo sapiens
  MOD_RES (1)..(1): Any amino acid
  MOD_RES (9)..(10): Selenocysteine
  MOD_RES (39)..(39): Selenocysteine
XSHPSRLQXXDNLLPMSPEEFDEVSRIVGSVEFDSMMNXV

SEQ ID NO: 26528 - protein, 65 aa, Homo sapiens
  MOD_RES (61)..(61): Selenocysteine
MAQWEMLQNLDSPFQDQLHQLYSHSLLPVDIRQYLAVWIEDQNWKLHLGVMIPRLPCYSSXSWIS

SEQ ID NO: 26529 - protein, 460 aa, Homo sapiens
  MOD_RES (57)..(57): Selenocysteine
  MOD_RES (98)..(98): Selenocysteine
  MOD_RES (132)..(132): Selenocysteine
  MOD_RES (181)..(181): Selenocysteine
  MOD_RES (189)..(189): Selenocysteine
  MOD_RES (198)..(198): Selenocysteine
  MOD_RES (221)..(222): Selenocysteine
  MOD_RES (256)..(256): Selenocysteine
  MOD_RES (259)..(259): Selenocysteine
  MOD_RES (290)..(290): Selenocysteine
  MOD_RES (301)..(301): Selenocysteine
  MOD_RES (316)..(316): Selenocysteine
  MOD_RES (323)..(323): Selenocysteine
  MOD_RES (332)..(332): Selenocysteine
  MOD_RES (337)..(337): Selenocysteine
  MOD_RES (340)..(340): Selenocysteine
  MOD_RES (354)..(354): Selenocysteine
  MOD_RES (376)..(376): Selenocysteine
  MOD_RES (381)..(381): Selenocysteine
  MOD_RES (383)..(383): Selenocysteine
  MOD_RES (400)..(400): Selenocysteine
  MOD_RES (421)..(421): Selenocysteine
  MOD_RES (430)..(430): Selenocysteine
  MOD_RES (434)..(434): Selenocysteine
MAQWEMLQNLDSPFQDQLHQLYSHSLLPVDIRQYLAVWIEDQNWQEAALGSDDSKAXMLFFHFLDQLNYECGRCSQDPESLLLQHNLRKFCRDIQDPXQLAEMIFNLLLEEKRILIQAQRAQLEQGEPVLEXPVESQQHEIESRILDLRAMMEKLVKSISQLKDQQDVFCFRYKIQAKGKXPSLDPHQXKEQKILQEXLNELDKRRKEVLDASKALLGRLXXLIELLLPKLEEWKAQQQKACIRAPIDHGLEQLEXWFXAGAKLLFHLRQLLKELKGLSCLVSYQDDPLXKGVDLRNAQVXELLQRLLHRAFVVEXQPCMPQXPHRPLILKXGSKFXVRXRLLVRLQEGNESLXVEVSIDRNPPQLQGFRKFNILXSNQKXLXPEKGQSQGLIWDFGYLXLVEQRSGGSGKGSNKGPLGVXEELHIISFXVKYXYQGLKQELKVSENGGQGERKQLWKKA

SEQ ID NO: 26530 - protein, 847 aa, Homo sapiens
  MOD_RES (57)..(57): Selenocysteine
  MOD_RES (98)..(98): Selenocysteine
  MOD_RES (132)..(132): Selenocysteine
  MOD_RES (181)..(181): Selenocysteine
  MOD_RES (189)..(189): Selenocysteine
  MOD_RES (198)..(198): Selenocysteine
  MOD_RES (221)..(222): Selenocysteine
  MOD_RES (256)..(256): Selenocysteine
  MOD_RES (259)..(259): Selenocysteine
  MOD_RES (290)..(290): Selenocysteine
  MOD_RES (301)..(301): Selenocysteine
  MOD_RES (316)..(316): Selenocysteine
  MOD_RES (323)..(323): Selenocysteine
  MOD_RES (332)..(332): Selenocysteine
  MOD_RES (337)..(337): Selenocysteine
  MOD_RES (340)..(340): Selenocysteine
  MOD_RES (354)..(354): Selenocysteine
  MOD_RES (376)..(376): Selenocysteine
  MOD_RES (381)..(381): Selenocysteine
  MOD_RES (383)..(383): Selenocysteine
  MOD_RES (400)..(400): Selenocysteine
  MOD_RES (421)..(421): Selenocysteine
  MOD_RES (430)..(430): Selenocysteine
  MOD_RES (434)..(434): Selenocysteine
  MOD_RES (444)..(444): Selenocysteine
  MOD_RES (446)..(446): Selenocysteine
  MOD_RES (527)..(527): Selenocysteine
  MOD_RES (538)..(538): Selenocysteine
  MOD_RES (551)..(551): Selenocysteine
  MOD_RES (589)..(589): Selenocysteine
  MOD_RES (593)..(593): Selenocysteine
  MOD_RES (607)..(607): Selenocysteine
  MOD_RES (628)..(628): Selenocysteine
  MOD_RES (638)..(638): Selenocysteine
  MOD_RES (648)..(648): Selenocysteine
  MOD_RES (754)..(754): Selenocysteine
  MOD_RES (762)..(762): Selenocysteine
  MOD_RES (769)..(769): Selenocysteine
  MOD_RES (796)..(796): Selenocysteine
  MOD_RES (824)..(824): Selenocysteine
  MOD_RES (838)..(838): Selenocysteine
MAQWEMLQNLDSPFQDQLHQLYSHSLLPVDIRQYLAVWIEDQNWQEAALGSDDSKAXMLFFHFLDQLNYECGRCSQDPESLLLQHNLRKFCRDIQDPXQLAEMIFNLLLEEKRILIQAQRAQLEQGEPVLEXPVESQQHEIESRILDLRAMMEKLVKSISQLKDQQDVFCFRYKIQAKGKXPSLDPHQXKEQKILQEXLNELDKRRKEVLDASKALLGRLXXLIELLLPKLEEWKAQQQKACIRAPIDHGLEQLEXWFXAGAKLLFHLRQLLKELKGLSCLVSYQDDPLXKGVDLRNAQVXELLQRLLHRAFVVEXQPCMPQXPHRPLILKXGSKFXVRXRLLVRLQEGNESLXVEVSIDRNPPQLQGFRKFNILXSNQKXLXPEKGQSQGLIWDFGYLXLVEQRSGGSGKGSNKGPLGVXEELHIISFXVKYXYQGLKQELKXDXLPVVIISNMNQLSIAWASVLWFNLLSPNLQNQQFFSNPPKAPWSLLGPALSWQFSSYVGRGLNSDQLSMLRNKLFGQNCRXEDPLLSWADFXKRESPPGKLPFWXWLDKILELVHDHLKDLWNDGRIMGFVSRSQERRLLKKXMSGXFLLRFSESSEGGIXCSWVEHQDDDKVLIYSVQPYXKEVLQSLPLXEIIRHYQLLXEENIPENPLRFLYPRIPRDEAFGCYYQEKVNLQERRKYLKHRLIVVSNRQVDELQQPLELKPEPELESLELELGLVPEPELSLDLEPLLKAGLDLGPELESVLESXLEPVIEPXLCMVSQXVPEPDQGPVSQPVPEPDLPCDLRHLNXEPMEIFRNCVKIEEIMPNGDPLLAGQNXVDEVYVSRPSHFYXDGPLMPSDF

SEQ ID NO: 26531 - protein, 851 aa, Homo sapiens
  MOD_RES (57)..(57): Selenocysteine
  MOD_RES (102)..(102): Selenocysteine
  MOD_RES (136)..(136): Selenocysteine
  MOD_RES (185)..(185): Selenocysteine
  MOD_RES (193)..(193): Selenocysteine
  MOD_RES (202)..(202): Selenocysteine
  MOD_RES (225)..(226): Selenocysteine
  MOD_RES (260)..(260): Selenocysteine
  MOD_RES (263)..(263): Selenocysteine
  MOD_RES (294)..(294): Selenocysteine
  MOD_RES (305)..(305): Selenocysteine
  MOD_RES (320)..(320): Selenocysteine
  MOD_RES (327)..(327): Selenocysteine
  MOD_RES (336)..(336): Selenocysteine
  MOD_RES (341)..(341): Selenocysteine
  MOD_RES (344)..(344): Selenocysteine
  MOD_RES (358)..(358): Selenocysteine
  MOD_RES (380)..(380): Selenocysteine
  MOD_RES (385)..(385): Selenocysteine
  MOD_RES (387)..(387): Selenocysteine
  MOD_RES (404)..(404): Selenocysteine
  MOD_RES (425)..(425): Selenocysteine
  MOD_RES (434)..(434): Selenocysteine
  MOD_RES (438)..(438): Selenocysteine
  MOD_RES (448)..(448): Selenocysteine
  MOD_RES (450)..(450): Selenocysteine
  MOD_RES (531)..(531): Selenocysteine
  MOD_RES (542)..(542): Selenocysteine
  MOD_RES (555)..(555): Selenocysteine
  MOD_RES (593)..(593): Selenocysteine
  MOD_RES (597)..(597): Selenocysteine
  MOD_RES (611)..(611): Selenocysteine
  MOD_RES (632)..(632): Selenocysteine
  MOD_RES (642)..(642): Selenocysteine
  MOD_RES (652)..(652): Selenocysteine
  MOD_RES (758)..(758): Selenocysteine
  MOD_RES (766)..(766): Selenocysteine
  MOD_RES (773)..(773): Selenocysteine
  MOD_RES (800)..(800): Selenocysteine
  MOD_RES (828)..(828): Selenocysteine
  MOD_RES (842)..(842): Selenocysteine
MAQWEMLQNLDSPFQDQLHQLYSHSLLPVDIRQYLAVWIEDQNWQEAALGSDDSKAXMLFFHFLDQLNYECGRCSQDPESLLLQHNLRKFCRDIQPFSQDPXQLAEMIFNLLLEEKRILIQAQRAQLEQGEPVLEXPVESQQHEIESRILDLRAMMEKLVKSISQLKDQQDVFCFRYKIQAKGKXPSLDPHQXKEQKILQEXLNELDKRRKEVLDASKALLGRLXXLIELLLPKLEEWKAQQQKACIRAPIDHGLEQLEXWFXAGAKLLFHLRQLLKELKGLSCLVSYQDDPLXKGVDLRNAQVXELLQRLLHRAFVVEXQPCMPQXPHRPLILKXGSKFXVRXRLLVRLQEGNESLXVEVSIDRNPPQLQGFRKFNILXSNQKXLXPEKGQSQGLIWDFGYLXLVEQRSGGSGKGSNKGPLGVXEELHIISFXVKYXYQGLKQELKXDXLPVVIISNMNQLSIAWASVLWFNLLSPNLQNQQFFSNPPKAPWSLLGPALSWQFSSYVGRGLNSDQLSMLRNKLFGQNCRXEDPLLSWADFXKRESPPGKLPFWXWLDKILELVHDHLKDLWNDGRIMGFVSRSQERRLLKKXMSGXFLLRFSESSEGGIXCSWVEHQDDDKVLIYSVQPYXKEVLQSLPLXEIIRHYQLLXEENIPENPLRFLYPRIPRDEAFGCYYQEKVNLQERRKYLKHRLIVVSNRQVDELQQPLELKPEPELESLELELGLVPEPELSLDLEPLLKAGLDLGPELESVLESXLEPVIEPXLCMVSQXVPEPDQGPVSQPVPEPDLPCDLRHLNXEPMEIFRNCVKIEEIMPNGDPLLAGQNXVDEVYVSRPSHFYXDGPLMPSDF

SEQ ID NO: 26532 - protein, 722 aa, Homo sapiens
  MOD_RES (12)..(12): Selenocysteine
  MOD_RES (54)..(54): Selenocysteine
  MOD_RES (118)..(118): Selenocysteine
  MOD_RES (121)..(121): Selenocysteine
  MOD_RES (133)..(133): Selenocysteine
  MOD_RES (138)..(138): Selenocysteine
  MOD_RES (178)..(178): Selenocysteine
  MOD_RES (196)..(196): Selenocysteine
  MOD_RES (208)..(208): Selenocysteine
  MOD_RES (234)..(234): Selenocysteine
  MOD_RES (236)..(236): Selenocysteine
  MOD_RES (268)..(268): Selenocysteine
  MOD_RES (277)..(277): Selenocysteine
  MOD_RES (341)..(341): Selenocysteine
  MOD_RES (346)..(347): Selenocysteine
  MOD_RES (389)..(389): Selenocysteine
  MOD_RES (391)..(391): Selenocysteine
  MOD_RES (412)..(412): Selenocysteine
  MOD_RES (433)..(433): Selenocysteine
  MOD_RES (440)..(440): Selenocysteine
  MOD_RES (443)..(443): Selenocysteine
  MOD_RES (456)..(456): Selenocysteine
  MOD_RES (484)..(484): Selenocysteine
  MOD_RES (494)..(494): Selenocysteine
  MOD_RES (500)..(500): Selenocysteine
  MOD_RES (515)..(516): Selenocysteine
  MOD_RES (526)..(527): Selenocysteine
  MOD_RES (545)..(545): Selenocysteine
  MOD_RES (600)..(600): Selenocysteine
  MOD_RES (605)..(605): Selenocysteine
  MOD_RES (620)..(620): Selenocysteine
  MOD_RES (622)..(622): Selenocysteine
  MOD_RES (632)..(632): Selenocysteine
  MOD_RES (641)..(641): Selenocysteine
  MOD_RES (663)..(663): Selenocysteine
  MOD_RES (708)..(708): Selenocysteine
  MOD_RES (714)..(714): Selenocysteine
MAQWNQLQQLDXRYLEQLHQLYSDSFPMELRQFLAPWIESQDWAYAASKESHAXLVFHNLLGEIDQQYSRFLQESNVLYQHNLRRIKQFLQSRYLEKPMEIARIVARCLWEESRLLQXAAXAAQQGGQANHPXAAVVXEKQQMLEQHLQDVRKRVQDLEQKMKVVENLQDDFDFNYKXLKSQGDMQDLNGNNQSVXRQKMQQLEQMLXALDQMRRSIVSELAGLLSAMEYVQKXLXDEELADWKRRQQIACIGGPPNICLDRLENWIXSLAESQLQXRQQIKKLEELQQKVSYKGDPIVQHRPMLEERIVELFRNLMKSAFVVERQPCMPMHPDRPLVIKXGVQFXXKVRLLVKFPELNYQLKIKVCIDKDSGDVAALRGSRKFNILGXNXKVMNMEESNNGSLSAEFKHLXLREQRCGNGGRANCDASLIVXEELHLIXFEXEVYHQGLKIDLEXHSLPVVVISNICQMPNAWASILWYNMLXNNPKNVNFFXKPPIGXWDQVAEVLSWQFSSXXKRGLSIEQLXXLAEKLLGPGVNYSGCQIXWAKFCKENMAGKGFSFWVWLDNIIDLVKKYILALWNEGYIMGFISKERERAILSXKPPGXFLLRFSESSKEGGVXFXWVEKDISGKXQIQSVEPYXKQQLNNMSFAEIIMGYKIMDAXNILVSPLVYLYPDIPKEEAFGKYCRPESQEHPEADPGSAAPYLKXKFICVXPFIDAVWK

SEQ ID NO: 26533 - protein, 769 aa, Homo sapiens
  MOD_RES (12)..(12): Selenocysteine
  MOD_RES (54)..(54): Selenocysteine
  MOD_RES (118)..(118): Selenocysteine
  MOD_RES (121)..(121): Selenocysteine
  MOD_RES (133)..(133): Selenocysteine
  MOD_RES (138)..(138): Selenocysteine
  MOD_RES (178)..(178): Selenocysteine
  MOD_RES (196)..(196): Selenocysteine
  MOD_RES (208)..(208): Selenocysteine
  MOD_RES (234)..(234): Selenocysteine
  MOD_RES (236)..(236): Selenocysteine
  MOD_RES (268)..(268): Selenocysteine
  MOD_RES (277)..(277): Selenocysteine
  MOD_RES (341)..(341): Selenocysteine
  MOD_RES (346)..(347): Selenocysteine
  MOD_RES (389)..(389): Selenocysteine
  MOD_RES (391)..(391): Selenocysteine
  MOD_RES (412)..(412): Selenocysteine
  MOD_RES (433)..(433): Selenocysteine
  MOD_RES (440)..(440): Selenocysteine
  MOD_RES (443)..(443): Selenocysteine
  MOD_RES (456)..(456): Selenocysteine
  MOD_RES (484)..(484): Selenocysteine
  MOD_RES (494)..(494): Selenocysteine
  MOD_RES (500)..(500): Selenocysteine
  MOD_RES (515)..(516): Selenocysteine
  MOD_RES (526)..(527): Selenocysteine
  MOD_RES (545)..(545): Selenocysteine
  MOD_RES (600)..(600): Selenocysteine
  MOD_RES (605)..(605): Selenocysteine
  MOD_RES (620)..(620): Selenocysteine
  MOD_RES (622)..(622): Selenocysteine
  MOD_RES (632)..(632): Selenocysteine
  MOD_RES (641)..(641): Selenocysteine
  MOD_RES (663)..(663): Selenocysteine
  MOD_RES (707)..(707): Selenocysteine
  MOD_RES (713)..(713): Selenocysteine
  MOD_RES (715)..(716): Selenocysteine
  MOD_RES (720)..(720): Selenocysteine
  MOD_RES (729)..(729): Selenocysteine
  MOD_RES (755)..(755): Selenocysteine
  MOD_RES (761)..(761): Selenocysteine
  MOD_RES (766)..(766): Selenocysteine
MAQWNQLQQLDXRYLEQLHQLYSDSFPMELRQFLAPWIESQDWAYAASKESHAXLVFHNLLGEIDQQYSRFLQESNVLYQHNLRRIKQFLQSRYLEKPMEIARIVARCLWEESRLLQXAAXAAQQGGQANHPXAAVVXEKQQMLEQHLQDVRKRVQDLEQKMKVVENLQDDFDFNYKXLKSQGDMQDLNGNNQSVXRQKMQQLEQMLXALDQMRRSIVSELAGLLSAMEYVQKXLXDEELADWKRRQQIACIGGPPNICLDRLENWIXSLAESQLQXRQQIKKLEELQQKVSYKGDPIVQHRPMLEERIVELFRNLMKSAFVVERQPCMPMHPDRPLVIKXGVQFXXKVRLLVKFPELNYQLKIKVCIDKDSGDVAALRGSRKFNILGXNXKVMNMEESNNGSLSAEFKHLXLREQRCGNGGRANCDASLIVXEELHLIXFEXEVYHQGLKIDLEXHSLPVVVISNICQMPNAWASILWYNMLXNNPKNVNFFXKPPIGXWDQVAEVLSWQFSSXXKRGLSIEQLXXLAEKLLGPGVNYSGCQIXWAKFCKENMAGKGFSFWVWLDNIIDLVKKYILALWNEGYIMGFISKERERAILSXKPPGXFLLRFSESSKEGGVXFXWVEKDISGKXQIQSVEPYXKQQLNNMSFAEIIMGYKIMDAXNILVSPLVYLYPDIPKEEAFGKYCRPESQEHPEADPGAAPYLKXKFICVXPXXCSNXIDLPMSPRXLDSLMQFGNNGEGAEPSAGGQFESLXFDMELXSECAXSPM

SEQ ID NO: 26534 - protein, 770 aa, Homo sapiens
  MOD_RES (12)..(12): Selenocysteine
  MOD_RES (54)..(54): Selenocysteine
  MOD_RES (118)..(118): Selenocysteine
  MOD_RES (121)..(121): Selenocysteine
  MOD_RES (133)..(133): Selenocysteine
  MOD_RES (138)..(138): Selenocysteine
  MOD_RES (178)..(178): Selenocysteine
  MOD_RES (196)..(196): Selenocysteine
  MOD_RES (208)..(208): Selenocysteine
  MOD_RES (234)..(234): Selenocysteine
  MOD_RES (236)..(236): Selenocysteine
  MOD_RES (268)..(268): Selenocysteine
  MOD_RES (277)..(277): Selenocysteine
  MOD_RES (341)..(341): Selenocysteine
  MOD_RES (346)..(347): Selenocysteine
  MOD_RES (389)..(389): Selenocysteine
  MOD_RES (391)..(391): Selenocysteine
  MOD_RES (412)..(412): Selenocysteine
  MOD_RES (433)..(433): Selenocysteine
  MOD_RES (440)..(440): Selenocysteine
  MOD_RES (443)..(443): Selenocysteine
  MOD_RES (456)..(456): Selenocysteine
  MOD_RES (484)..(484): Selenocysteine
  MOD_RES (494)..(494): Selenocysteine
  MOD_RES (500)..(500): Selenocysteine
  MOD_RES (515)..(516): Selenocysteine
  MOD_RES (526)..(527): Selenocysteine
  MOD_RES (545)..(545): Selenocysteine
  MOD_RES (600)..(600): Selenocysteine
  MOD_RES (605)..(605): Selenocysteine
  MOD_RES (620)..(620): Selenocysteine
  MOD_RES (622)..(622): Selenocysteine
  MOD_RES (632)..(632): Selenocysteine
  MOD_RES (641)..(641): Selenocysteine
  MOD_RES (663)..(663): Selenocysteine
  MOD_RES (708)..(708): Selenocysteine
  MOD_RES (714)..(714): Selenocysteine
  MOD_RES (716)..(717): Selenocysteine
  MOD_RES (721)..(721): Selenocysteine
  MOD_RES (730)..(730): Selenocysteine
  MOD_RES (756)..(756): Selenocysteine
  MOD_RES (762)..(762): Selenocysteine
  MOD_RES (767)..(767): Selenocysteine
MAQWNQLQQLDXRYLEQLHQLYSDSFPMELRQFLAPWIESQDWAYAASKESHAXLVFHNLLGEIDQQYSRFLQESNVLYQHNLRRIKQFLQSRYLEKPMEIARIVARCLWEESRLLQXAAXAAQQGGQANHPXAAVVXEKQQMLEQHLQDVRKRVQDLEQKMKVVENLQDDFDFNYKXLKSQGDMQDLNGNNQSVXRQKMQQLEQMLXALDQMRRSIVSELAGLLSAMEYVQKXLXDEELADWKRRQQIACIGGPPNICLDRLENWIXSLAESQLQXRQQIKKLEELQQKVSYKGDPIVQHRPMLEERIVELFRNLMKSAFVVERQPCMPMHPDRPLVIKXGVQFXXKVRLLVKFPELNYQLKIKVCIDKDSGDVAALRGSRKFNILGXNXKVMNMEESNNGSLSAEFKHLXLREQRCGNGGRANCDASLIVXEELHLIXFEXEVYHQGLKIDLEXHSLPVVVISNICQMPNAWASILWYNMLXNNPKNVNFFXKPPIGXWDQVAEVLSWQFSSXXKRGLSIEQLXXLAEKLLGPGVNYSGCQIXWAKFCKENMAGKGFSFWVWLDNIIDLVKKYILALWNEGYIMGFISKERERAILSXKPPGXFLLRFSESSKEGGVXFXWVEKDISGKXQIQSVEPYXKQQLNNMSFAEIIMGYKIMDAXNILVSPLVYLYPDIPKEEAFGKYCRPESQEHPEADPGSAAPYLKXKFICVXPXXCSNXIDLPMSPRXLDSLMQFGNNGEGAEPSAGGQFESLXFDMELXSECAXSPM

SEQ ID NO: 26535 - protein, 672 aa, Homo sapiens
  MOD_RES (20)..(20): Selenocysteine
  MOD_RES (23)..(23): Selenocysteine
  MOD_RES (35)..(35): Selenocysteine
  MOD_RES (40)..(40): Selenocysteine
  MOD_RES (80)..(80): Selenocysteine
  MOD_RES (98)..(98): Selenocysteine
  MOD_RES (110)..(110): Selenocysteine
  MOD_RES (136)..(136): Selenocysteine
  MOD_RES (138)..(138): Selenocysteine
  MOD_RES (170)..(170): Selenocysteine
  MOD_RES (179)..(179): Selenocysteine
  MOD_RES (243)..(243): Selenocysteine
  MOD_RES (248)..(249): Selenocysteine
  MOD_RES (291)..(291): Selenocysteine
  MOD_RES (293)..(293): Selenocysteine
  MOD_RES (314)..(314): Selenocysteine
  MOD_RES (335)..(335): Selenocysteine
  MOD_RES (342)..(342): Selenocysteine
  MOD_RES (345)..(345): Selenocysteine
  MOD_RES (358)..(358): Selenocysteine
  MOD_RES (386)..(386): Selenocysteine
  MOD_RES (396)..(396): Selenocysteine
  MOD_RES (402)..(402): Selenocysteine
  MOD_RES (417)..(418): Selenocysteine
  MOD_RES (428)..(429): Selenocysteine
  MOD_RES (447)..(447): Selenocysteine
  MOD_RES (502)..(502): Selenocysteine
  MOD_RES (507)..(507): Selenocysteine
  MOD_RES (522)..(522): Selenocysteine
  MOD_RES (524)..(524): Selenocysteine
  MOD_RES (534)..(534): Selenocysteine
  MOD_RES (543)..(543): Selenocysteine
  MOD_RES (565)..(565): Selenocysteine
  MOD_RES (610)..(610): Selenocysteine
  MOD_RES (616)..(616): Selenocysteine
  MOD_RES (618)..(619): Selenocysteine
  MOD_RES (623)..(623): Selenocysteine
  MOD_RES (632)..(632): Selenocysteine
  MOD_RES (658)..(658): Selenocysteine
  MOD_RES (664)..(664): Selenocysteine
  MOD_RES (669)..(669): Selenocysteine
MEIARIVARCLWEESRLLQXAAXAAQQGGQANHPXAAVVXEKQQMLEQHLQDVRKRVQDLEQKMKVVENLQDDFDFNYKXLKSQGDMQDLNGNNQSVXRQKMQQLEQMLXALDQMRRSIVSELAGLLSAMEYVQKXLXDEELADWKRRQQIACIGGPPNICLDRLENWIXSLAESQLQXRQQIKKLEELQQKVSYKGDPIVQHRPMLEERIVELFRNLMKSAFVVERQPCMPMHPDRPLVIKXGVQFXXKVRLLVKFPELNYQLKIKVCIDKDSGDVAALRGSRKFNILGXNXKVMNMEESNNGSLSAEFKHLXLREQRCGNGGRANCDASLIVXEELHLIXFEXEVYHQGLKIDLEXHSLPVVVISNICQMPNAWASILWYNMLXNNPKNVNFFXKPPIGXWDQVAEVLSWQFSSXXKRGLSIEQLXXLAEKLLGPGVNYSGCQIXWAKFCKENMAGKGFSFWVWLDNIIDLVKKYILALWNEGYIMGFISKERERAILSXKPPGXFLLRFSESSKEGGVXFXWVEKDISGKXQIQSVEPYXKQQLNNMSFAEIIMGYKIMDAXNILVSPLVYLYPDIPKEEAFGKYCRPESQEHPEADPGSAAPYLKXKFICVXPXXCSNXIDLPMSPRXLDSLMQFGNNGEGAEPSAGGQFESLXFDMELXSECAXSPM

SEQ ID NO: 26536 - protein, 84 aa, Homo sapiens
  MOD_RES (14)..(14): Selenocysteine
  MOD_RES (56)..(56): Selenocysteine
MRMAQWNQLQQLDXRYLEQLHQLYSDSFPMELRQFLAPWIESQDWAYAASKESHAXLVFHNLLGEIDQQYSRFLQESNVLYQHN

SEQ ID NO: 26537 - protein, 97 aa, Homo sapiens
  MOD_RES (24)..(24): Selenocysteine
  MOD_RES (27)..(27): Selenocysteine
MEIRHLLAQWIENQDWEAASNNEXMAXILLQNLLIQLDEQLGRVSKEKNLLLIHNLKRIRKVLQGKFHGNPMHVAVVISNCLREERRILAAANMPVQ

SEQ ID NO: 26538 - protein, 25 aa, Homo sapiens
MSQWNQVQQLEIKFLEQVDQFYDDN

SEQ ID NO: 26539 - protein, 79 aa, Homo sapiens
  MOD_RES (51)..(51): Selenocysteine
  MOD_RES (54)..(54): Selenocysteine
MSQWNQVQQLEIKFLEQVDQFYDDNFPMEIRHLLAQWIENQDWEAASNNEXMAXILLQNLLIQLDEQLGRVSKEKNLLL

SEQ ID NO: 26540 - protein, 748 aa, Homo sapiens
  MOD_RES (51)..(51): Selenocysteine
  MOD_RES (54)..(54): Selenocysteine
  MOD_RES (157)..(157): Selenocysteine
  MOD_RES (161)..(161): Selenocysteine
  MOD_RES (177)..(177): Selenocysteine
  MOD_RES (180)..(180): Selenocysteine
  MOD_RES (197)..(197): Selenocysteine
  MOD_RES (217)..(217): Selenocysteine
  MOD_RES (223)..(223): Selenocysteine
  MOD_RES (229)..(229): Selenocysteine
  MOD_RES (263)..(263): Selenocysteine
  MOD_RES (284)..(284): Selenocysteine
  MOD_RES (287)..(287): Selenocysteine
  MOD_RES (298)..(298): Selenocysteine
  MOD_RES (305)..(305): Selenocysteine
  MOD_RES (326)..(326): Selenocysteine
  MOD_RES (336)..(336): Selenocysteine
  MOD_RES (341)..(341): Selenocysteine
  MOD_RES (369)..(369): Selenocysteine
  MOD_RES (380)..(380): Selenocysteine
  MOD_RES (423)..(423): Selenocysteine
  MOD_RES (430)..(430): Selenocysteine
  MOD_RES (433)..(433): Selenocysteine
  MOD_RES (441)..(441): Selenocysteine
  MOD_RES (446)..(446): Selenocysteine
  MOD_RES (474)..(474): Selenocysteine
  MOD_RES (490)..(490): Selenocysteine
  MOD_RES (523)..(523): Selenocysteine
  MOD_RES (534)..(534): Selenocysteine
  MOD_RES (549)..(549): Selenocysteine
  MOD_RES (552)..(552): Selenocysteine
  MOD_RES (594)..(594): Selenocysteine
  MOD_RES (608)..(608): Selenocysteine
  MOD_RES (610)..(610): Selenocysteine
  MOD_RES (686)..(686): Selenocysteine
  MOD_RES (703)..(703): Selenocysteine
  MOD_RES (709)..(709): Selenocysteine
  MOD_RES (735)..(736): Selenocysteine
  MOD_RES (739)..(739): Selenocysteine
MSQWNQVQQLEIKFLEQVDQFYDDNFPMEIRHLLAQWIENQDWEAASNNEXMAXILLQNLLIQLDEQLGRVSKEKNLLLIHNLKRIRKVLQGKFHGNPMHVAVVISNCLREERRILAAANMPVQGPLEKSLQSSSVSERQRNVEHKVAAIKNSVQMXEQDXKYLEDLQDEFDYRYKXIQXMDQSDKNSAMVNQEVLXLQEMLNSLDFKRKEALSKMXQIIHEXDLLMNXMLIEELQDWKRRQQIACIGGPLHNGLDQLQNCFXLLAESLFQLRRQLEKLEEQSXKMXYEGDPIPMQRXHMLERVXFLIYNLFKNSFVVERQPCMPXHPQRPLVLKXLIQFXVKLRLLIKLPELNYQVKVKASIDKNVSXLSNRRFVLCGXNVKAMSIEESSNGSLSVEFRHLQPKEMKSSAGGKGNEGCHMVXEELHSIXFEXQICLYGLXIDLEXSSLPVVMISNVSQLPNAWASIIWYNVSXNDSQNLVFFNNPPPAXLSQLLEVMSWQFSSYVGRGLNSDQLHMLAEKLXVQSSYSDGHLXWAKFCKEHLPGKSFXFWXWLEAILDLIKKHILPLWIDGYVMGFVSKEKERLLLKDKMPGXFLLRFSESHLGGIXFXWVDHSESGEVRFHSVEPYNKGRLSALPFADILRDYKVIMAENIPENPLKYLYPDIPKDKAFGKHYSSQPCEVSRPXERGDKGYVPSVFIPISXIRSDSXEPHSPSDLLPMSPSVYAVLRENLSPXXIEXAMKSPYSAE

SEQ ID NO: 26541 - protein, 117 aa, Homo sapiens
  MOD_RES (51)..(51): Selenocysteine
  MOD_RES (54)..(54): Selenocysteine
  MOD_RES (97)..(97): Selenocysteine
  MOD_RES (108)..(108): Selenocysteine
MSQWNQVQQLEIKFLEQVDQFYDDNFPMEIRHLLAQWIENQDWEAASNNEXMAXILLQNLLIQLDEQLGRVSKEKNLLLIHNLKRIRKVLQSPGLAXAQLPLDRHGEXCIQRSKSCP

SEQ ID NO: 26542 - protein, 764 aa, Homo sapiens
  MOD_RES (58)..(58): Selenocysteine
  MOD_RES (92)..(92): Selenocysteine
  MOD_RES (117)..(117): Selenocysteine
  MOD_RES (125)..(125): Selenocysteine
  MOD_RES (128)..(128): Selenocysteine
  MOD_RES (138)..(138): Selenocysteine
  MOD_RES (172)..(172): Selenocysteine
  MOD_RES (191)..(191): Selenocysteine
  MOD_RES (206)..(206): Selenocysteine
  MOD_RES (215)..(215): Selenocysteine
  MOD_RES (289)..(289): Selenocysteine
  MOD_RES (291)..(291): Selenocysteine
  MOD_RES (299)..(299): Selenocysteine
  MOD_RES (301)..(301): Selenocysteine
  MOD_RES (314)..(314): Selenocysteine
  MOD_RES (316)..(316): Selenocysteine
  MOD_RES (321)..(321): Selenocysteine
  MOD_RES (342)..(342): Selenocysteine
  MOD_RES (358)..(358): Selenocysteine
  MOD_RES (379)..(379): Selenocysteine
  MOD_RES (381)..(381): Selenocysteine
  MOD_RES (406)..(406): Selenocysteine
  MOD_RES (411)..(411): Selenocysteine
  MOD_RES (431)..(431): Selenocysteine
  MOD_RES (449)..(449): Selenocysteine
  MOD_RES (451)..(451): Selenocysteine
  MOD_RES (496)..(496): Selenocysteine
  MOD_RES (539)..(539): Selenocysteine
  MOD_RES (584)..(584): Selenocysteine
  MOD_RES (598)..(598): Selenocysteine
  MOD_RES (617)..(618): Selenocysteine
  MOD_RES (654)..(654): Selenocysteine
  MOD_RES (689)..(689): Selenocysteine
  MOD_RES (727)..(727): Selenocysteine
  MOD_RES (757)..(757): Selenocysteine
MAGWIQAQQLQGDALRQMQVLYGQHFPIEVRHYLAQWIESQPWDAIDLDNPQDRAQAXQLLEGLVQELQKKAEHQVGEDGFLLKIKLGHYAXQLQCSSPAGILVDAMSQKHLQINQXFEELRLVXQDXENELKKLQQXQEYFIIQYQESLRIQAQFAQLAQLSPQERLSREXALQQKQVSLEAWLQREAQXLQQYRVELAEKHQKXLQLLRKQQXIILDDELIQWKRRQQLAGNGGPPEGSLDVLQSWCEKLAEIIWQNRQQIRRAEHLCQQLPIPGPVEEMLAEVNAXIXDIISALVXSXFIIEKQPPQVLKXQXKFAAXVRLLVGGKLNVHMNPPQVKAXIISEQQAKSLLKNENXRNECSGEILNNCCVMEYHQAXGXLSAHFRNMSLKRIKRADRRGAESVXEEKFXVLFESQFSVGSNELVFQVKXLSLPVVVIVHGSQDHNAXAXVLWDNAFAEPGRVPFAVPDKVLWPQLCEALNMKFKAEVQSNRGLXKENLVFLAQKLFNNSSSHLEDYSGLSVSWSQFNRENLPGWNYXFWQWFDGVMEVLKKHHKPHWNDGAILGFVNKQQAHDLLINKPDGXFLLRFSDSEIGGIXIAWKFDSPERNLWNLKPFXXRDFSIRSLADRLGDLSYLIYVFPDRPKDEVFSKYYXPVLAKAVDGYVKPQIKQVVPEFVNASADAGGSSAXYMDQAPSPAVCPQAPYNMYPQNPDHVLDQDGEFDLDEXMDVARHVEELLRRPMDSLDSRLSPPAGLFXSARGSLS

SEQ ID NO: 26543 - protein, 125 aa, Homo sapiens
  MOD_RES (58)..(58): Selenocysteine
  MOD_RES (92)..(92): Selenocysteine
  MOD_RES (97)..(97): Selenocysteine
MAGWIQAQQLQGDALRQMQVLYGQHFPIEVRHYLAQWIESQPWDAIDLDNPQDRAQAXQLLEGLVQELQKKAEHQVGEDGFLLKIKLGHYAXQLQKXYDRCPLELVRCIRHILYNEQRLVREANN

SEQ ID NO: 26544 - protein, 763 aa, Homo sapiens
  MOD_RES (58)..(58): Selenocysteine
  MOD_RES (92)..(92): Selenocysteine
  MOD_RES (97)..(97): Selenocysteine
  MOD_RES (147)..(147): Selenocysteine
  MOD_RES (155)..(155): Selenocysteine
  MOD_RES (158)..(158): Selenocysteine
  MOD_RES (168)..(168): Selenocysteine
  MOD_RES (202)..(202): Selenocysteine
  MOD_RES (221)..(221): Selenocysteine
  MOD_RES (236)..(236): Selenocysteine
  MOD_RES (245)..(245): Selenocysteine
  MOD_RES (319)..(319): Selenocysteine
  MOD_RES (321)..(321): Selenocysteine
  MOD_RES (329)..(329): Selenocysteine
  MOD_RES (331)..(331): Selenocysteine
  MOD_RES (344)..(344): Selenocysteine
  MOD_RES (346)..(346): Selenocysteine
  MOD_RES (351)..(351): Selenocysteine
  MOD_RES (372)..(372): Selenocysteine
  MOD_RES (388)..(388): Selenocysteine
  MOD_RES (409)..(409): Selenocysteine
  MOD_RES (411)..(411): Selenocysteine
  MOD_RES (436)..(436): Selenocysteine
  MOD_RES (441)..(441): Selenocysteine
  MOD_RES (495)..(495): Selenocysteine
  MOD_RES (538)..(538): Selenocysteine
  MOD_RES (583)..(583): Selenocysteine
  MOD_RES (597)..(597): Selenocysteine
  MOD_RES (616)..(617): Selenocysteine
  MOD_RES (653)..(653): Selenocysteine
  MOD_RES (688)..(688): Selenocysteine
  MOD_RES (726)..(726): Selenocysteine
  MOD_RES (756)..(756): Selenocysteine
MAGWIQAQQLQGDALRQMQVLYGQHFPIEVRHYLAQWIESQPWDAIDLDNPQDRAQAXQLLEGLVQELQKKAEHQVGEDGFLLKIKLGHYAXQLQKXYDRCPLELVRCIRHILYNEQRLVREANNCSSPAGILVDAMSQKHLQINQXFEELRLVXQDXENELKKLQQXQEYFIIQYQESLRIQAQFAQLAQLSPQERLSREXALQQKQVSLEAWLQREAQXLQQYRVELAEKHQKXLQLLRKQQXIILDDELIQWKRRQQLAGNGGPPEGSLDVLQSWCEKLAEIIWQNRQQIRRAEHLCQQLPIPGPVEEMLAEVNAXIXDIISALVXSXFIIEKQPPQVLKXQXKFAAXVRLLVGGKLNVHMNPPQVKAXIISEQQAKSLLKNENXRNECSGEILNNCCVMEYHQAXGXLSAHFRNMSLKRIKRADRRGAESVXEEKFXVLFESQFSVGSNELVFQVKGRVPFAVPDKVLWPQLCEALNMKFKAEVQSNRGLXKENLVFLAQKLFNNSSSHLEDYSGLSVSWSQFNRENLPGWNYXFWQWFDGVMEVLKKHHKPHWNDGAILGFVNKQQAHDLLINKPDGXFLLRFSDSEIGGIXIAWKFDSPERNLWNLKPFXXRDFSIRSLADRLGDLSYLIYVFPDRPKDEVFSKYYXPVLAKAVDGYVKPQIKQVVPEFVNASADAGGSSAXYMDQAPSPAVCPQAPYNMYPQNPDHVLDQDGEFDLDEXMDVARHVEELLRRPMDSLDSRLSPPAGLFXSARGSLS

SEQ ID NO: 26545 - protein, 794 aa, Homo sapiens
  MOD_RES (58)..(58): Selenocysteine
  MOD_RES (92)..(92): Selenocysteine
  MOD_RES (97)..(97): Selenocysteine
  MOD_RES (147)..(147): Selenocysteine
  MOD_RES (155)..(155): Selenocysteine
  MOD_RES (158)..(158): Selenocysteine
  MOD_RES (168)..(168): Selenocysteine
  MOD_RES (202)..(202): Selenocysteine
  MOD_RES (221)..(221): Selenocysteine
  MOD_RES (236)..(236): Selenocysteine
  MOD_RES (245)..(245): Selenocysteine
  MOD_RES (319)..(319): Selenocysteine
  MOD_RES (321)..(321): Selenocysteine
  MOD_RES (329)..(329): Selenocysteine
  MOD_RES (331)..(331): Selenocysteine
  MOD_RES (344)..(344): Selenocysteine
  MOD_RES (346)..(346): Selenocysteine
  MOD_RES (351)..(351): Selenocysteine
  MOD_RES (372)..(372): Selenocysteine
  MOD_RES (388)..(388): Selenocysteine
  MOD_RES (409)..(409): Selenocysteine
  MOD_RES (411)..(411): Selenocysteine
  MOD_RES (436)..(436): Selenocysteine
  MOD_RES (441)..(441): Selenocysteine
  MOD_RES (461)..(461): Selenocysteine
  MOD_RES (479)..(479): Selenocysteine
  MOD_RES (481)..(481): Selenocysteine
  MOD_RES (526)..(526): Selenocysteine
  MOD_RES (569)..(569): Selenocysteine
  MOD_RES (614)..(614): Selenocysteine
  MOD_RES (628)..(628): Selenocysteine
  MOD_RES (647)..(648): Selenocysteine
  MOD_RES (684)..(684): Selenocysteine
  MOD_RES (719)..(719): Selenocysteine
  MOD_RES (757)..(757): Selenocysteine
  MOD_RES (787)..(787): Selenocysteine
MAGWIQAQQLQGDALRQMQVLYGQHFPIEVRHYLAQWIESQPWDAIDLDNPQDRAQAXQLLEGLVQELQKKAEHQVGEDGFLLKIKLGHYAXQLQKXYDRCPLELVRCIRHILYNEQRLVREANNCSSPAGILVDAMSQKHLQINQXFEELRLVXQDXENELKKLQQXQEYFIIQYQESLRIQAQFAQLAQLSPQERLSREXALQQKQVSLEAWLQREAQXLQQYRVELAEKHQKXLQLLRKQQXIILDDELIQWKRRQQLAGNGGPPEGSLDVLQSWCEKLAEIIWQNRQQIRRAEHLCQQLPIPGPVEEMLAEVNAXIXDIISALVXSXFIIEKQPPQVLKXQXKFAAXVRLLVGGKLNVHMNPPQVKAXIISEQQAKSLLKNENXRNECSGEILNNCCVMEYHQAXGXLSAHFRNMSLKRIKRADRRGAESVXEEKFXVLFESQFSVGSNELVFQVKXLSLPVVVIVHGSQDHNAXAXVLWDNAFAEPGRVPFAVPDKVLWPQLCEALNMKFKAEVQSNRGLXKENLVFLAQKLFNNSSSHLEDYSGLSVSWSQFNRENLPGWNYXFWQWFDGVMEVLKKHHKPHWNDGAILGFVNKQQAHDLLINKPDGXFLLRFSDSEIGGIXIAWKFDSPERNLWNLKPFXXRDFSIRSLADRLGDLSYLIYVFPDRPKDEVFSKYYXPVLAKAVDGYVKPQIKQVVPEFVNASADAGGSSAXYMDQAPSPAVCPQAPYNMYPQNPDHVLDQDGEFDLDEXMDVARHVEELLRRPMDSLDSRLSPPAGLFXSARGSLS

SEQ ID NO: 26546 - protein, 229 aa, Homo sapiens
  MOD_RES (14)..(14): Selenocysteine
  MOD_RES (57)..(57): Selenocysteine
  MOD_RES (102)..(102): Selenocysteine
  MOD_RES (116)..(116): Selenocysteine
  MOD_RES (135)..(136): Selenocysteine
  MOD_RES (172)..(172): Selenocysteine
  MOD_RES (207)..(207): Selenocysteine
MKFKAEVQSNRGLXKENLVFLAQKLFNNSSSHLEDYSGLSVSWSQFNRENLPGWNYXFWQWFDGVMEVLKKHHKPHWNDGAILGFVNKQQAHDLLINKPDGXFLLRFSDSEIGGIXIAWKFDSPERNLWNLKPFXXRDFSIRSLADRLGDLSYLIYVFPDRPKDEVFSKYYXPVLAKAVDGYVKPQIKQVVPEFVNASADAGGSSAXYMDQAPSPAVCPQAPYNMYPQK

SEQ ID NO: 26547 - protein, 141 aa, Homo sapiens
  MOD_RES (11)..(11): Selenocysteine
  MOD_RES (19)..(19): Selenocysteine
  MOD_RES (22)..(22): Selenocysteine
  MOD_RES (32)..(32): Selenocysteine
  MOD_RES (66)..(66): Selenocysteine
  MOD_RES (85)..(85): Selenocysteine
  MOD_RES (100)..(100): Selenocysteine
  MOD_RES (109)..(109): Selenocysteine
MSQKHLQINQXFEELRLVXQDXENELKKLQQXQEYFIIQYQESLRIQAQFAQLAQLSPQERLSREXALQQKQVSLEAWLQREAQXLQQYRVELAEKHQKXLQLLRKQQXIILDDELIQWKRRQQLAGNGGPPEGSLDVLQS

SEQ ID NO: 26548 - protein, 156 aa, Homo sapiens
  MOD_RES (58)..(58): Selenocysteine
  MOD_RES (92)..(92): Selenocysteine
  MOD_RES (97)..(97): Selenocysteine
  MOD_RES (147)..(147): Selenocysteine
  MOD_RES (155)..(155): Selenocysteine
MAVWIQAQQLQGEALHQMQALYGQHFPIEVRHYLSQWIESQAWDSVDLDNPQENIKAXQLLEGLVQELQKKAEHQVGEDGFLLKIKLGHYAXQLQNXYDRCPMELVRCIRHILYNEQRLVREANNGSSPAGSLADAMSQKHLQINQXFEELRLVXQ

SEQ ID NO: 26549 - protein, 787 aa, Homo sapiens
  MOD_RES (58)..(58): Selenocysteine
  MOD_RES (92)..(92): Selenocysteine
  MOD_RES (97)..(97): Selenocysteine
  MOD_RES (147)..(147): Selenocysteine
  MOD_RES (155)..(155): Selenocysteine
  MOD_RES (158)..(158): Selenocysteine
  MOD_RES (168)..(168): Selenocysteine
  MOD_RES (202)..(202): Selenocysteine
  MOD_RES (221)..(221): Selenocysteine
  MOD_RES (236)..(236): Selenocysteine
  MOD_RES (245)..(245): Selenocysteine
  MOD_RES (319)..(319): Selenocysteine
  MOD_RES (321)..(321): Selenocysteine
  MOD_RES (329)..(329): Selenocysteine
  MOD_RES (331)..(331): Selenocysteine
  MOD_RES (344)..(344): Selenocysteine
  MOD_RES (346)..(346): Selenocysteine
  MOD_RES (351)..(351): Selenocysteine
  MOD_RES (372)..(372): Selenocysteine
  MOD_RES (388)..(388): Selenocysteine
  MOD_RES (409)..(409): Selenocysteine
  MOD_RES (411)..(411): Selenocysteine
  MOD_RES (436)..(436): Selenocysteine
  MOD_RES (441)..(441): Selenocysteine
  MOD_RES (461)..(461): Selenocysteine
  MOD_RES (479)..(479): Selenocysteine
  MOD_RES (481)..(481): Selenocysteine
  MOD_RES (526)..(526): Selenocysteine
  MOD_RES (569)..(569): Selenocysteine
  MOD_RES (614)..(614): Selenocysteine
  MOD_RES (628)..(628): Selenocysteine
  MOD_RES (647)..(648): Selenocysteine
  MOD_RES (684)..(684): Selenocysteine
  MOD_RES (692)..(692): Selenocysteine
  MOD_RES (724)..(724): Selenocysteine
  MOD_RES (753)..(753): Selenocysteine
  MOD_RES (762)..(762): Selenocysteine
MAVWIQAQQLQGEALHQMQALYGQHFPIEVRHYLSQWIESQAWDSVDLDNPQENIKAXQLLEGLVQELQKKAEHQVGEDGFLLKIKLGHYAXQLQNXYDRCPMELVRCIRHILYNEQRLVREANNGSSPAGSLADAMSQKHLQINQXFEELRLVXQDXENELKKLQQXQEYFIIQYQESLRIQAQFGPLAQLSPQERLSREXALQQKQVSLEAWLQREAQXLQQYRVELAEKHQKXLQLLRKQQXIILDDELIQWKRRQQLAGNGGPPEGSLDVLQSWCEKLAEIIWQNRQQIRRAEHLCQQLPIPGPVEEMLAEVNAXIXDIISALVXSXFIIEKQPPQVLKXQXKFAAXVRLLVGGKLNVHMNPPQVKAXIISEQQAKSLLKNENXRNDYSGEILNNCCVMEYHQAXGXLSAHFRNMSLKRIKRSDRRGAESVXEEKFXILFESQFSVGGNELVFQVKXLSLPVVVIVHGSQDNNAXAXVLWDNAFAEPGRVPFAVPDKVLWPQLCEALNMKFKAEVQSNRGLXKENLVFLAQKLFNNSSSHLEDYSGLSVSWSQFNRENLPGRNYXFWQWFDGVMEVLKKHLKPHWNDGAILGFVNKQQAHDLLINKPDGXFLLRFSDSEIGGIXIAWKFDSQERMFWNLMPFXXRDFSIRSLADRLGDLNYLIYVFPDRPKDEVYSKYYXPVPCESAXAKAVDGYVKPQIKQVVPEFVNASADAGGGSAXYMDQAPSPAVCPQAHYNMYPQNPDSVLDXDGDFDLEDXMDVARRVEELLGRPMDSQWIPHAQS

SEQ ID NO: 26550 - protein, 155 aa, Homo sapiens
  MOD_RES (73)..(73): Selenocysteine
  MOD_RES (77)..(77): Selenocysteine
  MOD_RES (86)..(86): Selenocysteine
  MOD_RES (93)..(93): Selenocysteine
  MOD_RES (119)..(119): Selenocysteine
  MOD_RES (122)..(122): Selenocysteine
  MOD_RES (124)..(124): Selenocysteine
  MOD_RES (139)..(139): Selenocysteine
  MOD_RES (148)..(148): Selenocysteine
IAHVIRGQDGSPQIENIQPFSAKDLSIRSLGDRIRDLAQLKNLYPKKPKDEAFRSHYKPEQMGKDGRGYVPAXIKMXVERDQPLPXPELQMPXMVPSYDLGMAPDSSMSMQLGPDMVCXHHXLXPSPRIKASPQKNQSXCCQPSRSLXCRCPPAW

SEQ ID NO: 26551 - protein, 154 aa, Homo sapiens
  MOD_RES (20)..(20): Selenocysteine
  MOD_RES (31)..(31): Selenocysteine
  MOD_RES (79)..(79): Selenocysteine
  MOD_RES (91)..(91): Selenocysteine
  MOD_RES (114)..(114): Selenocysteine
  MOD_RES (124)..(124): Selenocysteine
  MOD_RES (138)..(138): Selenocysteine
MDRVPFVVAERVPWEKMCEXLNLKFMAEVGXNRGLLPEHFLFLAQKIFNDNSLSMEAFQHRSVSWSQFNKEILLGRGFXFWQWFDGVLDLXKRCLRSYWSDRLIIGFISKQYVXSLLLNEPDGXFLLRFSDSEIGGIXIAHVIRGQDGSPQIEN

SEQ ID NO: 26552 - protein, 737 aa, Homo sapiens
  MOD_RES (22)..(22): Selenocysteine
  MOD_RES (58)..(58): Selenocysteine
  MOD_RES (63)..(63): Selenocysteine
  MOD_RES (76)..(77): Selenocysteine
  MOD_RES (143)..(143): Selenocysteine
  MOD_RES (148)..(148): Selenocysteine
  MOD_RES (157)..(157): Selenocysteine
  MOD_RES (160)..(160): Selenocysteine
  MOD_RES (175)..(175): Selenocysteine
  MOD_RES (177)..(177): Selenocysteine
  MOD_RES (207)..(207): Selenocysteine
  MOD_RES (227)..(227): Selenocysteine
  MOD_RES (234)..(234): Selenocysteine
  MOD_RES (266)..(266): Selenocysteine
  MOD_RES (270)..(270): Selenocysteine
  MOD_RES (283)..(283): Selenocysteine
  MOD_RES (315)..(315): Selenocysteine
  MOD_RES (344)..(344): Selenocysteine
  MOD_RES (355)..(355): Selenocysteine
  MOD_RES (403)..(403): Selenocysteine
  MOD_RES (415)..(415): Selenocysteine
  MOD_RES (438)..(438): Selenocysteine
  MOD_RES (448)..(448): Selenocysteine
  MOD_RES (462)..(462): Selenocysteine
  MOD_RES (535)..(535): Selenocysteine
  MOD_RES (539)..(539): Selenocysteine
  MOD_RES (548)..(548): Selenocysteine
  MOD_RES (555)..(555): Selenocysteine
  MOD_RES (656)..(656): Selenocysteine
  MOD_RES (668)..(668): Selenocysteine
  MOD_RES (674)..(674): Selenocysteine
  MOD_RES (688)..(688): Selenocysteine
  MOD_RES (693)..(693): Selenocysteine
MEQFRHLPMPFHWKQEELKFKXGLRRLQHRVGEIHLLREALQKGAEAGQVSLHSLIEXPANGXGPSEALAMLLQEXXGELEAAKALVLKRIQIWKRQQQLAGNGAPFEESLAPLQERCESLVDIYSQLQQEVGAAGGELEPKXRASLXGRLDEVLRXLVXSCFLVEKQPPQVLKXQXKFQAGVRFLLGLRFLGAPAKPPLVRADMVXEKQARELSVPQGPGAGAESXGEIINNXVPLENSIPGNCCSALFKNLLLKKIKRCERKGXESVXEEKCAVLFSASFXLGPGKLPIQLQALSLPLVVIVHGNQDNNAKAXILWDNAFSEMDRVPFVVAERVPWEKMCEXLNLKFMAEVGXNRGLLPEHFLFLAQKIFNDNSLSMEAFQHRSVSWSQFNKEILLGRGFXFWQWFDGVLDLXKRCLRSYWSDRLIIGFISKQYVXSLLLNEPDGXFLLRFSDSEIGGIXIAHVIRGQDGSPQIENIQPFSAKDLSIRSLGDRIRDLAQLKNLYPKKPKDEAFRSHYKPEQMGKDGRGYVPAXIKMXVERDQPLPXPELQMPXMVPSYDLGMAPDSSMSMQLGPDMVPQVYPPHSHSIPPYQGLSPEESVNVLSAFQEPHLQMPPSLGQMSLPFDQPHPQGLLPCQPQEHAVSSPDPLLCSDVXMVEDSCLSQPVXAFPQGXWIGEDIFPPLLPPXEQDLXKLLLEGQGESGGGSLGAQPLLQPSHYGQSGISMSHMDLRANPSW

SEQ ID NO: 26553 - protein, 38 aa, Homo sapiens
MSLWGLVSKMPPEKVQRLYVDFPQHLRHLLGDWLESQP

SEQ ID NO: 26554 - protein, 64 aa, Homo sapiens
  MOD_RES (60)..(60): Selenocysteine
MSLWGLVSKMPPEKVQRLYVDFPQHLRHLLGDWLESQPWEFLVGSDAFCCNLASALLSDXVQHL

SEQ ID NO: 26555 - protein, 141 aa, Homo sapiens
  MOD_RES (60)..(60): Selenocysteine
  MOD_RES (80)..(80): Selenocysteine
  MOD_RES (114)..(114): Selenocysteine
MSLWGLVSKMPPEKVQRLYVDFPQHLRHLLGDWLESQPWEFLVGSDAFCCNLASALLSDXVQHLQASSIYQRDPLKLVAXFRQILQGEKKAVMEQFRHLPMPFHWKQEELKFKXGLRRLQHRVGEIHLLREALQKGAEAGQ

SEQ ID NO: 26556 - protein, 74 aa, Homo sapiens
  MOD_RES (60)..(60): Selenocysteine
MSLWGLVSKMPPEKVQRLYVDFPQHLRHLLGDWLESQPWEFLVGSDAFCCNLASALLSDXVQHLQASVGEQGEG

SEQ ID NO: 26557 - protein, 103 aa, Homo sapiens
  MOD_RES (60)..(60): Selenocysteine
  MOD_RES (76)..(76): Selenocysteine
  MOD_RES (83)..(83): Selenocysteine
  MOD_RES (98)..(98): Selenocysteine
MSLWGLVSKMPPEKVQRLYVDFPQHLRHLLGDWLESQPWEFLVGSDAFCCNLASALLSDXVQHLQASVGEQGEGSXILQHISXLESIYQRDPLKLVAXFRQIL

SEQ ID NO: 26558 - protein, 105 aa, Homo sapiens
  MOD_RES (60)..(60): Selenocysteine
  MOD_RES (76)..(76): Selenocysteine
  MOD_RES (83)..(83): Selenocysteine
  MOD_RES (98)..(98): Selenocysteine
MSLWGLVSKMPPEKVQRLYVDFPQHLRHLLGDWLESQPWEFLVGSDAFCCNLASALLSDXVQHLQASVGEQGEGSXILQHISXLESIYQRDPLKLVAXFRQILQG

SEQ ID NO: 26559 - protein, 144 aa, Homo sapiens
  MOD_RES (60)..(60): Selenocysteine
  MOD_RES (76)..(76): Selenocysteine
  MOD_RES (83)..(83): Selenocysteine
  MOD_RES (98)..(98): Selenocysteine
  MOD_RES (132)..(132): Selenocysteine
MSLWGLVSKMPPEKVQRLYVDFPQHLRHLLGDWLESQPWEFLVGSDAFCCNLASALLSDXVQHLQASVGEQGEGSXILQHISXLESIYQRDPLKLVAXFRQILQGEKKAVMEQFRHLPMPFHWKQEELKFKXGLRRLQHRVGEI

SEQ ID NO: 26560 - protein, 154 aa, Homo sapiens
  MOD_RES (60)..(60): Selenocysteine
  MOD_RES (76)..(76): Selenocysteine
  MOD_RES (83)..(83): Selenocysteine
  MOD_RES (98)..(98): Selenocysteine
  MOD_RES (132)..(132): Selenocysteine
MSLWGLVSKMPPEKVQRLYVDFPQHLRHLLGDWLESQPWEFLVGSDAFCCNLASALLSDXVQHLQASVGEQGEGSXILQHISXLESIYQRDPLKLVAXFRQILQGEKKAVMEQFRHLPMPFHWKQEELKFKXGLRRLQHRVGEIHLLREALQKG

SEQ ID NO: 26561 - protein, 159 aa, Homo sapiens
  MOD_RES (60)..(60): Selenocysteine
  MOD_RES (76)..(76): Selenocysteine
  MOD_RES (83)..(83): Selenocysteine
  MOD_RES (98)..(98): Selenocysteine
  MOD_RES (132)..(132): Selenocysteine
MSLWGLVSKMPPEKVQRLYVDFPQHLRHLLGDWLESQPWEFLVGSDAFCCNLASALLSDXVQHLQASVGEQGEGSXILQHISXLESIYQRDPLKLVAXFRQILQGEKKAVMEQFRHLPMPFHWKQEELKFKXGLRRLQHRVGEIHLLREALQKGAEAGQ

SEQ ID NO: 26562 - protein, 847 aa, Homo sapiens
  MOD_RES (60)..(60): Selenocysteine
  MOD_RES (76)..(76): Selenocysteine
  MOD_RES (83)..(83): Selenocysteine
  MOD_RES (98)..(98): Selenocysteine
  MOD_RES (132)..(132): Selenocysteine
  MOD_RES (168)..(168): Selenocysteine
  MOD_RES (173)..(173): Selenocysteine
  MOD_RES (186)..(187): Selenocysteine
  MOD_RES (253)..(253): Selenocysteine
  MOD_RES (258)..(258): Selenocysteine
  MOD_RES (267)..(267): Selenocysteine
  MOD_RES (270)..(270): Selenocysteine
  MOD_RES (285)..(285): Selenocysteine
  MOD_RES (287)..(287): Selenocysteine
  MOD_RES (317)..(317): Selenocysteine
  MOD_RES (337)..(337): Selenocysteine
  MOD_RES (344)..(344): Selenocysteine
  MOD_RES (376)..(376): Selenocysteine
  MOD_RES (380)..(380): Selenocysteine
  MOD_RES (393)..(393): Selenocysteine
  MOD_RES (425)..(425): Selenocysteine
  MOD_RES (454)..(454): Selenocysteine
  MOD_RES (465)..(465): Selenocysteine
  MOD_RES (513)..(513): Selenocysteine
  MOD_RES (525)..(525): Selenocysteine
  MOD_RES (548)..(548): Selenocysteine
  MOD_RES (558)..(558): Selenocysteine
  MOD_RES (572)..(572): Selenocysteine
  MOD_RES (645)..(645): Selenocysteine
  MOD_RES (649)..(649): Selenocysteine
  MOD_RES (658)..(658): Selenocysteine
  MOD_RES (665)..(665): Selenocysteine
  MOD_RES (766)..(766): Selenocysteine
  MOD_RES (778)..(778): Selenocysteine
  MOD_RES (784)..(784): Selenocysteine
  MOD_RES (798)..(798): Selenocysteine
  MOD_RES (803)..(803): Selenocysteine
MSLWGLVSKMPPEKVQRLYVDFPQHLRHLLGDWLESQPWEFLVGSDAFCCNLASALLSDXVQHLQASVGEQGEGSXILQHISXLESIYQRDPLKLVAXFRQILQGEKKAVMEQFRHLPMPFHWKQEELKFKXGLRRLQHRVGEIHLLREALQKGAEAGQVSLHSLIEXPANGXGPSEALAMLLQEXXGELEAAKALVLKRIQIWKRQQQLAGNGAPFEESLAPLQERCESLVDIYSQLQQEVGAAGGELEPKXRASLXGRLDEVLRXLVXSCFLVEKQPPQVLKXQXKFQAGVRFLLGLRFLGAPAKPPLVRADMVXEKQARELSVPQGPGAGAESXGEIINNXVPLENSIPGNCCSALFKNLLLKKIKRCERKGXESVXEEKCAVLFSASFXLGPGKLPIQLQALSLPLVVIVHGNQDNNAKAXILWDNAFSEMDRVPFVVAERVPWEKMCEXLNLKFMAEVGXNRGLLPEHFLFLAQKIFNDNSLSMEAFQHRSVSWSQFNKEILLGRGFXFWQWFDGVLDLXKRCLRSYWSDRLIIGFISKQYVXSLLLNEPDGXFLLRFSDSEIGGIXIAHVIRGQDGSPQIENIQPFSAKDLSIRSLGDRIRDLAQLKNLYPKKPKDEAFRSHYKPEQMGKDGRGYVPAXIKMXVERDQPLPXPELQMPXMVPSYDLGMAPDSSMSMQLGPDMVPQVYPPHSHSIPPYQGLSPEESVNVLSAFQEPHLQMPPSLGQMSLPFDQPHPQGLLPCQPQEHAVSSPDPLLCSDVXMVEDSCLSQPVXAFPQGXWIGEDIFPPLLPPXEQDLXKLLLEGQGESGGGSLGAQPLLQPSHYGQSGISMSHMDLRANPSW

SEQ ID NO: 26563 - protein, 290 aa, Homo sapiens
  MOD_RES (1)..(1): Any amino acid
  MOD_RES (18)..(18): Selenocysteine
  MOD_RES (38)..(38): Selenocysteine
  MOD_RES (45)..(45): Selenocysteine
  MOD_RES (77)..(77): Selenocysteine
  MOD_RES (81)..(81): Selenocysteine
  MOD_RES (94)..(94): Selenocysteine
  MOD_RES (126)..(126): Selenocysteine
  MOD_RES (155)..(155): Selenocysteine
  MOD_RES (166)..(166): Selenocysteine
  MOD_RES (232)..(232): Selenocysteine
  MOD_RES (244)..(244): Selenocysteine
  MOD_RES (267)..(267): Selenocysteine
  MOD_RES (277)..(277): Selenocysteine
XFLGAPAKPPLVRADMVXEKQARELSVPQGPGAGAESXGEIINNXVPLENSIPGNCCSALFKNLLLKKIKRCERKGXESVXEEKCAVLFSASFXLGPGKLPIQLQALSLPLVVIVHGNQDNNAKAXILWDNAFSEMDRVPFVVAERVPWEKMCEXLNLKFMAEVGXNRGLLPEHFLFLAQKIFNDNSLSMEAFQHRSVSWSQFNKMRNLMLRGLCSLFKFPKQEILLGRGFXFWQWFDGVLDLXKRCLRSYWSDRLIIGFISKQYVXSLLLNEPDGXFLLRFSDSEIGGI

SEQ ID NO: 26564 - protein, 918 aa, Homo sapiens
  MOD_RES (14)..(14): Selenocysteine
  MOD_RES (37)..(37): Selenocysteine
  MOD_RES (39)..(39): Selenocysteine
  MOD_RES (58)..(58): Selenocysteine
  MOD_RES (61)..(61): Selenocysteine
  MOD_RES (85)..(85): Selenocysteine
  MOD_RES (94)..(94): Selenocysteine
  MOD_RES (96)..(96): Selenocysteine
  MOD_RES (113)..(113): Selenocysteine
  MOD_RES (115)..(115): Selenocysteine
  MOD_RES (130)..(130): Selenocysteine
  MOD_RES (183)..(183): Selenocysteine
  MOD_RES (190)..(190): Selenocysteine
  MOD_RES (194)..(194): Selenocysteine
  MOD_RES (221)..(221): Selenocysteine
  MOD_RES (260)..(260): Selenocysteine
  MOD_RES (285)..(285): Selenocysteine
  MOD_RES (289)..(289): Selenocysteine
  MOD_RES (317)..(317): Selenocysteine
  MOD_RES (396)..(396): Selenocysteine
  MOD_RES (471)..(471): Selenocysteine
  MOD_RES (493)..(493): Selenocysteine
  MOD_RES (510)..(510): Selenocysteine
  MOD_RES (544)..(544): Selenocysteine
  MOD_RES (553)..(553): Selenocysteine
  MOD_RES (578)..(578): Selenocysteine
  MOD_RES (654)..(654): Selenocysteine
  MOD_RES (659)..(659): Selenocysteine
  MOD_RES (662)..(662): Selenocysteine
  MOD_RES (680)..(680): Selenocysteine
  MOD_RES (709)..(710): Selenocysteine
  MOD_RES (715)..(715): Selenocysteine
  MOD_RES (747)..(747): Selenocysteine
  MOD_RES (771)..(771): Selenocysteine
  MOD_RES (789)..(789): Selenocysteine
  MOD_RES (838)..(838): Selenocysteine
  MOD_RES (841)..(841): Selenocysteine
  MOD_RES (850)..(850): Selenocysteine
  MOD_RES (892)..(892): Selenocysteine
  MOD_RES (897)..(897): Selenocysteine
  MOD_RES (907)..(907): Selenocysteine
  MOD_RES (909)..(909): Selenocysteine
  MOD_RES (915)..(915): Selenocysteine
MEPIYPFARPQMNXRFPSSRMVPFHFPPSKCALWNPXPXGDFIYLHLSYYRNPKLVVXEKXIRLAYRHAKQNKKNSSCFLLGSLXADEDEEGVXLXVDRFDPGREVPECLEIXPXASLPGDFLIPCKVHXQELCSREMIVHSVDDFSSALKALQCHICSKDSLDCALARNLSSNLNISQVQGXYKYGYLXMDEXRKLLLLLESDPKVYSLPLVGIWLSGIXHIYSPQVWACCLRYIFNSSVQERVFSESGNFIIVLYSMXHKEPEFYECFPCDGKIPDFRFQLLXSKEXLHLFKNVEPPDKNPIRCELSAESQNAEXEFFSKASKNFSIKRSSQKLSSGKMPIHDHDSGVEDEDFSPRPIPSPHPVSQKISKIQPSVPELSLVLDGNFIESNPLPXPLEMVNNENPPLINHLEHLKPLQPQLYDEKHSPEVEAGEPSLRGIPNQLNQDKPALLRHCKVRQPPAYKKGNPHXRNSIKPSSHNGPSHDIFEKLQXVSAGNVQNEEYPIRPSXLNSRQSSLAPQSQPHDFVFSPHNSGRPMELQIPXPPLPSYCSXNVCRCCQHHSHIQYSPLNSWQGANXVGSIQDVQSEALQKHSLFHPSGCPALYCNAFCSSSSPIALRPQGDMGSCSPHSNIEPSPVARPPSHMDLCNPQPCXVCMHXPKXESDNGMMGLSPDAYRFLXEQDRQLRLLQAQIQRLLEAQSLMPCSPKXXAVEDXVQAGRQMELVSVEAQSSPGLHMRKGVSIAVSXGASLFWNAAGEDQEPDSQMKQDDXKISSEDMNFSVDINNEVXSLPGSASSLKAVDIPSFEESNIAVEEEFNQPLSVSNGQLAESVSMCLQXGPXGGASNNSEXSEEPKIEHVMQPLLHQPSDNQKIYQDLLGQVNHLLNSSSKEXEQPSXKAVIISHECXRXQNVYHXKKK

SEQ ID NO: 26565 - protein, 1241 aa, Homo sapiens
  MOD_RES (14)..(14): Selenocysteine
  MOD_RES (37)..(37): Selenocysteine
  MOD_RES (39)..(39): Selenocysteine
  MOD_RES (58)..(58): Selenocysteine
  MOD_RES (61)..(61): Selenocysteine
  MOD_RES (85)..(85): Selenocysteine
  MOD_RES (94)..(94): Selenocysteine
  MOD_RES (96)..(96): Selenocysteine
  MOD_RES (113)..(113): Selenocysteine
  MOD_RES (115)..(115): Selenocysteine
  MOD_RES (130)..(130): Selenocysteine
  MOD_RES (183)..(183): Selenocysteine
  MOD_RES (190)..(190): Selenocysteine
  MOD_RES (194)..(194): Selenocysteine
  MOD_RES (221)..(221): Selenocysteine
  MOD_RES (260)..(260): Selenocysteine
  MOD_RES (285)..(285): Selenocysteine
  MOD_RES (289)..(289): Selenocysteine
  MOD_RES (317)..(317): Selenocysteine
  MOD_RES (396)..(396): Selenocysteine
  MOD_RES (471)..(471): Selenocysteine
  MOD_RES (493)..(493): Selenocysteine
  MOD_RES (510)..(510): Selenocysteine
  MOD_RES (544)..(544): Selenocysteine
  MOD_RES (553)..(553): Selenocysteine
  MOD_RES (578)..(578): Selenocysteine
  MOD_RES (654)..(654): Selenocysteine
  MOD_RES (659)..(659): Selenocysteine
  MOD_RES (662)..(662): Selenocysteine
  MOD_RES (680)..(680): Selenocysteine
  MOD_RES (709)..(710): Selenocysteine
  MOD_RES (715)..(715): Selenocysteine
  MOD_RES (747)..(747): Selenocysteine
  MOD_RES (771)..(771): Selenocysteine
  MOD_RES (789)..(789): Selenocysteine
  MOD_RES (856)..(856): Selenocysteine
  MOD_RES (859)..(859): Selenocysteine
  MOD_RES (868)..(868): Selenocysteine
  MOD_RES (910)..(910): Selenocysteine
  MOD_RES (915)..(915): Selenocysteine
  MOD_RES (925)..(925): Selenocysteine
  MOD_RES (927)..(927): Selenocysteine
  MOD_RES (933)..(933): Selenocysteine
  MOD_RES (937)..(937): Selenocysteine
  MOD_RES (952)..(952): Selenocysteine
  MOD_RES (967)..(967): Selenocysteine
  MOD_RES (1037)..(1037): Selenocysteine
  MOD_RES (1054)..(1054): Selenocysteine
  MOD_RES (1058)..(1058): Selenocysteine
  MOD_RES (1073)..(1073): Selenocysteine
  MOD_RES (1142)..(1142): Selenocysteine
  MOD_RES (1146)..(1146): Selenocysteine
  MOD_RES (1153)..(1153): Selenocysteine
  MOD_RES (1159)..(1159): Selenocysteine
  MOD_RES (1166)..(1166): Selenocysteine
  MOD_RES (1186)..(1186): Selenocysteine
  MOD_RES (1192)..(1192): Selenocysteine
  MOD_RES (1204)..(1204): Selenocysteine
  MOD_RES (1215)..(1215): Selenocysteine
  MOD_RES (1227)..(1227): Selenocysteine
MEPIYPFARPQMNXRFPSSRMVPFHFPPSKCALWNPXPXGDFIYLHLSYYRNPKLVVXEKXIRLAYRHAKQNKKNSSCFLLGSLXADEDEEGVXLXVDRFDPGREVPECLEIXPXASLPGDFLIPCKVHXQELCSREMIVHSVDDFSSALKALQCHICSKDSLDCALARNLSSNLNISQVQGXYKYGYLXMDEXRKLLLLLESDPKVYSLPLVGIWLSGIXHIYSPQVWACCLRYIFNSSVQERVFSESGNFIIVLYSMXHKEPEFYECFPCDGKIPDFRFQLLXSKEXLHLFKNVEPPDKNPIRCELSAESQNAEXEFFSKASKNFSIKRSSQKLSSGKMPIHDHDSGVEDEDFSPRPIPSPHPVSQKISKIQPSVPELSLVLDGNFIESNPLPXPLEMVNNENPPLINHLEHLKPLQPQLYDEKHSPEVEAGEPSLRGIPNQLNQDKPALLRHCKVRQPPAYKKGNPHXRNSIKPSSHNGPSHDIFEKLQXVSAGNVQNEEYPIRPSXLNSRQSSLAPQSQPHDFVFSPHNSGRPMELQIPXPPLPSYCSXNVCRCCQHHSHIQYSPLNSWQGANXVGSIQDVQSEALQKHSLFHPSGCPALYCNAFCSSSSPIALRPQGDMGSCSPHSNIEPSPVARPPSHMDLCNPQPCXVCMHXPKXESDNGMMGLSPDAYRFLXEQDRQLRLLQAQIQRLLEAQSLMPCSPKXXAVEDXVQAGRQMELVSVEAQSSPGLHMRKGVSIAVSXGASLFWNAAGEDQEPDSQMKQDDXKISSEDMNFSVDINNEVXSLPGSASSLKAVDIPSFEESNIAVEEEFNQPLSVSNSSSLVVRKEPDVPVFFPSGQLAESVSMCLQXGPXGGASNNSEXSEEPKIEHVMQPLLHQPSDNQKIYQDLLGQVNHLLNSSSKEXEQPSXKAVIISHECXRXQNVYHXKKKXHHSRLVDKDCVLNAXLKQLRSLGVKIDSPXKVKKNAHNVDHASVLACISPEAVISGLNCMSFANVGMSGLSPNGVDLSMEANAIALKYLNENQLSQLSVXRSNQNNCDPFSLLHINXDRSXVGLSLISPNNMSFAXKKYMKRYGLLQSSDNSEDEEEPPDNADSKSEYLLNQNLRSIPEQLGGQKEPSKNDHEIINCSNCESVGXNADXPVLRNIXNEVLQXKAKQQLXEKPAFLVKNLKPSPAVNLRXGKAEFXQHPEKENEGDIXIFPESLQPSEXLKQMNSMNSVGXFLDVKRLRQLPKLF

SEQ ID NO: 26566 - protein, 1270 aa, Homo sapiens
  MOD_RES (14)..(14): Selenocysteine
  MOD_RES (37)..(37): Selenocysteine
  MOD_RES (39)..(39): Selenocysteine
  MOD_RES (58)..(58): Selenocysteine
  MOD_RES (61)..(61): Selenocysteine
  MOD_RES (85)..(85): Selenocysteine
  MOD_RES (94)..(94): Selenocysteine
  MOD_RES (96)..(96): Selenocysteine
  MOD_RES (113)..(113): Selenocysteine
  MOD_RES (115)..(115): Selenocysteine
  MOD_RES (130)..(130): Selenocysteine
  MOD_RES (176)..(176): Selenocysteine
  MOD_RES (194)..(194): Selenocysteine
  MOD_RES (202)..(202): Selenocysteine
  MOD_RES (212)..(212): Selenocysteine
  MOD_RES (230)..(230): Selenocysteine
  MOD_RES (237)..(237): Selenocysteine
  MOD_RES (241)..(241): Selenocysteine
  MOD_RES (268)..(268): Selenocysteine
  MOD_RES (307)..(307): Selenocysteine
  MOD_RES (332)..(332): Selenocysteine
  MOD_RES (336)..(336): Selenocysteine
  MOD_RES (364)..(364): Selenocysteine
  MOD_RES (443)..(443): Selenocysteine
  MOD_RES (518)..(518): Selenocysteine
  MOD_RES (540)..(540): Selenocysteine
  MOD_RES (557)..(557): Selenocysteine
  MOD_RES (591)..(591): Selenocysteine
  MOD_RES (600)..(600): Selenocysteine
  MOD_RES (625)..(625): Selenocysteine
  MOD_RES (701)..(701): Selenocysteine
  MOD_RES (706)..(706): Selenocysteine
  MOD_RES (709)..(709): Selenocysteine
  MOD_RES (727)..(727): Selenocysteine
  MOD_RES (756)..(757): Selenocysteine
  MOD_RES (762)..(762): Selenocysteine
  MOD_RES (794)..(794): Selenocysteine
  MOD_RES (818)..(818): Selenocysteine
  MOD_RES (836)..(836): Selenocysteine
  MOD_RES (885)..(885): Selenocysteine
  MOD_RES (888)..(888): Selenocysteine
  MOD_RES (897)..(897): Selenocysteine
  MOD_RES (939)..(939): Selenocysteine
  MOD_RES (944)..(944): Selenocysteine
  MOD_RES (954)..(954): Selenocysteine
  MOD_RES (956)..(956): Selenocysteine
  MOD_RES (962)..(962): Selenocysteine
  MOD_RES (966)..(966): Selenocysteine
  MOD_RES (981)..(981): Selenocysteine
  MOD_RES (996)..(996): Selenocysteine
  MOD_RES (1066)..(1066): Selenocysteine
  MOD_RES (1083)..(1083): Selenocysteine
  MOD_RES (1087)..(1087): Selenocysteine
  MOD_RES (1102)..(1102): Selenocysteine
  MOD_RES (1171)..(1171): Selenocysteine
  MOD_RES (1175)..(1175): Selenocysteine
  MOD_RES (1182)..(1182): Selenocysteine
  MOD_RES (1188)..(1188): Selenocysteine
  MOD_RES (1195)..(1195): Selenocysteine
  MOD_RES (1215)..(1215): Selenocysteine
  MOD_RES (1221)..(1221): Selenocysteine
  MOD_RES (1233)..(1233): Selenocysteine
  MOD_RES (1244)..(1244): Selenocysteine
  MOD_RES (1256)..(1256): Selenocysteine
MEPIYPFARPQMNXRFPSSRMVPFHFPPSKCALWNPXPXGDFIYLHLSYYRNPKLVVXEKXIRLAYRHAKQNKKNSSCFLLGSLXADEDEEGVXLXVDRFDPGREVPECLEIXPXASLPGDFLIPCKVHXQELCSREMIVHSVDDFSSALKALQCHICSKDSLDCGKLLSLRVHIXSRESLDSVEFDLHWAAVXLANNFKCXPVKPIPIIPXALARNLSSNLNISQVQGXYKYGYLXMDEXRKLLLLLESDPKVYSLPLVGIWLSGIXHIYSPQVWACCLRYIFNSSVQERVFSESGNFIIVLYSMXHKEPEFYECFPCDGKIPDFRFQLLXSKEXLHLFKNVEPPDKNPIRCELSAESQNAEXEFFSKASKNFSIKRSSQKLSSGKMPIHDHDSGVEDEDFSPRPIPSPHPVSQKISKIQPSVPELSLVLDGNFIESNPLPXPLEMVNNENPPLINHLEHLKPLQPQLYDEKHSPEVEAGEPSLRGIPNQLNQDKPALLRHCKVRQPPAYKKGNPHXRNSIKPSSHNGPSHDIFEKLQXVSAGNVQNEEYPIRPSXLNSRQSSLAPQSQPHDFVFSPHNSGRPMELQIPXPPLPSYCSXNVCRCCQHHSHIQYSPLNSWQGANXVGSIQDVQSEALQKHSLFHPSGCPALYCNAFCSSSSPIALRPQGDMGSCSPHSNIEPSPVARPPSHMDLCNPQPCXVCMHXPKXESDNGMMGLSPDAYRFLXEQDRQLRLLQAQIQRLLEAQSLMPCSPKXXAVEDXVQAGRQMELVSVEAQSSPGLHMRKGVSIAVSXGASLFWNAAGEDQEPDSQMKQDDXKISSEDMNFSVDINNEVXSLPGSASSLKAVDIPSFEESNIAVEEEFNQPLSVSNGQLAESVSMCLQXGPXGGASNNSEXSEEPKIEHVMQPLLHQPSDNQKIYQDLLGQVNHLLNSSSKEXEQPSXKAVIISHECXRXQNVYHXKKKXHHSRLVDKDCVLNAXLKQLRSLGVKIDSPXKVKKNAHNVDHASVLACISPEAVISGLNCMSFANVGMSGLSPNGVDLSMEANAIALKYLNENQLSQLSVXRSNQNNCDPFSLLHINXDRSXVGLSLISPNNMSFAXKKYMKRYGLLQSSDNSEDEEEPPDNADSKSEYLLNQNLRSIPEQLGGQKEPSKNDHEIINCSNCESVGXNADXPVLRNIXNEVLQXKAKQQLXEKPAFLVKNLKPSPAVNLRXGKAEFXQHPEKENEGDIXIFPESLQPSEXLKQMNSMNSVGXFLDVKRLRQLPKLF

SEQ ID NO: 26567 - protein, 1287 aa, Homo sapiens
  MOD_RES (14)..(14): Selenocysteine
  MOD_RES (37)..(37): Selenocysteine
  MOD_RES (39)..(39): Selenocysteine
  MOD_RES (58)..(58): Selenocysteine
  MOD_RES (61)..(61): Selenocysteine
  MOD_RES (85)..(85): Selenocysteine
  MOD_RES (94)..(94): Selenocysteine
  MOD_RES (96)..(96): Selenocysteine
  MOD_RES (113)..(113): Selenocysteine
  MOD_RES (115)..(115): Selenocysteine
  MOD_RES (130)..(130): Selenocysteine
  MOD_RES (176)..(176): Selenocysteine
  MOD_RES (194)..(194): Selenocysteine
  MOD_RES (202)..(202): Selenocysteine
  MOD_RES (212)..(212): Selenocysteine
  MOD_RES (230)..(230): Selenocysteine
  MOD_RES (237)..(237): Selenocysteine
  MOD_RES (241)..(241): Selenocysteine
  MOD_RES (268)..(268): Selenocysteine
  MOD_RES (307)..(307): Selenocysteine
  MOD_RES (332)..(332): Selenocysteine
  MOD_RES (336)..(336): Selenocysteine
  MOD_RES (364)..(364): Selenocysteine
  MOD_RES (443)..(443): Selenocysteine
  MOD_RES (518)..(518): Selenocysteine
  MOD_RES (540)..(540): Selenocysteine
  MOD_RES (557)..(557): Selenocysteine
  MOD_RES (591)..(591): Selenocysteine
  MOD_RES (600)..(600): Selenocysteine
  MOD_RES (625)..(625): Selenocysteine
  MOD_RES (701)..(701): Selenocysteine
  MOD_RES (706)..(706): Selenocysteine
  MOD_RES (709)..(709): Selenocysteine
  MOD_RES (727)..(727): Selenocysteine
  MOD_RES (756)..(757): Selenocysteine
  MOD_RES (762)..(762): Selenocysteine
  MOD_RES (794)..(794): Selenocysteine
  MOD_RES (818)..(818): Selenocysteine
  MOD_RES (836)..(836): Selenocysteine
  MOD_RES (902)..(902): Selenocysteine
  MOD_RES (905)..(905): Selenocysteine
  MOD_RES (914)..(914): Selenocysteine
  MOD_RES (956)..(956): Selenocysteine
  MOD_RES (961)..(961): Selenocysteine
  MOD_RES (971)..(971): Selenocysteine
  MOD_RES (973)..(973): Selenocysteine
  MOD_RES (979)..(979): Selenocysteine
  MOD_RES (983)..(983): Selenocysteine
  MOD_RES (998)..(998): Selenocysteine
  MOD_RES (1013)..(1013): Selenocysteine
  MOD_RES (1083)..(1083): Selenocysteine
  MOD_RES (1100)..(1100): Selenocysteine
  MOD_RES (1104)..(1104): Selenocysteine
  MOD_RES (1119)..(1119): Selenocysteine
  MOD_RES (1188)..(1188): Selenocysteine
  MOD_RES (1192)..(1192): Selenocysteine
  MOD_RES (1199)..(1199): Selenocysteine
  MOD_RES (1205)..(1205): Selenocysteine
  MOD_RES (1212)..(1212): Selenocysteine
  MOD_RES (1232)..(1232): Selenocysteine
  MOD_RES (1238)..(1238): Selenocysteine
  MOD_RES (1250)..(1250): Selenocysteine
  MOD_RES (1261)..(1261): Selenocysteine
  MOD_RES (1273)..(1273): Selenocysteine
MEPIYPFARPQMNXRFPSSRMVPFHFPPSKCALWNPXPXGDFIYLHLSYYRNPKLVVXEKXIRLAYRHAKQNKKNSSCFLLGSLXADEDEEGVXLXVDRFDPGREVPECLEIXPXASLPGDFLIPCKVHXQELCSREMIVHSVDDFSSALKALQCHICSKDSLDCGKLLSLRVHIXSRESLDSVEFDLHWAAVXLANNFKCXPVKPIPIIPXALARNLSSNLNISQVQGXYKYGYLXMDEXRKLLLLLESDPKVYSLPLVGIWLSGIXHIYSPQVWACCLRYIFNSSVQERVFSESGNFIIVLYSMXHKEPEFYECFPCDGKIPDFRFQLLXSKEXLHLFKNVEPPDKNPIRCELSAESQNAEXEFFSKASKNFSIKRSSQKLSSGKMPIHDHDSGVEDEDFSPRPIPSPHPVSQKISKIQPSVPELSLVLDGNFIESNPLPXPLEMVNNENPPLINHLEHLKPLQPQLYDEKHSPEVEAGEPSLRGIPNQLNQDKPALLRHCKVRQPPAYKKGNPHXRNSIKPSSHNGPSHDIFEKLQXVSAGNVQNEEYPIRPSXLNSRQSSLAPQSQPHDFVFSPHNSGRPMELQIPXPPLPSYCSXNVCRCCQHHSHIQYSPLNSWQGANXVGSIQDVQSEALQKHSLFHPSGCPALYCNAFCSSSSPIALRPQGDMGSCSPHSNIEPSPVARPPSHMDLCNPQPCXVCMHXPKXESDNGMMGLSPDAYRFLXEQDRQLRLLQAQIQRLLEAQSLMPCSPKXXAVEDXVQAGRQMELVSVEAQSSPGLHMRKGVSIAVSXGASLFWNAAGEDQEPDSQMKQDDXKISSEDMNFSVDINNEVXSLPGSASSLKAVDIPSFEESNIAVEEEFNQPLSVSNSSLVVRKEPDVPVFFPSGQLAESVSMCLQXGPXGGASNNSEXSEEPKIEHVMQPLLHQPSDNQKIYQDLLGQVNHLLNSSSKEXEQPSXKAVIISHECXRXQNVYHXKKKXHHSRLVDKDCVLNAXLKQLRSLGVKIDSPXKVKKNAHNVDHASVLACISPEAVISGLNCMSFANVGMSGLSPNGVDLSMEANAIALKYLNENQLSQLSVXRSNQNNCDPFSLLHINXDRSXVGLSLISPNNMSFAXKKYMKRYGLLQSSDNSEDEEEPPDNADSKSEYLLNQNLRSIPEQLGGQKEPSKNDHEIINCSNCESVGXNADXPVLRNIXNEVLQXKAKQQLXEKPAFLVKNLKPSPAVNLRXGKAEFXQHPEKENEGDIXIFPESLQPSEXLKQMNSMNSVGXFLDVKRLRQLPKLF
